United States Patent Application Publication US 2021/0254056 A1 - sequence listing, part 10

SEQ ID NO: 19039 - protein, 312 aa, Homo sapiens
  MOD_RES (5)..(5): Selenocysteine
  MOD_RES (8)..(9): Selenocysteine
  MOD_RES (16)..(16): Selenocysteine
  MOD_RES (32)..(32): Selenocysteine
  MOD_RES (38)..(38): Selenocysteine
  MOD_RES (42)..(42): Selenocysteine
  MOD_RES (47)..(47): Selenocysteine
  MOD_RES (55)..(55): Selenocysteine
  MOD_RES (72)..(72): Selenocysteine
  MOD_RES (74)..(74): Selenocysteine
  MOD_RES (85)..(85): Selenocysteine
  MOD_RES (91)..(91): Selenocysteine
  MOD_RES (108)..(108): Selenocysteine
  MOD_RES (115)..(115): Selenocysteine
  MOD_RES (141)..(141): Selenocysteine
  MOD_RES (190)..(190): Selenocysteine
  MOD_RES (204)..(204): Selenocysteine
  MOD_RES (208)..(208): Selenocysteine
  MOD_RES (217)..(217): Selenocysteine
  MOD_RES (222)..(222): Selenocysteine
  MOD_RES (238)..(238): Selenocysteine
  MOD_RES (244)..(244): Selenocysteine
  MOD_RES (249)..(249): Selenocysteine
  MOD_RES (289)..(289): Selenocysteine
MRKHXAIXXFILLGLXEDPQLQVLLFMFLFIXYMLSVXGKLXIIALXMLDPHLKXPMYFFLQNLSFLEISFXAXCVPRFLYSISXGNKIIXYNACVIQLFFADLFGVXEFFLLAXMSYDRYVAICKPLHYMAIMSNKVCKXMVICCWMAALMIILPPLSLGFHLEFCDSNVINHFGCDALPILKIPCSDXSLIEQMVVASAVLXFIIXLVCVVLSYXYIIRXILKFPSVQQKKKAFSXCSSHIXVVSIXYGSCIFIYIKPSAKEEVNINKGVSVLISSISPMLNSFIYXLRNEQVKQAFHDSLKKIAFRLKK

SEQ ID NO: 19040 - protein, 312 aa, Homo sapiens
  MOD_RES (5)..(5): Selenocysteine
  MOD_RES (16)..(16): Selenocysteine
  MOD_RES (42)..(42): Selenocysteine
  MOD_RES (55)..(55): Selenocysteine
  MOD_RES (72)..(73): Selenocysteine
  MOD_RES (82)..(82): Selenocysteine
  MOD_RES (85)..(85): Selenocysteine
  MOD_RES (89)..(89): Selenocysteine
  MOD_RES (108)..(108): Selenocysteine
  MOD_RES (149)..(149): Selenocysteine
  MOD_RES (156)..(156): Selenocysteine
  MOD_RES (190)..(190): Selenocysteine
  MOD_RES (204)..(204): Selenocysteine
  MOD_RES (208)..(208): Selenocysteine
  MOD_RES (222)..(222): Selenocysteine
  MOD_RES (238)..(238): Selenocysteine
  MOD_RES (249)..(249): Selenocysteine
  MOD_RES (273)..(273): Selenocysteine
  MOD_RES (277)..(277): Selenocysteine
  MOD_RES (289)..(289): Selenocysteine
MKNHXRQIEFILLGLXDNSQLQIVIFLFLLLNCVLSMIGNFXIIALILLDSQLKXPMYFFLRNFSFLEISFXXACIPRFLIXIVXREKXISCNGCISQLFFYIFLGVXEFFLLAALSYDRYVAICKPLRYMSIMSNKVCYQLVFSSWVXGFLIIFXPLILGLNLDFCASNIIDHFICDISLILQLSCSDXHLLELIAFLLAVMXLIVXLFLVILSYSYIIKXILKFPSAQQKKKAFSXCSSHMIVVSIXYGSCMFIYIKPSANERVALSKGVXVLNXSVAPLLNPFIYXLRNQQVKQAFKAVFRKIFSASDK

SEQ ID NO: 19041 - protein, 312 aa, Homo sapiens
  MOD_RES (5)..(6): Selenocysteine
  MOD_RES (16)..(16): Selenocysteine
  MOD_RES (32)..(32): Selenocysteine
  MOD_RES (38)..(38): Selenocysteine
  MOD_RES (42)..(42): Selenocysteine
  MOD_RES (45)..(45): Selenocysteine
  MOD_RES (47)..(47): Selenocysteine
  MOD_RES (55)..(55): Selenocysteine
  MOD_RES (72)..(73): Selenocysteine
  MOD_RES (85)..(85): Selenocysteine
  MOD_RES (89)..(89): Selenocysteine
  MOD_RES (102)..(102): Selenocysteine
  MOD_RES (108)..(108): Selenocysteine
  MOD_RES (131)..(132): Selenocysteine
  MOD_RES (171)..(171): Selenocysteine
  MOD_RES (188)..(188): Selenocysteine
  MOD_RES (190)..(190): Selenocysteine
  MOD_RES (204)..(204): Selenocysteine
  MOD_RES (208)..(208): Selenocysteine
  MOD_RES (217)..(217): Selenocysteine
  MOD_RES (222)..(222): Selenocysteine
  MOD_RES (238)..(238): Selenocysteine
  MOD_RES (277)..(277): Selenocysteine
  MOD_RES (289)..(289): Selenocysteine
  MOD_RES (302)..(302): Selenocysteine
MRNHXXVANFILLGLXDDPQLQVIIFLLLFFXYMLSIXGNLXIIXLXLLDLHLKXPMYFFLRNFSFLEVSFXXVYIPKFLVSMAXGDKXISYNDCAAQLFFXILLGAXEFFLLAAMSYERYVAICKPLHYXXIMSSRVCSLLVFASWMAGFLIIFPPLLMGLQLDFCAANXVDHFFCDVSPILQLSCXDXDIIELMMLLSAILXLLVXLVLVILSYXNIIRXILKIPSSQQRKKAFSXCSSHMVVVSISYGSCIFMYVKPSAKERVSLNKGIALLSXSVAPMLNPFIYXLRNKQVKDVFKHXVKKIELFSMK

SEQ ID NO: 19042 - protein, 312 aa, Homo sapiens
  MOD_RES (5)..(5): Selenocysteine
  MOD_RES (8)..(8): Selenocysteine
  MOD_RES (16)..(16): Selenocysteine
  MOD_RES (32)..(32): Selenocysteine
  MOD_RES (38)..(38): Selenocysteine
  MOD_RES (45)..(45): Selenocysteine
  MOD_RES (47)..(47): Selenocysteine
  MOD_RES (55)..(55): Selenocysteine
  MOD_RES (72)..(72): Selenocysteine
  MOD_RES (82)..(82): Selenocysteine
  MOD_RES (85)..(85): Selenocysteine
  MOD_RES (89)..(89): Selenocysteine
  MOD_RES (108)..(108): Selenocysteine
  MOD_RES (131)..(131): Selenocysteine
  MOD_RES (136)..(136): Selenocysteine
  MOD_RES (140)..(140): Selenocysteine
  MOD_RES (188)..(188): Selenocysteine
  MOD_RES (190)..(190): Selenocysteine
  MOD_RES (204)..(204): Selenocysteine
  MOD_RES (208)..(208): Selenocysteine
  MOD_RES (210)..(210): Selenocysteine
  MOD_RES (217)..(217): Selenocysteine
  MOD_RES (222)..(222): Selenocysteine
  MOD_RES (238)..(238): Selenocysteine
  MOD_RES (260)..(260): Selenocysteine
  MOD_RES (267)..(267): Selenocysteine
  MOD_RES (277)..(277): Selenocysteine
  MOD_RES (289)..(289): Selenocysteine
MRNSXAVXDFILLGLXSDPQWQVVLFIFLLVXYMLSVXGNLIIIXLXLSDPHLQXPMYFFLRNFSFLEISFXSVCIPRFLVXVVXGNRXISYNGCVAQLFFFIFLGVXEFYLLAAMSYDRCMAICKPLHYXIIMSXRVCXLLVFSSWLAGFLIIFPPVMLLLQLDFCASNVIDHFICDSSPMLQLSCXNXHFLELMAFFLAVVXLMVXLXLVILSYXNIIRXILKIPSMSQRKKAFSXCSSHMIVVSISYSSCIFMYIKXSARERVXLSKGVAVLNXSVAPLLNPFIYXLRNKQVKQAFKSMVQKMIFSLNK

SEQ ID NO: 19043 - protein, 312 aa, Homo sapiens
  MOD_RES (5)..(5): Selenocysteine
  MOD_RES (8)..(8): Selenocysteine
  MOD_RES (16)..(16): Selenocysteine
  MOD_RES (32)..(32): Selenocysteine
  MOD_RES (38)..(38): Selenocysteine
  MOD_RES (42)..(42): Selenocysteine
  MOD_RES (47)..(47): Selenocysteine
  MOD_RES (55)..(55): Selenocysteine
  MOD_RES (71)..(71): Selenocysteine
  MOD_RES (84)..(84): Selenocysteine
  MOD_RES (107)..(107): Selenocysteine
  MOD_RES (130)..(131): Selenocysteine
  MOD_RES (175)..(175): Selenocysteine
  MOD_RES (187)..(187): Selenocysteine
  MOD_RES (189)..(189): Selenocysteine
  MOD_RES (191)..(191): Selenocysteine
  MOD_RES (203)..(203): Selenocysteine
  MOD_RES (207)..(207): Selenocysteine
  MOD_RES (216)..(216): Selenocysteine
  MOD_RES (221)..(221): Selenocysteine
  MOD_RES (237)..(237): Selenocysteine
  MOD_RES (259)..(259): Selenocysteine
  MOD_RES (268)..(268): Selenocysteine
  MOD_RES (276)..(276): Selenocysteine
  MOD_RES (288)..(288): Selenocysteine
MKNRXSVXDFILLGLXDNPQLQVVIFSFLFLXYVLSVXGNLXIISLXLLDSHLKXPMYFFLRNFSLEISFXSVCNPRFLISILXGDKSISYNACAAQLFFFIFLGSXEFFLLASMSYDCYVAICKPLHYXXIMSDRICYQLIISSWLAGFLVIFPPLAMGLQLDFCDSNVIDHFXCDSAPLLQISCXDXSXLELMSFILALFXLISXLILVILSYXYIIRXILRIPSAQQRKKAFSXCSSHVIVVSISYGSCIFMYVKXSAKEGVALXKGVAILNXSVAPMLNPFIYXLRNQQVKQAFKDVLRKISHKKKKH

SEQ ID NO: 19044 - protein, 308 aa, Homo sapiens
  MOD_RES (3)..(3): Selenocysteine
  MOD_RES (7)..(7): Selenocysteine
  MOD_RES (22)..(22): Selenocysteine
  MOD_RES (38)..(38): Selenocysteine
  MOD_RES (51)..(51): Selenocysteine
  MOD_RES (57)..(57): Selenocysteine
  MOD_RES (74)..(75): Selenocysteine
  MOD_RES (91)..(91): Selenocysteine
  MOD_RES (95)..(95): Selenocysteine
  MOD_RES (110)..(110): Selenocysteine
  MOD_RES (160)..(160): Selenocysteine
  MOD_RES (190)..(190): Selenocysteine
  MOD_RES (192)..(192): Selenocysteine
  MOD_RES (214)..(214): Selenocysteine
  MOD_RES (224)..(224): Selenocysteine
  MOD_RES (240)..(240): Selenocysteine
  MOD_RES (246)..(246): Selenocysteine
  MOD_RES (255)..(255): Selenocysteine
  MOD_RES (262)..(262): Selenocysteine
  MOD_RES (279)..(279): Selenocysteine
  MOD_RES (282)..(282): Selenocysteine
  MOD_RES (291)..(291): Selenocysteine
  MOD_RES (300)..(300): Selenocysteine
MDXGNKXLPQDFLLLGFPGSQXLQLSLFMLFLVMYILXVSGNVAILMLVSXSHQLHXPMYFFLSNLSFLEIWYXXAAVPKALAILLGRSQXISFXSCLLQMYFVFSLGCXEYFLLAAMAYDRCLAICYPLHYGAIMSSLLSAQLALGSWVCGFVAIAVPXALISGLSFCGPRAINHFFCDIAPWIALACXNXQAVELVAFVIAVVVILSSCLIXFVSYVYIISXILRIPSASGRSKAFSXCSSHLXVVLIWYGSXVFLHVRXSIKDALDLIKAVHVLNXVVXPVLNPFIYXLRNKEVREXLLKKWKGK

SEQ ID NO: 19045 - protein, 347 aa, Homo sapiens
  MOD_RES (5)..(5): Selenocysteine
  MOD_RES (9)..(9): Selenocysteine
  MOD_RES (33)..(33): Selenocysteine
  MOD_RES (37)..(37): Selenocysteine
  MOD_RES (47)..(47): Selenocysteine
  MOD_RES (56)..(56): Selenocysteine
  MOD_RES (73)..(73): Selenocysteine
  MOD_RES (90)..(90): Selenocysteine
  MOD_RES (98)..(98): Selenocysteine
  MOD_RES (108)..(108): Selenocysteine
  MOD_RES (115)..(115): Selenocysteine
  MOD_RES (124)..(124): Selenocysteine
  MOD_RES (132)..(133): Selenocysteine
  MOD_RES (143)..(143): Selenocysteine
  MOD_RES (159)..(159): Selenocysteine
  MOD_RES (191)..(192): Selenocysteine
  MOD_RES (218)..(218): Selenocysteine
  MOD_RES (223)..(223): Selenocysteine
  MOD_RES (239)..(239): Selenocysteine
  MOD_RES (245)..(245): Selenocysteine
  MOD_RES (254)..(254): Selenocysteine
  MOD_RES (260)..(260): Selenocysteine
  MOD_RES (281)..(281): Selenocysteine
  MOD_RES (290)..(290): Selenocysteine
  MOD_RES (295)..(295): Selenocysteine
MGNWXAAVXEFVLLGFSLSREVELLLLVLLLPXFLLXLLGNLLIISXVLSCSRLHXPMYFFLCNLSILDILFXSVISPKVLANLGSRDKXISFAGCIXQCYFYFFLGXVEFLLLXVMSYDRYAXICCPLRYXXIMRPSVCIGXVVFSWVGGFLSVLFPXILISQLPFCGSNIINHFFCDSGPLLALACADXXAIELMDFMLSSMVILCCIVLVAYSYXYIILXIVRIPSASGRKKAFNXCASHLXIVIISSGIXVFIYVXPSQKEYLEINKIPLVLSSVVXPFLNPFIYXLRNDXVQGVLRDVWVRVRGVFEKRMRAVLRSRLSSNKDHQGRACSSPPCVYSVKLQC

SEQ ID NO: 19046 - protein, 324 aa, Homo sapiens
  MOD_RES (7)..(8): Selenocysteine
  MOD_RES (47)..(47): Selenocysteine
  MOD_RES (53)..(53): Selenocysteine
  MOD_RES (57)..(57): Selenocysteine
  MOD_RES (61)..(61): Selenocysteine
  MOD_RES (74)..(75): Selenocysteine
  MOD_RES (77)..(77): Selenocysteine
  MOD_RES (106)..(106): Selenocysteine
  MOD_RES (115)..(115): Selenocysteine
  MOD_RES (136)..(136): Selenocysteine
  MOD_RES (141)..(141): Selenocysteine
  MOD_RES (144)..(144): Selenocysteine
  MOD_RES (154)..(154): Selenocysteine
  MOD_RES (164)..(164): Selenocysteine
  MOD_RES (189)..(189): Selenocysteine
  MOD_RES (191)..(191): Selenocysteine
  MOD_RES (210)..(210): Selenocysteine
  MOD_RES (237)..(237): Selenocysteine
  MOD_RES (241)..(241): Selenocysteine
  MOD_RES (257)..(257): Selenocysteine
  MOD_RES (266)..(266): Selenocysteine
  MOD_RES (319)..(319): Selenocysteine
MESPNRXXIQEFIFSAFPYSWVKSVVCFVPLLFIYAFIVVGNLVIIXVVQLNXHLHXPMYXFISALSFLEIWYXXAXIPKMLSSLLSERSISFNGCLLQMYFFHSXGICEVCLLXVMAFDHYLAICSPLHYPSIMXPKLCXQLXLSCCVCGFIXPLPEIAWISXLPFCGSNHLEHIFCDFLPVLRLACXDXRAIVMIQVVDVIHAVEIIXAVMLIFMSYDGIVAVILRIHSAGGRRXAFSXCVSHFIVFSLFFGSVXLMYLRFSAXYSLFWDIAIALAFAVLSPFFNPIIYSLRNKEIKEAIKKHIGQAKIFFSVRPGXSSKIF

SEQ ID NO: 19047 - protein, 331 aa, Homo sapiens
  MOD_RES (4)..(4): Selenocysteine
  MOD_RES (10)..(10): Selenocysteine
  MOD_RES (14)..(14): Selenocysteine
  MOD_RES (24)..(24): Selenocysteine
  MOD_RES (26)..(26): Selenocysteine
  MOD_RES (31)..(31): Selenocysteine
  MOD_RES (52)..(52): Selenocysteine
  MOD_RES (69)..(69): Selenocysteine
  MOD_RES (90)..(91): Selenocysteine
  MOD_RES (93)..(93): Selenocysteine
  MOD_RES (111)..(111): Selenocysteine
  MOD_RES (132)..(133): Selenocysteine
  MOD_RES (153)..(153): Selenocysteine
  MOD_RES (181)..(181): Selenocysteine
  MOD_RES (206)..(206): Selenocysteine
  MOD_RES (208)..(208): Selenocysteine
  MOD_RES (221)..(221): Selenocysteine
  MOD_RES (225)..(225): Selenocysteine
  MOD_RES (238)..(238): Selenocysteine
  MOD_RES (255)..(255): Selenocysteine
  MOD_RES (280)..(280): Selenocysteine
  MOD_RES (287)..(287): Selenocysteine
  MOD_RES (294)..(294): Selenocysteine
MCWXMPSPFXGSSXRNMESGNQSXVXEFIFXGFPQLQDGSLLYFFPLLFIYXFIIIDNLLIFSAVRLDXHLHNPMYNFISIFSFLEIWYXXAXIPKMLSNLISEKKAISMXGCILQMYFFHSLENSEGILLXXMAIDRYVAICNPLRYQMIMXPRLCAQLSAGSCLFGFLILLPEIVMISXLPFCGPNQIHQIFCDLVPVLSLACXDXSMILIEDVIHAVXIIIXFLIIALSYVRIVXVILRIPSSEGRQKAFSXCAGHLMVFPIFFGSVSLMYLRFSDXYPPVLDXAIALMFXVLAPFFNPIIYSLRNKDMNNAIKKLFCLQKVLNKPGG

SEQ ID NO: 19048 - protein, 315 aa, Homo sapiens
  MOD_RES (8)..(8): Selenocysteine
  MOD_RES (10)..(10): Selenocysteine
  MOD_RES (15)..(15): Selenocysteine
  MOD_RES (36)..(36): Selenocysteine
  MOD_RES (53)..(53): Selenocysteine
  MOD_RES (74)..(75): Selenocysteine
  MOD_RES (77)..(77): Selenocysteine
  MOD_RES (95)..(95): Selenocysteine
  MOD_RES (116)..(117): Selenocysteine
  MOD_RES (137)..(137): Selenocysteine
  MOD_RES (165)..(165): Selenocysteine
  MOD_RES (190)..(190): Selenocysteine
  MOD_RES (192)..(192): Selenocysteine
  MOD_RES (205)..(205): Selenocysteine
  MOD_RES (209)..(209): Selenocysteine
  MOD_RES (222)..(222): Selenocysteine
  MOD_RES (239)..(239): Selenocysteine
  MOD_RES (264)..(264): Selenocysteine
  MOD_RES (271)..(271): Selenocysteine
  MOD_RES (278)..(278): Selenocysteine
MESGNQSXVXEFIFXGFPQLQDGSLLYFFPLLFIYXFIIIDNLLIFSAVRLDXHLHNPMYNFISIFSFLEIWYXXAXIPKMLSNLISEKKAISMXGCILQMYFFHSLENSEGILLXXMAIDRYVAICNPLRYQMIMXPRLCAQLSAGSCLFGFLILLPEIVMISXLPFCGPNQIHQIFCDLVPVLSLACXDXSMILIEDVIHAVXIIIXFLIIALSYVRIVXVILRIPSSEGRQKAFSXCAGHLMVFPIFFGSVSLMYLRFSDXYPPVLDXAIALMFXVLAPFFNPIIYSLRNKDMNNAIKKLFCLQKVLNKPGG

SEQ ID NO: 19049 - protein, 343 aa, Homo sapiens
  MOD_RES (26)..(26): Selenocysteine
  MOD_RES (29)..(29): Selenocysteine
  MOD_RES (35)..(35): Selenocysteine
  MOD_RES (38)..(38): Selenocysteine
  MOD_RES (68)..(68): Selenocysteine
  MOD_RES (85)..(85): Selenocysteine
  MOD_RES (102)..(105): Selenocysteine
  MOD_RES (138)..(138): Selenocysteine
  MOD_RES (144)..(144): Selenocysteine
  MOD_RES (162)..(162): Selenocysteine
  MOD_RES (173)..(173): Selenocysteine
  MOD_RES (193)..(193): Selenocysteine
  MOD_RES (210)..(210): Selenocysteine
  MOD_RES (218)..(218): Selenocysteine
  MOD_RES (220)..(220): Selenocysteine
  MOD_RES (267)..(267): Selenocysteine
  MOD_RES (292)..(292): Selenocysteine
  MOD_RES (299)..(299): Selenocysteine
  MOD_RES (304)..(304): Selenocysteine
MKQYSVGNQHSNYRSLLFPFLCSQMXQLXASGNQXMVXEFLFSMFPHAHRGGLLFFIPLLLIYGFILXGNLIMFIVIQVGMALHXPLYFFISVLSFLEICYXXXXIPKMLSCLISEQKSISVAGCLLQMYFFHSLGIXESCVLXAMAIDRYIAICNPLRYPXIMIPKLCIQLXVGSCFCGFLLVLPEIAWISXLPFCGSNQIHQIFCDFXPVLSLACXDXFLVVIVDAIHAAEIVASFLVIALSYIRIIIVILGMHSAEGHHKAFSXCAAHLAVFLLFFGSVAVMYLRFSAXYSVFWDXAIAVXFVILAPFFNPIIYSLKNKDMKEAIGRLFHYQKRAGWAGK

SEQ ID NO: 19050 - protein, 313 aa, Homo sapiens
  MOD_RES (6)..(6): Selenocysteine
  MOD_RES (8)..(8): Selenocysteine
  MOD_RES (11)..(11): Selenocysteine
  MOD_RES (32)..(32): Selenocysteine
  MOD_RES (34)..(34): Selenocysteine
  MOD_RES (36)..(36): Selenocysteine
  MOD_RES (38)..(38): Selenocysteine
  MOD_RES (42)..(42): Selenocysteine
  MOD_RES (55)..(55): Selenocysteine
  MOD_RES (72)..(73): Selenocysteine
  MOD_RES (76)..(76): Selenocysteine
  MOD_RES (89)..(89): Selenocysteine
  MOD_RES (99)..(99): Selenocysteine
  MOD_RES (107)..(107): Selenocysteine
  MOD_RES (131)..(131): Selenocysteine
  MOD_RES (158)..(158): Selenocysteine
  MOD_RES (162)..(162): Selenocysteine
  MOD_RES (189)..(189): Selenocysteine
  MOD_RES (211)..(212): Selenocysteine
  MOD_RES (221)..(221): Selenocysteine
  MOD_RES (228)..(228): Selenocysteine
  MOD_RES (237)..(237): Selenocysteine
  MOD_RES (243)..(243): Selenocysteine
  MOD_RES (276)..(276): Selenocysteine
  MOD_RES (279)..(279): Selenocysteine
  MOD_RES (301)..(301): Selenocysteine
  MOD_RES (307)..(307): Selenocysteine
  MOD_RES (313)..(313): Selenocysteine
MGNWSXVXEIXLIAFPALLEIRISLFVVLVVXYXLXAXGNIXIISLIWIDHRLQXPMYFFLSNLSFLDILYXXVIXPKLLACLLGEEKXISFAGCMIQXYFYFFLGXVEFILLAVMSFDRYMAICDPLHYXVIMNSRACLLLVLGCWVGAFLSVLFPXIVVXRLPYCRKEINHFFCDIAPLLQVACINXHLIEKINFLLSALVILSSLAFXXGSYVYIISXILRIPSXQGRQKAFSXCASHIXVVSIAHGSNIFVYVRPNQNSSLDYDKVAAVLIXVVXPLLNPFIYSLRNEKVQEVLREXVNRIMXLIQRKX

SEQ ID NO: 19051 - protein, 312 aa, Homo sapiens
  MOD_RES (3)..(3): Selenocysteine
  MOD_RES (38)..(38): Selenocysteine
  MOD_RES (57)..(57): Selenocysteine
  MOD_RES (74)..(74): Selenocysteine
  MOD_RES (77)..(77): Selenocysteine
  MOD_RES (91)..(91): Selenocysteine
  MOD_RES (110)..(110): Selenocysteine
  MOD_RES (116)..(116): Selenocysteine
  MOD_RES (134)..(134): Selenocysteine
  MOD_RES (137)..(137): Selenocysteine
  MOD_RES (139)..(139): Selenocysteine
  MOD_RES (190)..(190): Selenocysteine
  MOD_RES (192)..(192): Selenocysteine
  MOD_RES (210)..(210): Selenocysteine
  MOD_RES (224)..(224): Selenocysteine
  MOD_RES (240)..(240): Selenocysteine
  MOD_RES (246)..(246): Selenocysteine
  MOD_RES (282)..(282): Selenocysteine
MDXGNWSQVAEFIILGFPHLQGVQIYLFLLLLLIYLMXVLGNLLIFLVVCLDSRLHXPMYHFVSILSFSELGYXAAXIPKMLANLLSEKKXISFSGCLLQIYFFHSLGAXECYLLXAMAYDRYLAICRPLHYPXLMXPXLCAEIAIGCWLGGLAGPVVEISLISRLPFCGPNRIQHVFCDFPPVLSLACXDXSINVLVDFVINSCKILAXFLLILCSYVQIICXVLRIPSAAGKRKAISXCASHFXVVLIFYGSILSMYVQLKKSYSLDYDQALAVVYSVLXPFLNPFIYSLRNKEIKEAVRRQLKRIGILA

SEQ ID NO: 19052 - protein, 317 aa, Homo sapiens
  MOD_RES (38)..(38): Selenocysteine
  MOD_RES (57)..(57): Selenocysteine
  MOD_RES (74)..(74): Selenocysteine
  MOD_RES (76)..(77): Selenocysteine
  MOD_RES (91)..(91): Selenocysteine
  MOD_RES (101)..(101): Selenocysteine
  MOD_RES (116)..(116): Selenocysteine
  MOD_RES (137)..(139): Selenocysteine
  MOD_RES (150)..(150): Selenocysteine
  MOD_RES (192)..(192): Selenocysteine
  MOD_RES (210)..(210): Selenocysteine
  MOD_RES (230)..(230): Selenocysteine
  MOD_RES (240)..(240): Selenocysteine
  MOD_RES (269)..(269): Selenocysteine
  MOD_RES (273)..(273): Selenocysteine
  MOD_RES (282)..(282): Selenocysteine
  MOD_RES (304)..(304): Selenocysteine
MDQYNHSSLAEFVFLGFASVGYVRGWLFVLLLLAYLFXICGNMLIFSVIRLDAALHXPMYHFVSVLSFLELWYXAXXIPKMLSNILSEKKXISFAGCLLQXYFFHSLGASECYLLXAMAYDRYLAICRPLHYPIIMXXXLCAKMAAACWXCGFLCPISEVILASQLPFCAYNEIQHIFCDFPPLLSLACKDXSANILVDFAINAFIILIXFFFIMISYARIIGAVLKIKXASGRKKAFSXCASHLAVVLIFFGSIIFMYVRLKKSYSLXLDRXLAIVYSVLXPMVNPIIYSLRNKEIIKAIKRXIFQKGDKASLAHL

SEQ ID NO: 19053 - protein, 317 aa, Homo sapiens
  MOD_RES (19)..(20): Selenocysteine
  MOD_RES (38)..(38): Selenocysteine
  MOD_RES (48)..(48): Selenocysteine
  MOD_RES (77)..(77): Selenocysteine
  MOD_RES (87)..(87): Selenocysteine
  MOD_RES (99)..(99): Selenocysteine
  MOD_RES (110)..(110): Selenocysteine
  MOD_RES (142)..(142): Selenocysteine
  MOD_RES (188)..(188): Selenocysteine
  MOD_RES (219)..(219): Selenocysteine
  MOD_RES (230)..(230): Selenocysteine
  MOD_RES (240)..(240): Selenocysteine
  MOD_RES (255)..(255): Selenocysteine
  MOD_RES (258)..(258): Selenocysteine
  MOD_RES (267)..(267): Selenocysteine
  MOD_RES (279)..(279): Selenocysteine
  MOD_RES (304)..(304): Selenocysteine
MRNLSGGHVEEFVLVGFPXXPPLQLLLFVLFFAIYLLXLLENALIVFXIWLAPSLHRPMYFFLGHLSFLELWYINVXIPRLLAAFLXQDGRVSYVGCMXQLYFFIALACXECVLLAVMAYDRYLAICGPLLYPSLMPSSLAXRLAAASWGSGFFSSMMKLLFISQLSYCGPNIINHFFCDISPLLNLXCSDKEQAELVDFLLALVMILLPLLAVVSSYXAIIAAILRIPXSRGRHKAFSXCAAHLAVVVIYYSSXLFXYARPRAMYXFNHNKIISVLYXIIVPFFNPAIYCLRNKEVKEAFRKXVMGRCHYPRDVQD

SEQ ID NO: 19054 - protein, 317 aa, Homo sapiens
  MOD_RES (5)..(5): Selenocysteine
  MOD_RES (9)..(9): Selenocysteine
  MOD_RES (12)..(12): Selenocysteine
  MOD_RES (35)..(35): Selenocysteine
  MOD_RES (40)..(40): Selenocysteine
  MOD_RES (66)..(66): Selenocysteine
  MOD_RES (76)..(76): Selenocysteine
  MOD_RES (79)..(79): Selenocysteine
  MOD_RES (109)..(109): Selenocysteine
  MOD_RES (114)..(114): Selenocysteine
  MOD_RES (144)..(144): Selenocysteine
  MOD_RES (159)..(159): Selenocysteine
  MOD_RES (171)..(171): Selenocysteine
  MOD_RES (197)..(197): Selenocysteine
  MOD_RES (201)..(201): Selenocysteine
  MOD_RES (228)..(228): Selenocysteine
  MOD_RES (244)..(244): Selenocysteine
  MOD_RES (250)..(250): Selenocysteine
  MOD_RES (258)..(258): Selenocysteine
  MOD_RES (266)..(266): Selenocysteine
  MOD_RES (269)..(269): Selenocysteine
  MOD_RES (286)..(286): Selenocysteine
MQPYXKNWXQVXEFVMMGFAGIHEAHLLFFILFLXMYLFXLVENLAIILVVGLDHRLRRPMYFFLXHLSCLEIWYXSVXVPKMLAGFIGVDGGKNISYADCLSQLFIFXFLGAXECFLLAAMAYDRYVAICMPLHYGAFVSWGXCIRLAAACWLVGFLXPILPIYLLSQLXFYGPNVIDHFSCDASPLLALSCSDVXWKEXVDFLVSLAVLLASSMVIAVSYGNIVWXLLHIRSAAERWKAFSXCAAHLXVVSLFYGXLFFMYVQXKVXSSINFNKVVSVFYSVVXPMLNPLIYSLRNKEVKGALGRVFSLNFWKGQ

SEQ ID NO: 19055 - protein, 331 aa, Homo sapiens
  MOD_RES (12)..(12): Selenocysteine
  MOD_RES (42)..(42): Selenocysteine
  MOD_RES (55)..(55): Selenocysteine
  MOD_RES (59)..(59): Selenocysteine
  MOD_RES (76)..(76): Selenocysteine
  MOD_RES (93)..(93): Selenocysteine
  MOD_RES (101)..(101): Selenocysteine
  MOD_RES (162)..(162): Selenocysteine
  MOD_RES (193)..(193): Selenocysteine
  MOD_RES (195)..(195): Selenocysteine
  MOD_RES (201)..(201): Selenocysteine
  MOD_RES (217)..(217): Selenocysteine
  MOD_RES (243)..(243): Selenocysteine
  MOD_RES (245)..(245): Selenocysteine
  MOD_RES (252)..(252): Selenocysteine
  MOD_RES (273)..(273): Selenocysteine
  MOD_RES (278)..(278): Selenocysteine
  MOD_RES (281)..(282): Selenocysteine
  MOD_RES (285)..(285): Selenocysteine
MSPDGNHSSDPXEFVLAGLPNLNSARVELFSVFLLVYLLNLXGNVLIVGVVRADXRLQXPMYFFLGNLSCLEILLXSVIIPKMLSNFLSRQHXISFAACIXQFYFYFFLGASEFLLLAVMSADRYLAICHPLRYPLLMSGAVCFRVALACWVGGLVPVLGPXVAVALLPFCKQGAVVQHFFCDSGPLLRLACXNXKKLEEXDFVLASLVIVSSLLIXAVSYGLIVLAVLSIPSASGRQKAFSXCXSHLIVVXLFYGSAIFLYVRPSQSGSVDXNWAVXVIXXFVXPLLNPFIYALRNEQVKEALKDMFRKVVAGVLGNLLLDKCLSEKAVK

SEQ ID NO: 19056 - protein, 323 aa, Homo sapiens
  MOD_RES (7)..(7): Selenocysteine
  MOD_RES (10)..(10): Selenocysteine
  MOD_RES (34)..(34): Selenocysteine
  MOD_RES (38)..(38): Selenocysteine
  MOD_RES (40)..(40): Selenocysteine
  MOD_RES (75)..(75): Selenocysteine
  MOD_RES (87)..(87): Selenocysteine
  MOD_RES (91)..(91): Selenocysteine
  MOD_RES (109)..(110): Selenocysteine
  MOD_RES (134)..(134): Selenocysteine
  MOD_RES (160)..(160): Selenocysteine
  MOD_RES (192)..(192): Selenocysteine
  MOD_RES (204)..(204): Selenocysteine
  MOD_RES (214)..(214): Selenocysteine
  MOD_RES (224)..(224): Selenocysteine
  MOD_RES (230)..(230): Selenocysteine
  MOD_RES (240)..(240): Selenocysteine
  MOD_RES (246)..(246): Selenocysteine
  MOD_RES (282)..(282): Selenocysteine
  MOD_RES (291)..(291): Selenocysteine
  MOD_RES (311)..(311): Selenocysteine
  MOD_RES (319)..(319): Selenocysteine
MNPENWXQVXSFVLLGFPSSHLIQFLVFLGLMVXYIVXAXGKLLIIVLSWIDQRLHIQMYFFLRNFSFLELLLVXVVVPKMLVVILXGDHXISFVSCIIQSYLYFFLGXXDFFLLAVMSLDRYLAICRPLRYEXLMNGHVCSQLVLASWLAGFLWVLCPXVLMASLPFCGPNGIDHFFRDSWPLLRLSCGDXHLLKLVAFMLSXLVLLGSLALXSVSYACILAXVLRAPXAAERRKAFSXCASHLXVVVIIYGSSIFLYIRMSEAQSKLLNKGASVLSCIIXPLLNPFIFXLRNDKVQQALREALGWPRLXAVMKLRVXSQRK

SEQ ID NO: 19057 - protein, 313 aa, Homo sapiens
  MOD_RES (41)..(41): Selenocysteine
  MOD_RES (51)..(51): Selenocysteine
  MOD_RES (55)..(55): Selenocysteine
  MOD_RES (72)..(72): Selenocysteine
  MOD_RES (74)..(74): Selenocysteine
  MOD_RES (91)..(91): Selenocysteine
  MOD_RES (93)..(93): Selenocysteine
  MOD_RES (108)..(108): Selenocysteine
  MOD_RES (114)..(114): Selenocysteine
  MOD_RES (132)..(132): Selenocysteine
  MOD_RES (157)..(157): Selenocysteine
  MOD_RES (190)..(190): Selenocysteine
  MOD_RES (203)..(203): Selenocysteine
  MOD_RES (212)..(212): Selenocysteine
  MOD_RES (221)..(222): Selenocysteine
  MOD_RES (238)..(238): Selenocysteine
  MOD_RES (244)..(244): Selenocysteine
  MOD_RES (253)..(253): Selenocysteine
  MOD_RES (276)..(276): Selenocysteine
  MOD_RES (280)..(280): Selenocysteine
  MOD_RES (289)..(289): Selenocysteine
  MOD_RES (294)..(294): Selenocysteine
  MOD_RES (297)..(297): Selenocysteine
MANLSQPSEFVLLGFSSFGELQALLYGPFLMLYLLAFMGNXIIIVMVIADXHLHXPMYFFLGNFSLLEILVXMXAVPRMLSDLLVPHKVIXFXGCMVQFYFHFSLGSXSFLILXDMALDRFVAICHPLRYGXLMSRAMCVQLAGAAWAAPFLAMVPXVLSRAHLDYCHGDVINHFFCDNEPLLQLSCSDXRLLEFWDFLMALXFVLSSFLVXLISYGYIVXXVLRIPSASSCQKAFSXCGSHLXLVFIGYSSXIFLYVRPGKAHSVQVRKVVALVXSVLXPFLNPFILXFCNQXVKXVLQGQMQRLKGLCKAQ

SEQ ID NO: 19058 - protein, 312 aa, Homo sapiens
  MOD_RES (5)..(5): Selenocysteine
  MOD_RES (8)..(8): Selenocysteine
  MOD_RES (23)..(23): Selenocysteine
  MOD_RES (32)..(32): Selenocysteine
  MOD_RES (36)..(36): Selenocysteine
  MOD_RES (46)..(46): Selenocysteine
  MOD_RES (72)..(74): Selenocysteine
  MOD_RES (82)..(82): Selenocysteine
  MOD_RES (88)..(88): Selenocysteine
  MOD_RES (107)..(108): Selenocysteine
  MOD_RES (114)..(114): Selenocysteine
  MOD_RES (123)..(123): Selenocysteine
  MOD_RES (132)..(132): Selenocysteine
  MOD_RES (135)..(135): Selenocysteine
  MOD_RES (152)..(152): Selenocysteine
  MOD_RES (158)..(158): Selenocysteine
  MOD_RES (190)..(190): Selenocysteine
  MOD_RES (201)..(201): Selenocysteine
  MOD_RES (230)..(230): Selenocysteine
  MOD_RES (235)..(235): Selenocysteine
  MOD_RES (238)..(238): Selenocysteine
  MOD_RES (244)..(244): Selenocysteine
  MOD_RES (261)..(261): Selenocysteine
  MOD_RES (277)..(277): Selenocysteine
  MOD_RES (280)..(280): Selenocysteine
  MOD_RES (289)..(289): Selenocysteine
  MOD_RES (304)..(304): Selenocysteine
  MOD_RES (308)..(308): Selenocysteine
MRNGXVIXEFILLGFPVIQGLQXPLFIAIFLXYILXLAGNGLIIAXVWAEPRLQIPMYFFLCNLSFLEIWYXXXVIPKLLGXFVVARXVICMSCCLLQAFFHFFVGXXEFLILXIMSFDRYLXICNPLHHPXIMXSKLCLQLALSSWVVGFXIVFCQXMLLIQLPFCGNNVISHFYCDVGPSLKAACIDXSILELLGVIAXILVIPGSLLFNMISYIYILSAILRIPSAXGHQKXFSXCASHLXVVSLLYGAVLFMYLRPXAHSSFKINKVVSVLNXILXPLLNPFIYXIRNKEVKGALRKAMXCPKXGHAK

SEQ ID NO: 19059 - protein, 325 aa, Homo sapiens
  MOD_RES (2)..(3): Selenocysteine
  MOD_RES (12)..(12): Selenocysteine
  MOD_RES (14)..(15): Selenocysteine
  MOD_RES (24)..(24): Selenocysteine
  MOD_RES (39)..(39): Selenocysteine
  MOD_RES (43)..(43): Selenocysteine
  MOD_RES (80)..(80): Selenocysteine
  MOD_RES (104)..(104): Selenocysteine
  MOD_RES (111)..(111): Selenocysteine
  MOD_RES (115)..(115): Selenocysteine
  MOD_RES (142)..(142): Selenocysteine
  MOD_RES (148)..(148): Selenocysteine
  MOD_RES (160)..(160): Selenocysteine
  MOD_RES (229)..(229): Selenocysteine
  MOD_RES (245)..(245): Selenocysteine
  MOD_RES (251)..(251): Selenocysteine
  MOD_RES (260)..(260): Selenocysteine
  MOD_RES (263)..(263): Selenocysteine
  MOD_RES (284)..(284): Selenocysteine
  MOD_RES (309)..(309): Selenocysteine
MXXIILEVDNHXVXXRFILLGFPXRPAFQLLFFSIFLAXYLLXLLENLLIILAIHSDGQLHKPMYFFLSHLSFLEMWYVXVISPKMLVDFLSHDKSISFNGCMXQLYFFVXFVCXEYILLAIMAFDRYVAICNPLRYPVIMXNQLCGXLAGGCWFCGLMXAMIKMVFIAQLHYCGMPQINHYFCDISPLLNVSCEDASQAEMVDFFLALMVIAIPLCVVVASYAAILAXILRIPSAQGRQKAFSXCASHLXVVILFYSMXLFXYARPKLMYAYNSNKVVSVLYXVIVPLLNPIIYCLRNHEVKAALRKXIHCRGSGPQGNGAFSS

SEQ ID NO: 19060 - protein, 309 aa, Homo sapiens
  MOD_RES (7)..(7): Selenocysteine
  MOD_RES (38)..(38): Selenocysteine
  MOD_RES (49)..(49): Selenocysteine
  MOD_RES (57)..(57): Selenocysteine
  MOD_RES (76)..(77): Selenocysteine
  MOD_RES (87)..(87): Selenocysteine
  MOD_RES (93)..(93): Selenocysteine
  MOD_RES (99)..(99): Selenocysteine
  MOD_RES (116)..(116): Selenocysteine
  MOD_RES (170)..(170): Selenocysteine
  MOD_RES (192)..(192): Selenocysteine
  MOD_RES (212)..(212): Selenocysteine
  MOD_RES (240)..(240): Selenocysteine
  MOD_RES (254)..(254): Selenocysteine
  MOD_RES (265)..(265): Selenocysteine
  MOD_RES (270)..(270): Selenocysteine
  MOD_RES (279)..(279): Selenocysteine
  MOD_RES (282)..(282): Selenocysteine
  MOD_RES (303)..(303): Selenocysteine
MKSWNNXIILEFLLLGISEEPELQAFLFGLFLSMYLVXVLGNLLIILAXISDSHLHXPMYFFLSNLSFVDICFVSXXVPKMLVNIQXHNKVIXYAGCIXQMCFFLLFVGLDNFLLXVMAYDRFVAICHPLHYMVIMNPQLCGLLVLASWIMSVLNSMLQSLMVLPLPFCXHMEIPHFFCEINQVVHLACSDXFLNDIVMYFAVALLGGGPLXGILYSYSKIVSSIRAISSAQGKYKAFSXCASHLSVVSLFYGXCLGVYLSSAAXHNSHXGAAASVMYXVVXPMLNPFIYSLRNKHIKGAMKXFFRGKQ

SEQ ID NO: 19061 - protein, 309 aa, Homo sapiens
  MOD_RES (7)..(7): Selenocysteine
  MOD_RES (38)..(38): Selenocysteine
  MOD_RES (49)..(49): Selenocysteine
  MOD_RES (57)..(57): Selenocysteine
  MOD_RES (76)..(77): Selenocysteine
  MOD_RES (87)..(87): Selenocysteine
  MOD_RES (93)..(93): Selenocysteine
  MOD_RES (99)..(99): Selenocysteine
  MOD_RES (133)..(133): Selenocysteine
  MOD_RES (170)..(170): Selenocysteine
  MOD_RES (192)..(192): Selenocysteine
  MOD_RES (240)..(240): Selenocysteine
  MOD_RES (254)..(254): Selenocysteine
  MOD_RES (261)..(261): Selenocysteine
  MOD_RES (265)..(265): Selenocysteine
  MOD_RES (270)..(270): Selenocysteine
  MOD_RES (273)..(273): Selenocysteine
  MOD_RES (279)..(279): Selenocysteine
  MOD_RES (282)..(282): Selenocysteine
MEPENDXGISEFVLLGLSEEPELQPFLFGLFLSMYLVXVLGNLLIILAXISDSHLHXPMYFFLSNLSFADICFISXXIPKMLINIQXQSRVIXYAGCIXQMCFFVLFGGLDSLLLAVMAYDRFVAICHPLHYXVIMNPRLCGLLVLASWMIAALNSLSQSLMVLWLSFCXDLEIPHFFCELNQVIHLACSDXFLNDMGMYFAAGLLAGGPLVGILCSYSKIVSSIRAISSAQGKYKAFSXCASHLSVVSLFCCXGLGVYLXSAAXHNSHXSAXASVMYXVAXPMLNPFIYSLRNKDIKRALKMSFRGKQ

SEQ ID NO: 19062 - protein, 319 aa, Homo sapiens
  MOD_RES (7)..(7): Selenocysteine
  MOD_RES (38)..(38): Selenocysteine
  MOD_RES (49)..(49): Selenocysteine
  MOD_RES (57)..(57): Selenocysteine
  MOD_RES (74)..(74): Selenocysteine
  MOD_RES (76)..(77): Selenocysteine
  MOD_RES (87)..(87): Selenocysteine
  MOD_RES (93)..(93): Selenocysteine
  MOD_RES (150)..(150): Selenocysteine
  MOD_RES (170)..(170): Selenocysteine
  MOD_RES (202)..(202): Selenocysteine
  MOD_RES (212)..(212): Selenocysteine
  MOD_RES (240)..(240): Selenocysteine
  MOD_RES (265)..(265): Selenocysteine
  MOD_RES (273)..(273): Selenocysteine
  MOD_RES (279)..(279): Selenocysteine
  MOD_RES (282)..(282): Selenocysteine
  MOD_RES (309)..(309): Selenocysteine
MEPGNDXQISEFLLLGFSQEPGLQPFLFGLFLSMYLVXVLGNLLIILAXISDSHLHXPMYFFLSNLSFADICVXSXXIPKMLMNIQXQNKVIXYIACLMQMYFFILFAGFENFLLSVMAYDRFVAICHPLHYMVIMNPHLCGLLVLASWXMSALYSLLQILMVVRLSFCXALEIPHFFCELNQVIQLACSDSFLNHMVIYFXVALLGGGPLXGILYSYSKIISSIHAISSAQGKYKAFSXCASHLSVVSLFYGAILGVYLSSAAXRNSHSSAXASVMYXVVXPMLNPFIYSLRNKDIKRALGIHLLWGXMKGQFFKKCP

SEQ ID NO: 19063 - protein, 320 aa, Homo sapiens
  MOD_RES (3)..(3): Selenocysteine
  MOD_RES (7)..(7): Selenocysteine
  MOD_RES (20)..(20): Selenocysteine
  MOD_RES (38)..(38): Selenocysteine
  MOD_RES (40)..(40): Selenocysteine
  MOD_RES (57)..(57): Selenocysteine
  MOD_RES (74)..(74): Selenocysteine
  MOD_RES (76)..(77): Selenocysteine
  MOD_RES (87)..(87): Selenocysteine
  MOD_RES (93)..(93): Selenocysteine
  MOD_RES (105)..(105): Selenocysteine
  MOD_RES (116)..(116): Selenocysteine
  MOD_RES (133)..(133): Selenocysteine
  MOD_RES (160)..(160): Selenocysteine
  MOD_RES (162)..(162): Selenocysteine
  MOD_RES (170)..(170): Selenocysteine
  MOD_RES (192)..(192): Selenocysteine
  MOD_RES (203)..(203): Selenocysteine
  MOD_RES (212)..(212): Selenocysteine
  MOD_RES (240)..(240): Selenocysteine
  MOD_RES (249)..(249): Selenocysteine
  MOD_RES (254)..(254): Selenocysteine
  MOD_RES (265)..(265): Selenocysteine
  MOD_RES (270)..(270): Selenocysteine
  MOD_RES (279)..(279): Selenocysteine
  MOD_RES (282)..(282): Selenocysteine
  MOD_RES (295)..(295): Selenocysteine
  MOD_RES (309)..(309): Selenocysteine
  MOD_RES (316)..(316): Selenocysteine
MEXGNQXHAQEFLLLGFSAXSEIQFILFGLFLSMYLVXFXGNLLIILAICSDSHLHXPMYFFLSNLSFADLCFXSXXVPKMLLNILXQNKFIXYAGCLSQIFFFXSFGCLDNLLLXVMAYDRFVAVCHPLHYXVIMNPQLCGLLVLGSWCISVMGSLLEXLXVLRLSFCXEMEIPHFFCDLLEVLKLACSDXFINNVVIYFAXGVLGVISFXGIFFSYYKIVFSILRISSAGRKHKAFSXCGSHLSVVXLFYGXGFGVYLSSAAXPSSRXSLVASVMYXMVXPMLNPFIYSLRNXDMKRALGRLLSRAXFFNGDIXAGLS

SEQ ID NO: 19064 - protein, 319 aa, Homo sapiens
  MOD_RES (7)..(7): Selenocysteine
  MOD_RES (38)..(38): Selenocysteine
  MOD_RES (48)..(48): Selenocysteine
  MOD_RES (57)..(57): Selenocysteine
  MOD_RES (74)..(74): Selenocysteine
  MOD_RES (76)..(77): Selenocysteine
  MOD_RES (87)..(87): Selenocysteine
  MOD_RES (93)..(93): Selenocysteine
  MOD_RES (99)..(99): Selenocysteine
  MOD_RES (116)..(116): Selenocysteine
  MOD_RES (118)..(118): Selenocysteine
  MOD_RES (133)..(133): Selenocysteine
  MOD_RES (160)..(160): Selenocysteine
  MOD_RES (162)..(162): Selenocysteine
  MOD_RES (170)..(170): Selenocysteine
  MOD_RES (192)..(192): Selenocysteine
  MOD_RES (203)..(203): Selenocysteine
  MOD_RES (239)..(239): Selenocysteine
  MOD_RES (253)..(253): Selenocysteine
  MOD_RES (264)..(264): Selenocysteine
  MOD_RES (269)..(269): Selenocysteine
  MOD_RES (278)..(278): Selenocysteine
  MOD_RES (281)..(281): Selenocysteine
  MOD_RES (308)..(308): Selenocysteine
  MOD_RES (314)..(314): Selenocysteine
MERGNQXEVGNFLLLGFAEDSDMQLLLHGLFLSMYLVXIIGNLLIILXISSDSHLHXPMYFFLSNLSFADICFXSXXVPKMLVNIQXQSKMIXFAGCLXQIFFFIAFGCLDNLLLXMXAYDRFVAICYPLHYXVIMNPRLCGLLVLGSWCISVMGSLLEXLXILRLSFCXNMEIPHFFCDPSEVLKLACSDXFINNIVMYFVXIVLGVFPLCGILFSYSQIFSSVLRVSARGQHKAFSXCGSHLSVVSLFYGXGLGVYLSSAVXPPSRXSLAASVMYXMVXPMLNPFIYSLRNKDMKGSLGRLLLRAXSLKEGXIAKLS

SEQ ID NO: 19065 - protein, 312 aa, Homo sapiens
  MOD_RES (7)..(7): Selenocysteine
  MOD_RES (38)..(38): Selenocysteine
  MOD_RES (57)..(57): Selenocysteine
  MOD_RES (75)..(75): Selenocysteine
  MOD_RES (87)..(87): Selenocysteine
  MOD_RES (99)..(99): Selenocysteine
  MOD_RES (112)..(112): Selenocysteine
  MOD_RES (116)..(116): Selenocysteine
  MOD_RES (148)..(148): Selenocysteine
  MOD_RES (155)..(155): Selenocysteine
  MOD_RES (182)..(182): Selenocysteine
  MOD_RES (192)..(192): Selenocysteine
  MOD_RES (197)..(197): Selenocysteine
  MOD_RES (203)..(203): Selenocysteine
  MOD_RES (240)..(240): Selenocysteine
  MOD_RES (254)..(254): Selenocysteine
  MOD_RES (261)..(261): Selenocysteine
  MOD_RES (265)..(265): Selenocysteine
  MOD_RES (279)..(279): Selenocysteine
  MOD_RES (282)..(282): Selenocysteine
MEAGNQXGFLEFILLGLSEDPELQPFIFGLFLSMYLVXVLGNLLIILAISSDSHLHXPMYFFLSNLSWVDICFSXCIVPKMLVNIQXENKAISYMDCLXQVYFSMFFPILDXLLLXVMAYDRFVAVCHPLHYMIIMNPHLCGLLVFVXWLIGVMXSLLHISLMMHLIFCKDFEIPHFFCELXYILQLACSDXFLNSXLIYFMXGVLGVFPLLGIIFSYSRIASSIRKMSSSGGKQKALSXCGSHLSVVSLFYGXGIGVHFXSAVXHSSQKISVASVMYXVVXPMLNPFIYSLRNKDVKGALGSLLSRAASCL

SEQ ID NO: 19066 - protein, 312 aa, Homo sapiens
  MOD_RES (7)..(7): Selenocysteine
  MOD_RES (38)..(38): Selenocysteine
  MOD_RES (57)..(57): Selenocysteine
  MOD_RES (76)..(77): Selenocysteine
  MOD_RES (99)..(99): Selenocysteine
  MOD_RES (112)..(112): Selenocysteine
  MOD_RES (133)..(133): Selenocysteine
  MOD_RES (167)..(167): Selenocysteine
  MOD_RES (170)..(170): Selenocysteine
  MOD_RES (172)..(172): Selenocysteine
  MOD_RES (192)..(192): Selenocysteine
  MOD_RES (203)..(203): Selenocysteine
  MOD_RES (231)..(231): Selenocysteine
  MOD_RES (240)..(240): Selenocysteine
  MOD_RES (254)..(254): Selenocysteine
  MOD_RES (265)..(265): Selenocysteine
  MOD_RES (273)..(273): Selenocysteine
  MOD_RES (282)..(282): Selenocysteine
MEAENLXELSKFLLLGLSDDPELQPVLFGLFLSMYLVXVLGNLLIILAVSSDSHLHXPMYFFLSNLSFVDICFISXXVPKMLVSIQARSKDISYMGCLXQVYFLMMFAGMDXFLLAVMAYDRFVAICHPLHYXVIMNPCLCGLLVLASWFIIFWFSLVHILLMKRLXFSXGXEIPHFFCEPAQVLKVACSNXLLNNIVLYVAXALLGVFPVAGILFSYSQIVSSLMGMSSXKGKYKAFSXCGSHLCVVSLFYGXGLGVYLSSAVXHSSQSSSXASVMYAMVXPMLNPFIYSLRNKDVKGALERLLSRADSCP

SEQ ID NO: 19067 - protein, 339 aa, Homo sapiens
  MOD_RES (19)..(19): Selenocysteine
  MOD_RES (25)..(25): Selenocysteine
  MOD_RES (56)..(56): Selenocysteine
  MOD_RES (75)..(75): Selenocysteine
  MOD_RES (92)..(92): Selenocysteine
  MOD_RES (94)..(95): Selenocysteine
  MOD_RES (105)..(105): Selenocysteine
  MOD_RES (117)..(117): Selenocysteine
  MOD_RES (185)..(185): Selenocysteine
  MOD_RES (210)..(210): Selenocysteine
  MOD_RES (248)..(248): Selenocysteine
  MOD_RES (258)..(258): Selenocysteine
  MOD_RES (272)..(272): Selenocysteine
  MOD_RES (297)..(297): Selenocysteine
  MOD_RES (300)..(300): Selenocysteine
MSYFPILFFFFLKRCPSYXEPQNLXGVSEFLLLGLSEDPELQPVLAGLFLSMYLVXVLGNLLIILAVSSDSHLHXPMYFFLSNLSLADIGFXSXXVPKMIVDMQXHSRVISYEGCLXQMSFFVLFACMDDMLLSVMAYDRFVAICHPLHYRIIMNPRLCGFLILLSFFISLLDSQLHNLIMLQLXCFKDVDISNFFCDPSQLLHLRCSDXFINEMVIYFMGAIFGCLPISGILFSYYKIVSPILRVPXSDGKYKAFSXCGSHLAVVCLFYGXGLVGYLSSAVLPSPRKSMVASVMYXVVXPMLNPFIYSLRNKDIQSALCRLHGRIIKSHHLHPFCYMG

SEQ ID NO: 19068 - protein, 311 aa, Homo sapiens
  MOD_RES (7)..(7): Selenocysteine
  MOD_RES (18)..(18): Selenocysteine
  MOD_RES (38)..(38): Selenocysteine
  MOD_RES (57)..(57): Selenocysteine
  MOD_RES (69)..(69): Selenocysteine
  MOD_RES (74)..(77): Selenocysteine
  MOD_RES (93)..(93): Selenocysteine
  MOD_RES (95)..(95): Selenocysteine
  MOD_RES (99)..(99): Selenocysteine
  MOD_RES (133)..(133): Selenocysteine
  MOD_RES (153)..(153): Selenocysteine
  MOD_RES (192)..(192): Selenocysteine
  MOD_RES (223)..(223): Selenocysteine
  MOD_RES (240)..(240): Selenocysteine
  MOD_RES (254)..(254): Selenocysteine
  MOD_RES (271)..(271): Selenocysteine
  MOD_RES (279)..(279): Selenocysteine
MGPRNQXAVSEFLLMKVXEDPELKLIPFSLFLSMYLVXILGNLLILLAVISDSHLHXPMYFLLFNLSFXDICLXXXXVPKILVNIQAQNQSIXYXGCLXQICLVLVFAGLESCFLAVMAYDRYVAICHPLRYXVLMNVHFWGLLILLSMFMSXMDALVQSLMVLQLSFCKNVEIPLFFCEVVQVIKLACSDXLINNILIYFASSVFGAIPLSGIIFSYSQIVXSVLRMPSARGKYKAFSXCGCHLSVFSLFYGXAFGVYISSAVAESSRIXAVASVMYXVVPQMMNPFIYSLRNKEMKKALRKLIGRLFPF

SEQ ID NO: 19069 - protein, 345 aa, Homo sapiens
  MOD_RES (8)..(8): Selenocysteine
  MOD_RES (28)..(28): Selenocysteine
  MOD_RES (59)..(59): Selenocysteine
  MOD_RES (78)..(78): Selenocysteine
  MOD_RES (96)..(98): Selenocysteine
  MOD_RES (114)..(114): Selenocysteine
  MOD_RES (120)..(120): Selenocysteine
  MOD_RES (154)..(154): Selenocysteine
  MOD_RES (172)..(172): Selenocysteine
  MOD_RES (191)..(191): Selenocysteine
  MOD_RES (209)..(209): Selenocysteine
  MOD_RES (213)..(213): Selenocysteine
  MOD_RES (240)..(240): Selenocysteine
  MOD_RES (243)..(243): Selenocysteine
  MOD_RES (261)..(261): Selenocysteine
  MOD_RES (286)..(286): Selenocysteine
  MOD_RES (292)..(292): Selenocysteine
  MOD_RES (321)..(321): Selenocysteine
MPMQLLLXDFIIFSIRFIINSMEARNQXAISKFLLLGLIEDPELQPVLFSLFLSMYLVXILGNLLILLAVISDSHLHXPMYFFLSNLSFLDICLSXXXIPKMLVNIQAQNRSIXYSGCLXQICFVLFFAGLENCLLAAMAYDRYVAICHPLRYXVIMNPRLCGLLILLSLLXSVVNALLLSLMVLRLSFCXDLEIPLFFCELAQVIQLXCSDXLINNILIYFAACIFGGVPLSGIILSYXQIXSCVLRMPSASGKHKAVSXCGSHLSIVLLFYGAGLGVYISSVVXDSPRKXAVASVMYSVFPQMVNPFIYSLRNKDMKGXLRKFIGRIPSLLWCAICFGFRFLE

SEQ ID NO: 19070 - protein, 312 aa, Homo sapiens
  MOD_RES (9)..(9): Selenocysteine
  MOD_RES (38)..(38): Selenocysteine
  MOD_RES (57)..(57): Selenocysteine
  MOD_RES (74)..(74): Selenocysteine
  MOD_RES (76)..(77): Selenocysteine
  MOD_RES (95)..(95): Selenocysteine
  MOD_RES (99)..(99): Selenocysteine
  MOD_RES (160)..(160): Selenocysteine
  MOD_RES (167)..(167): Selenocysteine
  MOD_RES (203)..(203): Selenocysteine
  MOD_RES (219)..(219): Selenocysteine
  MOD_RES (254)..(254): Selenocysteine
  MOD_RES (265)..(265): Selenocysteine
  MOD_RES (279)..(279): Selenocysteine
  MOD_RES (282)..(282): Selenocysteine
MKAGNFSDXPEFFLLGLSGDPELQPILFMLFLSMYLAXMLGNLLIILAVNSDSHLHXPMYFLLSILSLVDICFXSXXMPKMLVNIQAQAQSINYXGCLXQICFVLVFVGLENGILVMMAYDRFVAICHPLRYNVIMNPKLCGLLLLLSFIVSVLDALLHXLMVLQLXFCIDLEIPHFFCELAHILKLACSDVLINNILVYLVXSLLGVVPLSGIIFSYXRIVSSVMKIPSAGGKYKAFSICGSHLIVVSLFYGXGFGVYLSSGAXHSSRKGAIASVMYXVVXPMLNPLIYSLRNKDMLKALRKLISRIPSFH

SEQ ID NO: 19071 - protein, 326 aa, Homo sapiens
  MOD_RES (14)..(14): Selenocysteine
  MOD_RES (25)..(25): Selenocysteine
  MOD_RES (27)..(27): Selenocysteine
  MOD_RES (35)..(35): Selenocysteine
  MOD_RES (55)..(55): Selenocysteine
  MOD_RES (64)..(64): Selenocysteine
  MOD_RES (74)..(74): Selenocysteine
  MOD_RES (95)..(95): Selenocysteine
  MOD_RES (133)..(133): Selenocysteine
  MOD_RES (157)..(157): Selenocysteine
  MOD_RES (174)..(174): Selenocysteine
  MOD_RES (177)..(177): Selenocysteine
  MOD_RES (208)..(208): Selenocysteine
  MOD_RES (214)..(214): Selenocysteine
  MOD_RES (226)..(226): Selenocysteine
  MOD_RES (229)..(229): Selenocysteine
  MOD_RES (235)..(235): Selenocysteine
  MOD_RES (246)..(247): Selenocysteine
  MOD_RES (256)..(256): Selenocysteine
  MOD_RES (271)..(271): Selenocysteine
  MOD_RES (280)..(280): Selenocysteine
  MOD_RES (285)..(285): Selenocysteine
  MOD_RES (295)..(296): Selenocysteine
  MOD_RES (320)..(320): Selenocysteine
MGFLSPMHPCRPPXQRRMAAGNHSXVXEFILKGLXKRADLQLPLFLLFLGIYLVXIVGNLGMIXLICLNSQLHXPMYYFLSNLSLMDLCYSSVIXPKMLVNFVSEKNIISYAGCMSQLYFFLVFVIAECYMLXVMAYDRYVAICHPLLYNIIMSHHXCLLLVAVVYAIGLIGSXIEXGLMLKLPYCEHLISHYFCDILPLMKLSCSSXYDVEMXVFFSAGFNIIVXSLXVLVSYXFILSSILGISXXEGRSKAFSXCSSHLAAVGMFYGSXAFMYLKPSXISSLXQENVASVFYXXVIPMLNPLIYSLRNKEVKAAVQKXLRGKLF

SEQ ID NO: 19072 - protein, 310 aa, Homo sapiens
  MOD_RES (9)..(9): Selenocysteine
  MOD_RES (17)..(17): Selenocysteine
  MOD_RES (35)..(35): Selenocysteine
  MOD_RES (37)..(37): Selenocysteine
  MOD_RES (46)..(46): Selenocysteine
  MOD_RES (56)..(56): Selenocysteine
  MOD_RES (74)..(75): Selenocysteine
  MOD_RES (77)..(77): Selenocysteine
  MOD_RES (94)..(94): Selenocysteine
  MOD_RES (98)..(98): Selenocysteine
  MOD_RES (132)..(132): Selenocysteine
  MOD_RES (134)..(134): Selenocysteine
  MOD_RES (159)..(159): Selenocysteine
  MOD_RES (166)..(166): Selenocysteine
  MOD_RES (212)..(212): Selenocysteine
  MOD_RES (230)..(230): Selenocysteine
  MOD_RES (239)..(239): Selenocysteine
  MOD_RES (278)..(278): Selenocysteine
  MOD_RES (303)..(303): Selenocysteine
MAAKNSSVXEFILEGLXHQPGLRIPLFFLFLGFYXVXVVGNLGLIXLIGLNSHLHXPMYFFLFNLSLIDFCFSXXIXPKMLMSFVSRKNIISFXGCMXQLFFFCFFVVSESFILSAMAYDRYVAICNPLLYXVXMSCQVCLLLLLGAYGMGFAGAMAHXGSIMNLXFCADNLVNHFMCDILPLLELSCNSSYMNELVVFIVVAVDVGMPIVXVFISYALILSSILHNSSXEGRSKAFSXCSSHIIVVSLFFGSGAFMYLKPLSILPLEQGKVSSLFYXIIVPVLNPLIYSLRNKDVKVALRRXLGRKIFS

SEQ ID NO: 19073 - protein, 313 aa, Homo sapiens
  MOD_RES (10)..(10): Selenocysteine
  MOD_RES (18)..(18): Selenocysteine
  MOD_RES (38)..(38): Selenocysteine
  MOD_RES (47)..(47): Selenocysteine
  MOD_RES (57)..(57): Selenocysteine
  MOD_RES (78)..(78): Selenocysteine
  MOD_RES (99)..(99): Selenocysteine
  MOD_RES (116)..(116): Selenocysteine
  MOD_RES (135)..(135): Selenocysteine
  MOD_RES (145)..(145): Selenocysteine
  MOD_RES (157)..(157): Selenocysteine
  MOD_RES (160)..(160): Selenocysteine
  MOD_RES (167)..(167): Selenocysteine
  MOD_RES (190)..(190): Selenocysteine
  MOD_RES (192)..(192): Selenocysteine
  MOD_RES (205)..(205): Selenocysteine
  MOD_RES (208)..(208): Selenocysteine
  MOD_RES (213)..(213): Selenocysteine
  MOD_RES (223)..(223): Selenocysteine
  MOD_RES (231)..(231): Selenocysteine
  MOD_RES (240)..(240): Selenocysteine
  MOD_RES (278)..(278): Selenocysteine
MLARNNSLVXEFILAGLXDHPEFRQPLFFLFLVIYIVXMVGNLGLIXLFGLNSHLHXPMYYFLFNLSFIDLCYSSVFXPKMLMNFVSKKNIISNVGCMXRLFFFLFFVISECYMLXSMAYDRYVAICNPLLYKVXMSHQVCSMLXFAAYIMGLAGAXAHXGCMLRLXFCSANIINHYLCDILPLLQLSCXSXYVNEVVVLIVVGXNIXVPSCXILISYVFIVXSILHIKSXQGRSKAFSXCSSHVIALSLFFGSAAFMYIKYSSGSMEQGKVSSVFYXNVVPMLNPLIYSLRNKDVKVALRKALIKIQRRNIF

SEQ ID NO: 19074 - protein, 313 aa, Homo sapiens
  MOD_RES (10)..(10): Selenocysteine
  MOD_RES (18)..(18): Selenocysteine
  MOD_RES (38)..(38): Selenocysteine
  MOD_RES (57)..(57): Selenocysteine
  MOD_RES (78)..(78): Selenocysteine
  MOD_RES (99)..(99): Selenocysteine
  MOD_RES (116)..(116): Selenocysteine
  MOD_RES (135)..(135): Selenocysteine
  MOD_RES (145)..(145): Selenocysteine
  MOD_RES (157)..(157): Selenocysteine
  MOD_RES (160)..(160): Selenocysteine
  MOD_RES (167)..(167): Selenocysteine
  MOD_RES (190)..(190): Selenocysteine
  MOD_RES (192)..(192): Selenocysteine
  MOD_RES (213)..(213): Selenocysteine
  MOD_RES (223)..(223): Selenocysteine
  MOD_RES (231)..(231): Selenocysteine
  MOD_RES (240)..(240): Selenocysteine
  MOD_RES (278)..(278): Selenocysteine
MLARNNSLVXEFILAGLXDHPEFQQPLFFLFLVVYIVXMVGNLGLIILFGLNSHLHXPMYYFLFNLSFIDLCYSSVFXPKMLMNFVSKKNIISYVGCMXQLFFFLFFVISECYMLXSMAYDRYVAICNPLLYKVXMSHQVCSMLXFAAYIMGLAGAXAHXGCMLRLXFCSANIINHYLCDILPLLQLSCXSXYVNEVVVLIVVGINIMVPSCXILISYVFIVXSILHIKSXQGRSKAFSXCSSHVIALSLFFGSAAFMYIKYSSGSMEQGKVSSVFYXNVVPMLNPLIYSLRNKDVKVALRKALIKIQRRNIF

SEQ ID NO: 19075 - protein, 309 aa, Homo sapiens
  MOD_RES (2)..(2): Selenocysteine
  MOD_RES (10)..(10): Selenocysteine
  MOD_RES (38)..(38): Selenocysteine
  MOD_RES (47)..(47): Selenocysteine
  MOD_RES (57)..(57): Selenocysteine
  MOD_RES (78)..(78): Selenocysteine
  MOD_RES (98)..(98): Selenocysteine
  MOD_RES (134)..(134): Selenocysteine
  MOD_RES (159)..(159): Selenocysteine
  MOD_RES (166)..(166): Selenocysteine
  MOD_RES (189)..(189): Selenocysteine
  MOD_RES (191)..(191): Selenocysteine
  MOD_RES (206)..(206): Selenocysteine
  MOD_RES (239)..(239): Selenocysteine
  MOD_RES (255)..(255): Selenocysteine
  MOD_RES (257)..(257): Selenocysteine
  MOD_RES (260)..(261): Selenocysteine
  MOD_RES (278)..(278): Selenocysteine
  MOD_RES (303)..(303): Selenocysteine
MXLRNSSSVXEFILVGLSEQPELQLPLFLLFLGIYVFXVVGNLGLIXLIGINPSLHXPMYFFLFNLSFIDLCYSCVFXPKMLNDFVSESIISYVGCMXQLFFFCFFVNSECYVLVSMAYDRYVAICNPLLYMVXMSPRVCFLLMFGSYVVGFAGAMAHXGSMLRLXFCDSNVIDHYLCDVLPLLQLSCXSXHVSELVFFIVVGVIXMLSSISIVISYALILSNILCIPSAEGRSKAFSXWGSHIIAVALFFGSGXFXYLXXSFPGSMNHGRFASVFYXNVVPMLNPSIYSLRNKDDKLALGKXLKRVLF

SEQ ID NO: 19076 - protein, 311 aa, Homo sapiens
  MOD_RES (10)..(10): Selenocysteine
  MOD_RES (18)..(18): Selenocysteine
  MOD_RES (38)..(38): Selenocysteine
  MOD_RES (47)..(47): Selenocysteine
  MOD_RES (57)..(57): Selenocysteine
  MOD_RES (78)..(78): Selenocysteine
  MOD_RES (99)..(99): Selenocysteine
  MOD_RES (135)..(135): Selenocysteine
  MOD_RES (160)..(160): Selenocysteine
  MOD_RES (167)..(167): Selenocysteine
  MOD_RES (190)..(190): Selenocysteine
  MOD_RES (192)..(192): Selenocysteine
  MOD_RES (211)..(211): Selenocysteine
  MOD_RES (213)..(213): Selenocysteine
  MOD_RES (231)..(231): Selenocysteine
  MOD_RES (240)..(240): Selenocysteine
  MOD_RES (279)..(280): Selenocysteine
MAAENSSFVXQFILAGLXDQPGVQIPLFFLFLGFYVVXVVGNLGLIXLIRLNSHLHXPMYFFLYNLSFIDFCYSSVIXPKMLMSFVLKKNSISYAGCMXQLFFFLFFVVSESFILSAMAYDRYVAICNPLLYMVXMSPQVCFLLLLGVYGMGFAGAMAHXACMMGVXFCANNLVNHYMCDILPLLECACXSXYVNELVVFVVVGIDIGVPXVXIFISYALILSSIFHIDSXEGRSKAFSXCSSHIIAVSLFFGSGAFMYLKPFSLLAMNQGKVSSLFYXXVVPMLNPLIYSLRNKDVKVALKKILNKNAFS

SEQ ID NO: 19077 - protein, 308 aa, Homo sapiens
  MOD_RES (2)..(2): Selenocysteine
  MOD_RES (18)..(18): Selenocysteine
  MOD_RES (38)..(38): Selenocysteine
  MOD_RES (57)..(57): Selenocysteine
  MOD_RES (78)..(78): Selenocysteine
  MOD_RES (91)..(91): Selenocysteine
  MOD_RES (116)..(116): Selenocysteine
  MOD_RES (158)..(158): Selenocysteine
  MOD_RES (160)..(160): Selenocysteine
  MOD_RES (192)..(192): Selenocysteine
  MOD_RES (207)..(207): Selenocysteine
  MOD_RES (211)..(211): Selenocysteine
  MOD_RES (240)..(240): Selenocysteine
  MOD_RES (256)..(256): Selenocysteine
  MOD_RES (279)..(280): Selenocysteine
MXMENYSMAAQFVLDGLXQQAELQLPLFLLFLGIYVVXVVGNLGMILLIAVSPLLHXPMYYFLSSLSFVDFCYSSVIXPKMLVNFLGKKNXILYSECMVQLFFFVVFVVAEGYLLXAMAYDRYVAICSPLLYNAIMSSWVCSLLVLAAFFLGFLSALXHXSAMMKLSFCKSHIINHYFCDVLPLLNLSCSNXHLNELLLFIIAGFNXLVPXLAVAVSYAFILYSILHIRSSEGRSKAFGXCSSHLMAVVIFFGSIXFMYFKPPSSNSLDQEKVSSVFYXXVIPMLNPLIYSLRNKDVKKALRKVLVGK

SEQ ID NO: 19078 - protein, 311 aa, Homo sapiens
  MOD_RES (3)..(3): Selenocysteine
  MOD_RES (18)..(18): Selenocysteine
  MOD_RES (38)..(38): Selenocysteine
  MOD_RES (78)..(78): Selenocysteine
  MOD_RES (99)..(99): Selenocysteine
  MOD_RES (116)..(116): Selenocysteine
  MOD_RES (157)..(157): Selenocysteine
  MOD_RES (160)..(161): Selenocysteine
  MOD_RES (173)..(173): Selenocysteine
  MOD_RES (186)..(186): Selenocysteine
  MOD_RES (192)..(192): Selenocysteine
  MOD_RES (207)..(207): Selenocysteine
  MOD_RES (210)..(211): Selenocysteine
  MOD_RES (231)..(231): Selenocysteine
  MOD_RES (240)..(240): Selenocysteine
  MOD_RES (256)..(256): Selenocysteine
  MOD_RES (266)..(267): Selenocysteine
  MOD_RES (280)..(280): Selenocysteine
  MOD_RES (305)..(305): Selenocysteine
MAXSNHSSGAEFILAGLXQRPELQLPLFLLFLGIYVVXVVGNLGMIFLIALSSQLYPPVYYFLSHLSFIDLCYSSVIXPKMLVNFVPEENIISFLECIXQLYFFLIFVIAEGYLLXAMEYDRYVAICRPLLYNIVMSHRVCSIMMAVVYSLGFLWAXVHXXRMSVLSFCRSHXVSHYFCDILPLLXLSCSSXHINEILLFIIGGVNXLAXXLAVLISYAFIFSSILGIHSXEGQSKAFGXCSSHLLAVGIFFGSIXFMYFKPPSSXXMEKEKVSSVFYIXIIPMLNPLIYSLRNKDVKNALKKMXRGRQSS

SEQ ID NO: 19079 - protein, 314 aa, Homo sapiens
  MOD_RES (8)..(8): Selenocysteine
  MOD_RES (10)..(10): Selenocysteine
  MOD_RES (18)..(18): Selenocysteine
  MOD_RES (36)..(36): Selenocysteine
  MOD_RES (38)..(38): Selenocysteine
  MOD_RES (57)..(57): Selenocysteine
  MOD_RES (78)..(78): Selenocysteine
  MOD_RES (154)..(154): Selenocysteine
  MOD_RES (192)..(192): Selenocysteine
  MOD_RES (210)..(210): Selenocysteine
  MOD_RES (213)..(213): Selenocysteine
  MOD_RES (223)..(223): Selenocysteine
  MOD_RES (240)..(240): Selenocysteine
  MOD_RES (246)..(246): Selenocysteine
  MOD_RES (269)..(269): Selenocysteine
  MOD_RES (279)..(280): Selenocysteine
MGVKNHSXVXEFLLSGLXEQAELQLPLFCLFLGIYXVXVVGNLSMISIIRLNRQLHXPMYYFLSSLSFLDFCYSSVIXPKMLSGFLCRDRSISYSGCMIQLFFFCVCVISECYMLAAMACDRYVAICSPLLYRVIMSPRVCSLLVAAVFSVGFXDAVIHGGCILRLSFCGSNIIKHYFCDIVPLIKLSCSSXYIDELLIFVIGGFNMVAXSLXIIISYAFILXSILRIHSKKGRCKAFSXCSSHLXAVLMFYGSLMSMYLKPASSSSLXQEKVSSVFYXXVILMLNPLIYSLRNNEVRNALMKLLRRKISLSPG

SEQ ID NO: 19080 - protein, 311 aa, Homo sapiens
  MOD_RES (10)..(10): Selenocysteine
  MOD_RES (38)..(38): Selenocysteine
  MOD_RES (46)..(47): Selenocysteine
  MOD_RES (57)..(57): Selenocysteine
  MOD_RES (75)..(75): Selenocysteine
  MOD_RES (78)..(78): Selenocysteine
  MOD_RES (87)..(87): Selenocysteine
  MOD_RES (99)..(99): Selenocysteine
  MOD_RES (160)..(160): Selenocysteine
  MOD_RES (213)..(213): Selenocysteine
  MOD_RES (231)..(231): Selenocysteine
  MOD_RES (240)..(240): Selenocysteine
  MOD_RES (279)..(279): Selenocysteine
  MOD_RES (309)..(309): Selenocysteine
MSGENNSSVXEFILAGLSEQPELQLPLFLLFLGIYVVXVVGNLGMXXLIWLSSHLHXPMYYFLSSLSFIDFCHSXVIXPKMLVNFVXEKNIISYPECMXQLYFFLVFAIAECHMLAAMAYDRYMAICSPLLYSVIISNKACFSLILGVYIIGLVCASVHXGCMFRVQFCKFDLINHYFCDLLPLLKLSCSSIYVNKLLILCVGAFNILVPSLXILCSYIFIIASILHIRSXEGRSKAFSXCSSHMLAVVIFFGSAAFMYLQPSSISSMDQGKVSSVFYXIIVPMLNPLIYSLRNKDVHVSLKKMLQRRXLL

SEQ ID NO: 19081 - protein, 346 aa, Homo sapiens
  MOD_RES (9)..(9): Selenocysteine
  MOD_RES (18)..(18): Selenocysteine
  MOD_RES (23)..(23): Selenocysteine
  MOD_RES (32)..(32): Selenocysteine
  MOD_RES (45)..(45): Selenocysteine
  MOD_RES (53)..(53): Selenocysteine
  MOD_RES (73)..(73): Selenocysteine
  MOD_RES (82)..(82): Selenocysteine
  MOD_RES (92)..(92): Selenocysteine
  MOD_RES (110)..(110): Selenocysteine
  MOD_RES (113)..(113): Selenocysteine
  MOD_RES (122)..(122): Selenocysteine
  MOD_RES (134)..(134): Selenocysteine
  MOD_RES (227)..(227): Selenocysteine
  MOD_RES (248)..(248): Selenocysteine
  MOD_RES (266)..(266): Selenocysteine
  MOD_RES (275)..(275): Selenocysteine
  MOD_RES (314)..(314): Selenocysteine
  MOD_RES (339)..(339): Selenocysteine
  MOD_RES (344)..(344): Selenocysteine
MIIYKQGIXFLQKENNNXIHLNXMFFLSPAEXHQRMAAENHSFVXKFILVGLXEKSELQLPLFLVFLGIYVVXVLGNLGMIXLIGLSSHLHXPMYCFLSSLSFIDFCHSXVIXPKMLVNFVXEKNIISYPECMXQLYFFLVFAIAECHMLAAMAYDGYVAICSPLLYSIIISNKACFSLILVVYVIGLICASAHIGCMFRVQFCKFDVINHYFCDLISILKLSCSSXYINELLILIFSGINILVPSLXILSSYIFIIASILRIRYXEGRSKAFSXCSSHISAVSVFFGSAAFMYLQPSSVSSMDQGKVSSVFYXIVVPMLNPLIYSLRNKDVHVALKKXLGKRXFL

SEQ ID NO: 19082 - protein, 311 aa, Homo sapiens
  MOD_RES (7)..(7): Selenocysteine
  MOD_RES (15)..(15): Selenocysteine
  MOD_RES (38)..(38): Selenocysteine
  MOD_RES (57)..(57): Selenocysteine
  MOD_RES (64)..(64): Selenocysteine
  MOD_RES (75)..(75): Selenocysteine
  MOD_RES (78)..(78): Selenocysteine
  MOD_RES (81)..(81): Selenocysteine
  MOD_RES (87)..(87): Selenocysteine
  MOD_RES (145)..(145): Selenocysteine
  MOD_RES (180)..(180): Selenocysteine
  MOD_RES (191)..(191): Selenocysteine
  MOD_RES (205)..(205): Selenocysteine
  MOD_RES (212)..(212): Selenocysteine
  MOD_RES (223)..(223): Selenocysteine
  MOD_RES (230)..(230): Selenocysteine
  MOD_RES (239)..(239): Selenocysteine
  MOD_RES (248)..(248): Selenocysteine
  MOD_RES (253)..(253): Selenocysteine
  MOD_RES (257)..(257): Selenocysteine
  MOD_RES (278)..(278): Selenocysteine
MGRRNNXNVPDFILXGLSDSEEVQMALFILFLLIYLIXMLGNVGMILIIRLDLQLHXPMYFFLXHLSFIDLSYSXVIXPKXLANLLXSNYISFMGCFAQMFFFVFLGAAECFLLSSMAYDRYVAICSPLRYPVIMSKRLCCALVXGPYVISFINSFVNVVWMSRLHFCDSNVVRHFFCDXSPILALSCMDXYDIEIMIHILAGSXLMVSLIXISASYVSILSXILKINSXSGKQKALSXCASHLLGVXIFYGXMIFXYLKPRKSYSLGRDQVASVFYXIVIPMLNPLIYSLRNKEVKNALIRVMQRRQDSR

SEQ ID NO: 19083 - protein, 309 aa, Homo sapiens
  MOD_RES (3)..(3): Selenocysteine
  MOD_RES (11)..(11): Selenocysteine
  MOD_RES (34)..(34): Selenocysteine
  MOD_RES (53)..(53): Selenocysteine
  MOD_RES (60)..(60): Selenocysteine
  MOD_RES (71)..(71): Selenocysteine
  MOD_RES (74)..(74): Selenocysteine
  MOD_RES (77)..(77): Selenocysteine
  MOD_RES (83)..(83): Selenocysteine
  MOD_RES (141)..(141): Selenocysteine
  MOD_RES (176)..(176): Selenocysteine
  MOD_RES (187)..(187): Selenocysteine
  MOD_RES (201)..(201): Selenocysteine
  MOD_RES (208)..(208): Selenocysteine
  MOD_RES (219)..(219): Selenocysteine
  MOD_RES (226)..(226): Selenocysteine
  MOD_RES (235)..(235): Selenocysteine
  MOD_RES (244)..(244): Selenocysteine
  MOD_RES (249)..(249): Selenocysteine
  MOD_RES (253)..(253): Selenocysteine
  MOD_RES (274)..(274): Selenocysteine
NNXNVPDFILXGLSDSEEVQMALFILFLLIYLIXMLGNVGMILIIRLDLQLHXPMYFFLXHLSFIDLSYSXVIXPKXLANLLXSNYISFMGCFAQMFFFVFLGAAECFLLSSMAYDRYVAICSPLRYPVIMSKRLCCALVXGPYVISFINSFVNVVWMSRLHFCDSNVVRHFFCDXSPILALSCMDXYDIEIMIHILAGSXLMVSLIXISASYVSILSXILKINSXSGKQKALSXCASHLLGVXIFYGXMIFXYLKPRKSYSLGRDQVASVFYXIVIPMLNPLIYSLRNKEVKNALIRVMQRIWYVLGL

SEQ ID NO: 19084 - protein, 311 aa, Homo sapiens
  MOD_RES (7)..(7): Selenocysteine
  MOD_RES (18)..(18): Selenocysteine
  MOD_RES (38)..(38): Selenocysteine
  MOD_RES (57)..(57): Selenocysteine
  MOD_RES (64)..(64): Selenocysteine
  MOD_RES (75)..(75): Selenocysteine
  MOD_RES (78)..(78): Selenocysteine
  MOD_RES (81)..(81): Selenocysteine
  MOD_RES (87)..(87): Selenocysteine
  MOD_RES (94)..(94): Selenocysteine
  MOD_RES (108)..(108): Selenocysteine
  MOD_RES (132)..(132): Selenocysteine
  MOD_RES (145)..(145): Selenocysteine
  MOD_RES (180)..(180): Selenocysteine
  MOD_RES (189)..(189): Selenocysteine
  MOD_RES (191)..(191): Selenocysteine
  MOD_RES (194)..(194): Selenocysteine
  MOD_RES (205)..(205): Selenocysteine
  MOD_RES (212)..(212): Selenocysteine
  MOD_RES (223)..(223): Selenocysteine
  MOD_RES (230)..(230): Selenocysteine
  MOD_RES (239)..(239): Selenocysteine
  MOD_RES (248)..(248): Selenocysteine
  MOD_RES (253)..(253): Selenocysteine
  MOD_RES (257)..(257): Selenocysteine
  MOD_RES (278)..(278): Selenocysteine
MGRRNNXNVADFILMGLXLSEEIQMALFMLFLLIYLIXMLGNVGMILIIRLDLQLHXPMYFFLXHLSFIDLSYSXVVXPKXLANLLXSNYISFXGCFAQMFFFAFLGXAECYLLSSMAHDRYAAICSPLHYXVIMSKRLCLALIXGPYVIGFIDSFVNVVSMSRLHFYDSNVIHHFFCDXSPILALSCXDXYNXEILIFIIVGSXLMVSLFXISASYVFILFXILKINSXSGKQKAFSXCVSHLLGVXIFYSXLIFXYLKPRKSYSLGRDQVASVFYXIVIPVLNPLIYSLRNKEVKNAVIRVMQRRQDSR

SEQ ID NO: 19085 - protein, 312 aa, Homo sapiens
  MOD_RES (8)..(8): Selenocysteine
  MOD_RES (19)..(19): Selenocysteine
  MOD_RES (39)..(39): Selenocysteine
  MOD_RES (58)..(58): Selenocysteine
  MOD_RES (65)..(65): Selenocysteine
  MOD_RES (76)..(76): Selenocysteine
  MOD_RES (79)..(79): Selenocysteine
  MOD_RES (82)..(82): Selenocysteine
  MOD_RES (88)..(88): Selenocysteine
  MOD_RES (95)..(95): Selenocysteine
  MOD_RES (109)..(109): Selenocysteine
  MOD_RES (133)..(133): Selenocysteine
  MOD_RES (146)..(146): Selenocysteine
  MOD_RES (181)..(181): Selenocysteine
  MOD_RES (190)..(190): Selenocysteine
  MOD_RES (192)..(192): Selenocysteine
  MOD_RES (195)..(195): Selenocysteine
  MOD_RES (206)..(206): Selenocysteine
  MOD_RES (213)..(213): Selenocysteine
  MOD_RES (224)..(224): Selenocysteine
  MOD_RES (231)..(231): Selenocysteine
  MOD_RES (240)..(240): Selenocysteine
  MOD_RES (249)..(249): Selenocysteine
  MOD_RES (254)..(254): Selenocysteine
  MOD_RES (258)..(258): Selenocysteine
  MOD_RES (279)..(279): Selenocysteine
MMGRRNNXNVADFILMGLXLSEEIQMALFMLFLLIYLIXMLGNVGMILIIRLDLQLHXPMYFFLXHLSFIDLSYSXVVXPKXLANLLXSNYISFXGCFAQMFFFAFLGXAECYLLSSMAHDRYAAICSPLHYXVIMSKRLCLALIXGPYVIGFIDSFVNVVSMSRLHFYDSNVIHHFFCDXSPILALSCXDXYNXEILIFIIVGSXLMVSLFXISASYVFILFXILKINSXSGKQKAFSXCVSHLLGVXIFYSXLIFXYLKPRKSYSLGRDQVASVFYXIVIPVLNPLIYSLRNKEVKNAVIRVMQRRQDSR

SEQ ID NO: 19086 - protein, 312 aa, Homo sapiens
  MOD_RES (8)..(8): Selenocysteine
  MOD_RES (16)..(16): Selenocysteine
  MOD_RES (39)..(39): Selenocysteine
  MOD_RES (58)..(58): Selenocysteine
  MOD_RES (65)..(65): Selenocysteine
  MOD_RES (76)..(76): Selenocysteine
  MOD_RES (79)..(79): Selenocysteine
  MOD_RES (82)..(82): Selenocysteine
  MOD_RES (88)..(88): Selenocysteine
  MOD_RES (95)..(95): Selenocysteine
  MOD_RES (109)..(109): Selenocysteine
  MOD_RES (133)..(133): Selenocysteine
  MOD_RES (146)..(146): Selenocysteine
  MOD_RES (181)..(181): Selenocysteine
  MOD_RES (190)..(190): Selenocysteine
  MOD_RES (192)..(192): Selenocysteine
  MOD_RES (195)..(195): Selenocysteine
  MOD_RES (206)..(206): Selenocysteine
  MOD_RES (213)..(213): Selenocysteine
  MOD_RES (224)..(224): Selenocysteine
  MOD_RES (231)..(231): Selenocysteine
  MOD_RES (240)..(240): Selenocysteine
  MOD_RES (249)..(249): Selenocysteine
  MOD_RES (254)..(254): Selenocysteine
  MOD_RES (258)..(258): Selenocysteine
  MOD_RES (279)..(279): Selenocysteine
MMGRRNDXNVADFILXGLSDSEEVQMALFMLFLLIYLIXMLGNVGMLLIIRLDLQLHXPMYFFLXHLSFIDLSYSXVVXPKXLANLLXSNYISFXGCFAQMFCFVFLGXAECYLLSSMAYDRYAAICSPLHYXVIMPKRLCLALIXGPYVIGFMDSFVNVVSMSRLHFCDSNIIHHFFCDXSPILALSCXDXDNXEMLIFIIAGSXLMVSLIXISASYVSILSXILKINSXSGKQKAFSXCVSHLLGVXIFYGXMIFXYLKPRKSYSLGRDQVAPVFYXIVIPMLNPLIYSLRNREVKNALIRVMQRRQDSR

SEQ ID NO: 19087 - protein, 310 aa, Homo sapiens
  MOD_RES (7)..(7): Selenocysteine
  MOD_RES (10)..(10): Selenocysteine
  MOD_RES (38)..(38): Selenocysteine
  MOD_RES (47)..(47): Selenocysteine
  MOD_RES (57)..(57): Selenocysteine
  MOD_RES (76)..(76): Selenocysteine
  MOD_RES (78)..(78): Selenocysteine
  MOD_RES (154)..(154): Selenocysteine
  MOD_RES (180)..(181): Selenocysteine
  MOD_RES (191)..(191): Selenocysteine
  MOD_RES (194)..(194): Selenocysteine
  MOD_RES (205)..(205): Selenocysteine
  MOD_RES (214)..(214): Selenocysteine
  MOD_RES (216)..(216): Selenocysteine
  MOD_RES (239)..(239): Selenocysteine
  MOD_RES (248)..(248): Selenocysteine
  MOD_RES (257)..(257): Selenocysteine
  MOD_RES (264)..(264): Selenocysteine
  MOD_RES (268)..(268): Selenocysteine
  MOD_RES (278)..(278): Selenocysteine
MAGNNFXEVXVFILSGFANHPELQVSLFLMFLFIYLFXVLGNLGLIXLIRMDSQLHXPMYFFLSNLAFIDIFYSSXVXPKALVNFQSNRRSISFVGCFVQMYFFVGLVCCECFLLGSMAYNRYIAICNPLLYSVVMSQKVSNWLGVMPYVIGFXSSLISVWVISSLAFCDSSINHFFCDXXALLALSCVDXFGXEMVSFVLAGFXLLSSLLIIXVXYIIIISAILRIQSAAGRQKAFSXCASHLMAVXIFYGSLIFXYLQPDNXSSLXQAQVASVFYXIVIPMLNPLIYSLRNKDVKNALLRVIHRKLFP

SEQ ID NO: 19088 - protein, 316 aa, Homo sapiens
  MOD_RES (7)..(7): Selenocysteine
  MOD_RES (10)..(10): Selenocysteine
  MOD_RES (15)..(15): Selenocysteine
  MOD_RES (38)..(38): Selenocysteine
  MOD_RES (47)..(47): Selenocysteine
  MOD_RES (49)..(49): Selenocysteine
  MOD_RES (57)..(57): Selenocysteine
  MOD_RES (75)..(75): Selenocysteine
  MOD_RES (91)..(92): Selenocysteine
  MOD_RES (99)..(99): Selenocysteine
  MOD_RES (148)..(148): Selenocysteine
  MOD_RES (155)..(155): Selenocysteine
  MOD_RES (192)..(192): Selenocysteine
  MOD_RES (197)..(197): Selenocysteine
  MOD_RES (205)..(205): Selenocysteine
  MOD_RES (240)..(240): Selenocysteine
  MOD_RES (249)..(249): Selenocysteine
  MOD_RES (254)..(254): Selenocysteine
  MOD_RES (270)..(270): Selenocysteine
  MOD_RES (280)..(280): Selenocysteine
  MOD_RES (300)..(300): Selenocysteine
  MOD_RES (307)..(307): Selenocysteine
  MOD_RES (315)..(315): Selenocysteine
MAPENFXRVXEFILXGVSSCPELQIPLFLVFLVLYGLXMAGNLGIIXLXSVDSRLQXPMYFFLQHLALINLGNSXVIAPKMLINFLVKKKXXSFYECAXQLGGFLFFIVSEVIMLALMAYDRYVAICNPLLYMVVVSRRLCLLLVSLXYLYGFSXAIVVSSYVFSVSYCSSNIINHFYCDNVPLLALSCSDXYLPEXVVFISAAXNVVGSLIIVLVSYFNIVLSILKICSSEGRKKAFSXCASHMMAVXIFYGXLLFMYVQPRSNHSLDXDDKMASVFYXLVIPMLNPLIYSLRNKDVKXALQRFMXNLCYSFKXM

SEQ ID NO: 19089 - protein, 315 aa, Homo sapiens
  MOD_RES (7)..(7): Selenocysteine
  MOD_RES (10)..(10): Selenocysteine
  MOD_RES (15)..(15): Selenocysteine
  MOD_RES (38)..(38): Selenocysteine
  MOD_RES (47)..(47): Selenocysteine
  MOD_RES (49)..(49): Selenocysteine
  MOD_RES (75)..(75): Selenocysteine
  MOD_RES (91)..(92): Selenocysteine
  MOD_RES (99)..(99): Selenocysteine
  MOD_RES (148)..(148): Selenocysteine
  MOD_RES (155)..(155): Selenocysteine
  MOD_RES (192)..(192): Selenocysteine
  MOD_RES (197)..(197): Selenocysteine
  MOD_RES (205)..(205): Selenocysteine
  MOD_RES (213)..(213): Selenocysteine
  MOD_RES (240)..(240): Selenocysteine
  MOD_RES (249)..(249): Selenocysteine
  MOD_RES (254)..(254): Selenocysteine
  MOD_RES (264)..(264): Selenocysteine
  MOD_RES (270)..(270): Selenocysteine
  MOD_RES (279)..(279): Selenocysteine
MAPENFXRVXEFILXGVSSCPELQIPLFLVFLVLYVLXMAGNLGIIXLXSVDSRLQNPMYFFLRHLAIINLGNSXVIAPKMLMNFLVKKKXXSFYECAXQLGGFLFFIVSEVMMLAVMAYDRYVAICNPLLYMVVVSRRLCLLLVSLXYLYGFSXAIVVSPCIFSVSYCSSNIINHFYCDIAPLLALSCSDXYIPEXIVFISAAXNLVFSMIXVLVSYFNIVLSILRIRSPEGRKKAFSXCASHMIAVXVFYGXMLFMYLQPQXNHSLDXDKMASVFYXLVIPMLNPLIYSLRNNDVNVALKKFMENPCYSFKSM

SEQ ID NO: 19090 - protein, 319 aa, Homo sapiens
  MOD_RES (10)..(10): Selenocysteine
  MOD_RES (13)..(13): Selenocysteine
  MOD_RES (16)..(16): Selenocysteine
  MOD_RES (24)..(24): Selenocysteine
  MOD_RES (44)..(44): Selenocysteine
  MOD_RES (55)..(55): Selenocysteine
  MOD_RES (63)..(63): Selenocysteine
  MOD_RES (75)..(75): Selenocysteine
  MOD_RES (81)..(81): Selenocysteine
  MOD_RES (97)..(97): Selenocysteine
  MOD_RES (105)..(105): Selenocysteine
  MOD_RES (159)..(159): Selenocysteine
  MOD_RES (166)..(166): Selenocysteine
  MOD_RES (198)..(198): Selenocysteine
  MOD_RES (246)..(246): Selenocysteine
  MOD_RES (252)..(252): Selenocysteine
  MOD_RES (260)..(260): Selenocysteine
  MOD_RES (273)..(273): Selenocysteine
  MOD_RES (285)..(285): Selenocysteine
  MOD_RES (310)..(310): Selenocysteine
  MOD_RES (312)..(312): Selenocysteine
MNHVVKHNHXAVXKVXEFILMGIXDNPGLQAPLFGLFLIIYLVXVIGNLGMVILXYLDSKLHXPMYFFLRHLSIXDLGYSXVIAPKMLVNFIVHKNXISYNWYAXQLAFFEIFIISELFILSAMAYDRYVAICKPLLYVIIMAEKVLWVLVIVPYLYSXFVSLFLXIKLFKLSFCGSNIISYFYCDCIPLMSILCSDXNELELIILIFSGCNLLFSLSIVLISYMFILVAILRMNSRKGRYKAFSXCSSHLXVVIMFYGXLLFIYLQPKSSHXLAIDKMASVFYXLLIPMLNPLIYSLRNKEVKDALKRXLXNRFKIPI

SEQ ID NO: 19091 - protein, 312 aa, Homo sapiens
  MOD_RES (7)..(8): Selenocysteine
  MOD_RES (15)..(15): Selenocysteine
  MOD_RES (18)..(18): Selenocysteine
  MOD_RES (49)..(49): Selenocysteine
  MOD_RES (57)..(57): Selenocysteine
  MOD_RES (75)..(76): Selenocysteine
  MOD_RES (99)..(99): Selenocysteine
  MOD_RES (133)..(133): Selenocysteine
  MOD_RES (153)..(153): Selenocysteine
  MOD_RES (160)..(160): Selenocysteine
  MOD_RES (165)..(165): Selenocysteine
  MOD_RES (192)..(192): Selenocysteine
  MOD_RES (239)..(239): Selenocysteine
  MOD_RES (245)..(245): Selenocysteine
  MOD_RES (253)..(253): Selenocysteine
  MOD_RES (269)..(269): Selenocysteine
  MOD_RES (278)..(278): Selenocysteine
  MOD_RES (303)..(303): Selenocysteine
MEQHNLXXVNEFILXGIXDIAELQAPLFALFLMIYVISVMGNLGMIVLXKLDSRLQXPMYFFLRHLAFMDLGYSXXVGPKMLVNFVVDKNIISYYFCAXQLAFFLVFIGSELFILSAMSYDLYVAICNPLLYXVIMSRRVCQVLVAIPYLYCXFISLLVXIKIFXLSFCGYNVISHFYCDSLPLLPLLCSNXHEIELIILIFAAIDLISSLLIVLLSYLLILVAILRMNSAGRQKAFSXCGAHLXVVIVFYGXLLFMYVQPKSSHSFDXDKVASIFYXLVIPMLNPLIYSLRNKDVKYALRRXWNNLCNIFV

SEQ ID NO: 19092 - protein, 307 aa, Homo sapiens
  MOD_RES (7)..(7): Selenocysteine
  MOD_RES (10)..(10): Selenocysteine
  MOD_RES (18)..(18): Selenocysteine
  MOD_RES (38)..(38): Selenocysteine
  MOD_RES (44)..(44): Selenocysteine
  MOD_RES (49)..(49): Selenocysteine
  MOD_RES (57)..(57): Selenocysteine
  MOD_RES (75)..(75): Selenocysteine
  MOD_RES (91)..(91): Selenocysteine
  MOD_RES (153)..(153): Selenocysteine
  MOD_RES (160)..(160): Selenocysteine
  MOD_RES (165)..(165): Selenocysteine
  MOD_RES (167)..(167): Selenocysteine
  MOD_RES (240)..(240): Selenocysteine
  MOD_RES (246)..(246): Selenocysteine
  MOD_RES (265)..(265): Selenocysteine
  MOD_RES (270)..(270): Selenocysteine
  MOD_RES (279)..(279): Selenocysteine
MGQHNLXVLXEFILMELXRRPELQIPLFGVFLVIYLIXVVGNLXMIILXKLDSHLHXPMYFSIRHLAFVDLGNSXVICPKVLANFVVDRNXISYYACAAQLAFFLMFIISEFFILSAMAYDRYVAICNPLLYYVIMSQRLCHVLVGIQYLYSXFQALMFXIKIFXLXFCGSNVISHFYCDDVPLLPMLCSNAQEIELLSILFSVFNLISSFLIVLVSYMLILLAICQMHSAEGRKKAFSXCGSHLXVVVVFYGSLLFMYMQPNSXHFFDXDKMASVFYXLVIPMLNPLIYSLRNEEVKNAFYKLFEN

SEQ ID NO: 19093 - protein, 359 aa, Homo sapiens
  MOD_RES (8)..(8): Selenocysteine
  MOD_RES (10)..(10): Selenocysteine
  MOD_RES (38)..(38): Selenocysteine
  MOD_RES (91)..(91): Selenocysteine
  MOD_RES (107)..(107): Selenocysteine
  MOD_RES (110)..(110): Selenocysteine
  MOD_RES (203)..(203): Selenocysteine
  MOD_RES (219)..(219): Selenocysteine
  MOD_RES (224)..(224): Selenocysteine
  MOD_RES (231)..(231): Selenocysteine
  MOD_RES (240)..(240): Selenocysteine
  MOD_RES (246)..(246): Selenocysteine
  MOD_RES (249)..(249): Selenocysteine
  MOD_RES (277)..(277): Selenocysteine
  MOD_RES (280)..(280): Selenocysteine
  MOD_RES (323)..(323): Selenocysteine
  MOD_RES (339)..(339): Selenocysteine
  MOD_RES (356)..(356): Selenocysteine
MALGNHSXIXEFLLLGLSADPNIRALLFVLFLGIYLLXIMENLMLLLMIRADSCLHKPMYFFLSHLSFVDLCFSSVIVPKMLENLLSQRKXISVEGCLAQVFFVFVXAGXEACLLSGMAYDRHAAICRPLLYGQIMGKQLYMHLVWGSWGLGFLDALINVLLAVNMVFCEAKIIHHYSYEMPSLLPLSCSDISRSLIALLCSXLLHGLGNFLLVFLSYXRIISXILSISSXSGRSKAFSXCSAHLXAVXLYYGSGLLRHLMPNSGSPIELIFSVQYXVVXPMLNSLIYSLKNKEVKGERSLRDSSHLPQLHKGQARWKRPAFXEGRREPGHPELSIPVXPQPQGACACSALRAAPXALP

SEQ ID NO: 19094 - protein, 309 aa, Homo sapiens
  MOD_RES (7)..(7): Selenocysteine
  MOD_RES (10)..(10): Selenocysteine
  MOD_RES (18)..(18): Selenocysteine
  MOD_RES (38)..(38): Selenocysteine
  MOD_RES (53)..(53): Selenocysteine
  MOD_RES (57)..(57): Selenocysteine
  MOD_RES (78)..(78): Selenocysteine
  MOD_RES (99)..(99): Selenocysteine
  MOD_RES (106)..(106): Selenocysteine
  MOD_RES (137)..(137): Selenocysteine
  MOD_RES (160)..(160): Selenocysteine
  MOD_RES (163)..(163): Selenocysteine
  MOD_RES (188)..(188): Selenocysteine
  MOD_RES (192)..(192): Selenocysteine
  MOD_RES (240)..(240): Selenocysteine
  MOD_RES (249)..(249): Selenocysteine
  MOD_RES (254)..(254): Selenocysteine
  MOD_RES (270)..(270): Selenocysteine
  MOD_RES (279)..(279): Selenocysteine
MAHINCXQAXEFILVGLXDHQELKMPLFVLFLSIYLFXVVGNLGLILLIRADXSLNXPMYFFLSNLAFVDFCYSSVIXPKMLGNFLYKQNVISFDACAXQLGCFLXFMISESLLLASMAYDRYVAICNPLLYMVVMXPGICIQLVAVPYSYSFLMALFHXILXFRLSYCHSNIVNHFYCDDMPLLRLXCSDXRFKQLWIFACAGIMFISSLLIVFVSYMFIISAILRMHSAEGRQKAFSXCGSHMLAVXIFYGXLIFMYLQPSSSHALDXDKMASVFYXVIIPMLNPLIYSLQNKEVKEALKKIIINKN

SEQ ID NO: 19095 - protein, 309 aa, Homo sapiens
  MOD_RES (2)..(2): Selenocysteine
  MOD_RES (7)..(7): Selenocysteine
  MOD_RES (10)..(10): Selenocysteine
  MOD_RES (18)..(18): Selenocysteine
  MOD_RES (38)..(38): Selenocysteine
  MOD_RES (51)..(51): Selenocysteine
  MOD_RES (57)..(57): Selenocysteine
  MOD_RES (78)..(78): Selenocysteine
  MOD_RES (109)..(109): Selenocysteine
  MOD_RES (160)..(160): Selenocysteine
  MOD_RES (163)..(163): Selenocysteine
  MOD_RES (188)..(188): Selenocysteine
  MOD_RES (192)..(192): Selenocysteine
  MOD_RES (240)..(240): Selenocysteine
  MOD_RES (249)..(249): Selenocysteine
  MOD_RES (254)..(254): Selenocysteine
  MOD_RES (270)..(270): Selenocysteine
  MOD_RES (279)..(279): Selenocysteine
MXQINCXQVXEFILVGLXDRQELKMPLFVLFLSIYLFXVVGNLGLILLIRXDEKLNXPMYFFLSNLAFVDFCYSSVIXPKMLGNFLYKQNSISFNACAAQLGCFLAFMXAECLLLASMAYDRYVAICNPLMYMVVMSPGICIQLVAAPHSYSILVALFHXILXFRLSYCHSNIVNHFYCDDMPLLRLXCSDXRFKQLWIFACAGIMFISSLLIVFVSYMFIISAILRMHSAEGRQKAFSXCGSHMLAVXIFYGXLIFMYLQPSSSHALDXDKMASVFYXVIIPMLNPLIYSLQNKEVKEALKKIIINKN

SEQ ID NO: 19096 - protein, 310 aa, Homo sapiens
  MOD_RES (9)..(9): Selenocysteine
  MOD_RES (37)..(37): Selenocysteine
  MOD_RES (42)..(42): Selenocysteine
  MOD_RES (67)..(67): Selenocysteine
  MOD_RES (73)..(74): Selenocysteine
  MOD_RES (105)..(105): Selenocysteine
  MOD_RES (136)..(136): Selenocysteine
  MOD_RES (159)..(159): Selenocysteine
  MOD_RES (163)..(163): Selenocysteine
  MOD_RES (188)..(188): Selenocysteine
  MOD_RES (191)..(191): Selenocysteine
  MOD_RES (210)..(210): Selenocysteine
  MOD_RES (215)..(215): Selenocysteine
  MOD_RES (220)..(220): Selenocysteine
  MOD_RES (236)..(236): Selenocysteine
  MOD_RES (242)..(242): Selenocysteine
  MOD_RES (261)..(261): Selenocysteine
  MOD_RES (278)..(278): Selenocysteine
  MOD_RES (287)..(287): Selenocysteine
MMDNHSSAXEFHLLGFPGSQGLHHILFAIFFFFYLVXLMGNXVIIVIVCVDKRLQSPMYFFLSHLSXLEILVXXIIVPMMLWGLLFLGCRQYLSLHVSLNFSCGXMEFALLGVMAVDRYVAVCNPLRYNIIMNSSXCIWVVIVSWVFGFLSEIWPIYAXFQFXFRKSNSLDHFYCDRGQLLKLSCDNXLLXEFILFLMAVFILIGSLIPXIVSYXYIISXILKIPSASGRRKAFSXFASHFXCVVIGYGSCLFLYVKPKQXQGVEYNKIVSLLVSVLXPFLNPFIFXLRNDKVKEALRDGMKRCCQLLKD

SEQ ID NO: 19097 - protein, 314 aa, Homo sapiens
  MOD_RES (9)..(9): Selenocysteine
  MOD_RES (37)..(37): Selenocysteine
  MOD_RES (42)..(42): Selenocysteine
  MOD_RES (73)..(74): Selenocysteine
  MOD_RES (91)..(91): Selenocysteine
  MOD_RES (109)..(110): Selenocysteine
  MOD_RES (140)..(140): Selenocysteine
  MOD_RES (167)..(167): Selenocysteine
  MOD_RES (192)..(192): Selenocysteine
  MOD_RES (195)..(195): Selenocysteine
  MOD_RES (214)..(214): Selenocysteine
  MOD_RES (224)..(224): Selenocysteine
  MOD_RES (240)..(240): Selenocysteine
  MOD_RES (246)..(246): Selenocysteine
  MOD_RES (265)..(265): Selenocysteine
  MOD_RES (282)..(282): Selenocysteine
  MOD_RES (291)..(291): Selenocysteine
MLMNYSSAXEFYLLGFPGSEELHHILFAIFFFFYLVXLMGNXVIIMIVCVDKRLQSPMYFFLGHLSALEILVXXIIVPVMLWGLLLPGMQXIYLSACVVQLFLYLAVGXXEFALLGAMAVDRYVAVCNPLRYNIIMNRHXCNFVVLVSWVFGFLFQIWPVYVMFQLXYCKSNVVNNFFCDRGQLLKLSCNNXLFXEFILFLMAVFVLFGSLIPXIVSNAYIISXILKIPSSSGRRKSFSXCASHFXCVVIGYGSCLFLYVKPKQXQAADYNWVVSLMVSVVXPFLNPFIFXLRNDKVIEALRDGVKRCCQLFRN

SEQ ID NO: 19098 - protein, 305 aa, Homo sapiens
  MOD_RES (7)..(7): Selenocysteine
  MOD_RES (9)..(9): Selenocysteine
  MOD_RES (17)..(18): Selenocysteine
  MOD_RES (37)..(37): Selenocysteine
  MOD_RES (43)..(43): Selenocysteine
  MOD_RES (56)..(56): Selenocysteine
  MOD_RES (62)..(62): Selenocysteine
  MOD_RES (77)..(77): Selenocysteine
  MOD_RES (83)..(83): Selenocysteine
  MOD_RES (159)..(159): Selenocysteine
  MOD_RES (162)..(162): Selenocysteine
  MOD_RES (222)..(222): Selenocysteine
  MOD_RES (239)..(239): Selenocysteine
  MOD_RES (245)..(245): Selenocysteine
  MOD_RES (248)..(248): Selenocysteine
  MOD_RES (275)..(275): Selenocysteine
  MOD_RES (278)..(278): Selenocysteine
MQRSNHXVXEFILLGFXXDPGMQLGLFVVFLGVYSLXVVGNSXLIVLICNDSCLHXPMYFFXGNLSFLDLWYSSVYXPKILVXCISEDKSISFAGCLCQFFFSAGLAYSECYLLAAVAYDRYVAISKPLLYAQAMSIKLCALLVAVSYCGGFINSSIIXKKXFSFNFCRENIIDDFFCDLLPLVELACGEKGGYKIMMYFLLASNVICPAVLILASYLFIIXSVLRISSSKGYLKAFSXCSSHLXSVXLYYGSILYIYALPRSSYSFDMDKIVSXFYXVVFPMLNLMIYSLRNKDVKEALKKLLP

SEQ ID NO: 19099 - protein, 327 aa, Homo sapiens
  MOD_RES (12)..(12): Selenocysteine
  MOD_RES (22)..(22): Selenocysteine
  MOD_RES (25)..(25): Selenocysteine
  MOD_RES (53)..(53): Selenocysteine
  MOD_RES (59)..(59): Selenocysteine
  MOD_RES (66)..(66): Selenocysteine
  MOD_RES (72)..(72): Selenocysteine
  MOD_RES (89)..(89): Selenocysteine
  MOD_RES (93)..(93): Selenocysteine
  MOD_RES (125)..(125): Selenocysteine
  MOD_RES (150)..(150): Selenocysteine
  MOD_RES (153)..(153): Selenocysteine
  MOD_RES (157)..(157): Selenocysteine
  MOD_RES (175)..(175): Selenocysteine
  MOD_RES (178)..(178): Selenocysteine
  MOD_RES (205)..(205): Selenocysteine
  MOD_RES (207)..(207): Selenocysteine
  MOD_RES (221)..(221): Selenocysteine
  MOD_RES (255)..(255): Selenocysteine
  MOD_RES (280)..(280): Selenocysteine
  MOD_RES (294)..(294): Selenocysteine
  MOD_RES (320)..(320): Selenocysteine
  MOD_RES (322)..(322): Selenocysteine
  MOD_RES (327)..(327): Selenocysteine
MIFPSHDSQAFXSVDMEVGNCXILXEFILLGFSADSQWQPILFGVFLMLYLIXLSGNMXLVILIRXDSHLHXPMYFFIGNLSFLDFWYXSVYXPKILASCVSEDKRISLAGCGAQLFFSCVVAYXECYLLAAMAYDRHAAICNPLLYSGXMSXALCXGLVAGSYIGGFLNAIAHXANXFRLHFCGKNIIDHFFCDAPPLVKMSCXNXRVYEKVLLGVVGFXVLSSILAILISYVNILLAILRIHSASGRHKAFSXCASHLISVMLFYGSLLFMYSRPSSXYSLERDKVAALFYXVINPLLNPLIYSLRNKDIKEAFRKAXQXIQPQX

SEQ ID NO: 19100 - protein, 305 aa, Homo sapiens
  MOD_RES (7)..(7): Selenocysteine
  MOD_RES (9)..(9): Selenocysteine
  MOD_RES (17)..(18): Selenocysteine
  MOD_RES (37)..(37): Selenocysteine
  MOD_RES (43)..(43): Selenocysteine
  MOD_RES (56)..(56): Selenocysteine
  MOD_RES (77)..(77): Selenocysteine
  MOD_RES (159)..(159): Selenocysteine
  MOD_RES (162)..(162): Selenocysteine
  MOD_RES (222)..(222): Selenocysteine
  MOD_RES (239)..(239): Selenocysteine
  MOD_RES (245)..(245): Selenocysteine
  MOD_RES (248)..(248): Selenocysteine
  MOD_RES (275)..(275): Selenocysteine
  MOD_RES (278)..(278): Selenocysteine
MQRSNHXVXEFILLGFXXDPGMQLGLFVVFLGVYSLXVVGNSXLIVLICNDSHLHXPMYFVVGNLSFLDLWYSSVYXPKILVICISEDKSISFAGCLCQFFFSAGLAYSECCLLAAMAYDRYVAISKPLLYAQAMSIKLCALLVAVSYCGGFINSSIIXKKXFSFNFCCENIIDDFFCDLLPLVKLACGEKGGYKFLMYFLLASNVICPAVLILASYLFIIXSVLRISSSQGRLKAFSXCSSHLXSVXLYYGSILYIYALPRSSYSFDMDKIVSXFYXEVLPMLNPMIYSLRNKDVKEALKKLLP

SEQ ID NO: 19101 - protein, 314 aa, Homo sapiens
  MOD_RES (7)..(7): Selenocysteine
  MOD_RES (10)..(10): Selenocysteine
  MOD_RES (38)..(38): Selenocysteine
  MOD_RES (57)..(57): Selenocysteine
  MOD_RES (74)..(74): Selenocysteine
  MOD_RES (78)..(78): Selenocysteine
  MOD_RES (84)..(84): Selenocysteine
  MOD_RES (87)..(87): Selenocysteine
  MOD_RES (90)..(90): Selenocysteine
  MOD_RES (105)..(105): Selenocysteine
  MOD_RES (110)..(110): Selenocysteine
  MOD_RES (133)..(133): Selenocysteine
  MOD_RES (160)..(161): Selenocysteine
  MOD_RES (163)..(163): Selenocysteine
  MOD_RES (165)..(165): Selenocysteine
  MOD_RES (192)..(192): Selenocysteine
  MOD_RES (224)..(224): Selenocysteine
  MOD_RES (237)..(237): Selenocysteine
  MOD_RES (240)..(240): Selenocysteine
  MOD_RES (246)..(246): Selenocysteine
  MOD_RES (279)..(279): Selenocysteine
MAKNNLXRVXEFILMGFMDHPKLEIPLFLVFLSFYLVXLLGNVGMIMLIQVDVKLYXPMYFFLSHLSLLDACYXSVIXPQILAXLAXGKXVISYGHCAAQFFLFXICAGXECFLLAVMAYDRYAAIRNPLLYXVAMNPRLCWSLVVGAYVCGVSGAILRXXCXFXLSFCKDNQINFFFCDLPPLLKLACSDXANIEIVIIFFGNFVILANASVILISYLLIIKXILKVKSSGGRAKXFSXCASHIXAVALFFGALIFMYLQSGSGKSLEEDKVVSVFYXVVIPMLNPLIYSLRNKDVKDAFRKVARRLQVSLSM

SEQ ID NO: 19102 - protein, 335 aa, Homo sapiens
  MOD_RES (22)..(22): Selenocysteine
  MOD_RES (28)..(28): Selenocysteine
  MOD_RES (35)..(35): Selenocysteine
  MOD_RES (72)..(72): Selenocysteine
  MOD_RES (76)..(76): Selenocysteine
  MOD_RES (82)..(82): Selenocysteine
  MOD_RES (135)..(135): Selenocysteine
  MOD_RES (163)..(163): Selenocysteine
  MOD_RES (167)..(167): Selenocysteine
  MOD_RES (185)..(185): Selenocysteine
  MOD_RES (188)..(188): Selenocysteine
  MOD_RES (190)..(190): Selenocysteine
  MOD_RES (235)..(235): Selenocysteine
  MOD_RES (249)..(249): Selenocysteine
  MOD_RES (256)..(256): Selenocysteine
  MOD_RES (265)..(265): Selenocysteine
  MOD_RES (286)..(286): Selenocysteine
  MOD_RES (305)..(305): Selenocysteine
MLGSKPRVHLYILPCASQQVSXMGDRGXSNHSEMXDFILAGFRVRPELHILLFLLFLFVYAMILLGNVGMMXIIMXDPRLNXPMYFFLGNLSFIDLFYSSVIEPKAMINFWSENKSISFAGCVAQLFLFALLIVXEGFLLAAMAYDRFIAICNPLLYSVQMSXRLCXQLVAGSYFCGCISSVIQXSMXFXLSFCASRAVDHFYCDSRPLQRLSCSDLFIHRMISFSLSCIIILPXIIVIIVSYMYIVSXVLKIHSXEGHKKAFSXCSSHLGVVSVLYGAVFFMYLXPDRFPELSKVASLCYSLVXPMLNPLIYSLRNKDVQEALKKFLEKKNIIL

SEQ ID NO: 19103 - protein, 310 aa, Homo sapiens
  MOD_RES (7)..(7): Selenocysteine
  MOD_RES (10)..(10): Selenocysteine
  MOD_RES (18)..(18): Selenocysteine
  MOD_RES (38)..(38): Selenocysteine
  MOD_RES (77)..(77): Selenocysteine
  MOD_RES (95)..(95): Selenocysteine
  MOD_RES (105)..(105): Selenocysteine
  MOD_RES (134)..(134): Selenocysteine
  MOD_RES (137)..(137): Selenocysteine
  MOD_RES (160)..(160): Selenocysteine
  MOD_RES (165)..(165): Selenocysteine
  MOD_RES (171)..(171): Selenocysteine
  MOD_RES (188)..(188): Selenocysteine
  MOD_RES (194)..(194): Selenocysteine
  MOD_RES (236)..(236): Selenocysteine
  MOD_RES (239)..(239): Selenocysteine
  MOD_RES (241)..(241): Selenocysteine
  MOD_RES (245)..(245): Selenocysteine
  MOD_RES (253)..(253): Selenocysteine
  MOD_RES (278)..(278): Selenocysteine
MAEMNLXLVXEFLLIAFXEYPEWALPLFLLFLFMYLIXVLGNLEMIILILMDHQLHAPMYFLLSHLAFMDVCYSSIXVPQMLAVLLEHGAALSYXRCAAQFFLFXFFGSIDCYLLALMAYDRYLAVCQPLLYVXILXQQARLSLVAGAYVAGLISALVRXVSAFXLSFCGXSEIDFIFCDLPPLLKLXCGESYXQEVLIIMFAIFVIPASMVVILVSYLFIIVAIMGIPAGSQAKXFSXCXSHLXAVSLFFGXLIFMYLRGNSDQSSEKNRVVSVLYXEVIPMLNPLIYSLRNKEVKEALRKILNRAKLS

SEQ ID NO: 19104 - protein, 314 aa, Homo sapiens
  MOD_RES (7)..(7): Selenocysteine
  MOD_RES (10)..(10): Selenocysteine
  MOD_RES (15)..(15): Selenocysteine
  MOD_RES (18)..(18): Selenocysteine
  MOD_RES (38)..(38): Selenocysteine
  MOD_RES (43)..(43): Selenocysteine
  MOD_RES (57)..(57): Selenocysteine
  MOD_RES (90)..(91): Selenocysteine
  MOD_RES (105)..(105): Selenocysteine
  MOD_RES (124)..(124): Selenocysteine
  MOD_RES (134)..(134): Selenocysteine
  MOD_RES (137)..(137): Selenocysteine
  MOD_RES (146)..(146): Selenocysteine
  MOD_RES (160)..(160): Selenocysteine
  MOD_RES (162)..(162): Selenocysteine
  MOD_RES (165)..(165): Selenocysteine
  MOD_RES (194)..(194): Selenocysteine
  MOD_RES (237)..(237): Selenocysteine
  MOD_RES (240)..(240): Selenocysteine
  MOD_RES (246)..(246): Selenocysteine
  MOD_RES (254)..(254): Selenocysteine
  MOD_RES (264)..(264): Selenocysteine
  MOD_RES (279)..(279): Selenocysteine
  MOD_RES (282)..(282): Selenocysteine
  MOD_RES (301)..(301): Selenocysteine
MAERNYXVVXEFFLXAFXEHLQWRVPLFLIFLSFYLAXMLGNXGMILLIRGDRRLHXPMYFFLSHLSLVDICYSSAIIPQMLAVLWEHGXXISQARCAAQFFLFXFFASIDCYLLAIMAYDRYXAVCQPLLYVXIIXEKARWGLVXGAYVAGFFSAFVRXVXAFXLSFCGNNEINFIFCDLPPLLKLSCGDSYXQEVVIIVFALFVMPACILVILVSYLFIIVAILQIHSAGGRAKXFSXCASHLXAVALFFGXLIFMYLRDNXGQSSEGDRVVSVLYXVVXPMLNPLIYSLRNKEVKEAXRKALSKSKPARRP

SEQ ID NO: 19105 - protein, 53 aa, Homo sapiens
  MOD_RES (13)..(13): Selenocysteine
  MOD_RES (27)..(27): Selenocysteine
  MOD_RES (36)..(36): Selenocysteine
  MOD_RES (51)..(51): Selenocysteine
  MOD_RES (53)..(53): Selenocysteine
MEGGLADGEPDRXSLLGDSKDVLGPSXNSDESQLLXPGKMSQRQGKEAYPXPX

SEQ ID NO: 19106 - protein, 58 aa, Homo sapiens
  MOD_RES (13)..(13): Selenocysteine
  MOD_RES (27)..(27): Selenocysteine
  MOD_RES (39)..(39): Selenocysteine
  MOD_RES (54)..(54): Selenocysteine
  MOD_RES (56)..(56): Selenocysteine
MEGGLADGEPDRXSLLGDSKDVLGPSXVVANSDESQLLXPGKMSQRQGKEAYPXPXKD

SEQ ID NO: 19107 - protein, 721 aa, Homo sapiens
  MOD_RES (13)..(13): Selenocysteine
  MOD_RES (27)..(27): Selenocysteine
  MOD_RES (39)..(39): Selenocysteine
  MOD_RES (54)..(54): Selenocysteine
  MOD_RES (56)..(56): Selenocysteine
  MOD_RES (111)..(111): Selenocysteine
  MOD_RES (116)..(116): Selenocysteine
  MOD_RES (136)..(136): Selenocysteine
  MOD_RES (142)..(142): Selenocysteine
  MOD_RES (144)..(144): Selenocysteine
  MOD_RES (160)..(160): Selenocysteine
  MOD_RES (165)..(165): Selenocysteine
  MOD_RES (181)..(181): Selenocysteine
  MOD_RES (190)..(190): Selenocysteine
  MOD_RES (235)..(235): Selenocysteine
  MOD_RES (248)..(248): Selenocysteine
  MOD_RES (273)..(273): Selenocysteine
  MOD_RES (290)..(290): Selenocysteine
  MOD_RES (293)..(293): Selenocysteine
  MOD_RES (355)..(355): Selenocysteine
  MOD_RES (357)..(357): Selenocysteine
  MOD_RES (377)..(378): Selenocysteine
  MOD_RES (380)..(380): Selenocysteine
  MOD_RES (396)..(396): Selenocysteine
  MOD_RES (398)..(398): Selenocysteine
  MOD_RES (409)..(409): Selenocysteine
  MOD_RES (427)..(427): Selenocysteine
  MOD_RES (491)..(491): Selenocysteine
  MOD_RES (501)..(501): Selenocysteine
  MOD_RES (505)..(505): Selenocysteine
  MOD_RES (558)..(558): Selenocysteine
  MOD_RES (569)..(569): Selenocysteine
  MOD_RES (582)..(582): Selenocysteine
  MOD_RES (584)..(584): Selenocysteine
  MOD_RES (590)..(590): Selenocysteine
  MOD_RES (594)..(594): Selenocysteine
  MOD_RES (598)..(598): Selenocysteine
  MOD_RES (634)..(634): Selenocysteine
  MOD_RES (646)..(646): Selenocysteine
  MOD_RES (650)..(650): Selenocysteine
  MOD_RES (660)..(660): Selenocysteine
  MOD_RES (672)..(672): Selenocysteine
  MOD_RES (691)..(691): Selenocysteine
  MOD_RES (700)..(700): Selenocysteine
  MOD_RES (703)..(703): Selenocysteine
MEGGLADGEPDRXSLLGDSKDVLGPSXVVANSDESQLLXPGKMSQRQGKEAYPXPXKDLHQPSLSPASPHSQGFERGKEDISQNKDESSLSMSKSKSESKLYNGSEKDSSXSSKLXKKESLKVQKKNYREEKKRAXKELLSXIXDPSVIVMADWLKIRGXLKSWXKLWCVLKPGVLLIYKXQKNGQWVGXVLLNACEIIERPSKKDGFCFKLFHPLEQSIWAVKGPKGEAVGSIXQPLPSSYLIIRAXSESDGRCWMDALELALKCSSLLKRXMIREGKEHDLSVSSDSXHVXFYGLLRANNLHSGDNFQLNDSEIERQHFKDQDMYSDKSDKENDQEHDESDNEVMGKSEESDXDXSERQDDSYIEPEPVEPLKEXXYXEQSHEELGEAGEASQXEXVSEENKSLIWXLLKQVRPGMDLSKVVLPXFILEPRSFLDKLSDYYYHADFLSEAALEENPYFRLKKVVKWYLSGFYKKPKGLKKPYNPILGEXFRCLWIHPRXNSKXFYIAEQVSHHPPISAFYVSNRKDGFCLSGSILAKSKFYGNSLSAILEGEARLXFLNRGEDYVMXMPYAHCKGILYGXMXLELGGXVNIXCQKXGYSAILEFKLKPFLGSSDCVNQISGKLKLGKEVLAXLEGHWDSEVFIXDKKXDNSEVFWNPXPDIKQWRLIRHXVKFEEQGDFESEKLWQRVXRAINAKDQXEAXQEKYVLEEAQRQAARDRK

SEQ ID NO: 19108 - protein, 889 aa, Homo sapiens
  MOD_RES (13)..(13): Selenocysteine
  MOD_RES (27)..(27): Selenocysteine
  MOD_RES (39)..(39): Selenocysteine
  MOD_RES (54)..(54): Selenocysteine
  MOD_RES (56)..(56): Selenocysteine
  MOD_RES (111)..(111): Selenocysteine
  MOD_RES (116)..(116): Selenocysteine
  MOD_RES (136)..(136): Selenocysteine
  MOD_RES (142)..(142): Selenocysteine
  MOD_RES (144)..(144): Selenocysteine
  MOD_RES (160)..(160): Selenocysteine
  MOD_RES (165)..(165): Selenocysteine
  MOD_RES (181)..(181): Selenocysteine
  MOD_RES (190)..(190): Selenocysteine
  MOD_RES (235)..(235): Selenocysteine
  MOD_RES (248)..(248): Selenocysteine
  MOD_RES (273)..(273): Selenocysteine
  MOD_RES (290)..(290): Selenocysteine
  MOD_RES (293)..(293): Selenocysteine
  MOD_RES (355)..(355): Selenocysteine
  MOD_RES (357)..(357): Selenocysteine
  MOD_RES (377)..(378): Selenocysteine
  MOD_RES (380)..(380): Selenocysteine
  MOD_RES (396)..(396): Selenocysteine
  MOD_RES (398)..(398): Selenocysteine
  MOD_RES (409)..(409): Selenocysteine
  MOD_RES (427)..(427): Selenocysteine
  MOD_RES (491)..(491): Selenocysteine
  MOD_RES (501)..(501): Selenocysteine
  MOD_RES (505)..(505): Selenocysteine
  MOD_RES (558)..(558): Selenocysteine
  MOD_RES (569)..(569): Selenocysteine
  MOD_RES (582)..(582): Selenocysteine
  MOD_RES (584)..(584): Selenocysteine
  MOD_RES (590)..(590): Selenocysteine
  MOD_RES (594)..(594): Selenocysteine
  MOD_RES (598)..(598): Selenocysteine
  MOD_RES (634)..(634): Selenocysteine
  MOD_RES (646)..(646): Selenocysteine
  MOD_RES (650)..(650): Selenocysteine
  MOD_RES (660)..(660): Selenocysteine
  MOD_RES (672)..(672): Selenocysteine
  MOD_RES (691)..(691): Selenocysteine
  MOD_RES (700)..(700): Selenocysteine
  MOD_RES (703)..(703): Selenocysteine
  MOD_RES (722)..(722): Selenocysteine
  MOD_RES (738)..(738): Selenocysteine
  MOD_RES (748)..(748): Selenocysteine
  MOD_RES (768)..(768): Selenocysteine
  MOD_RES (774)..(774): Selenocysteine
  MOD_RES (787)..(787): Selenocysteine
  MOD_RES (819)..(819): Selenocysteine
  MOD_RES (840)..(840): Selenocysteine
  MOD_RES (859)..(859): Selenocysteine
  MOD_RES (862)..(862): Selenocysteine
MEGGLADGEPDRXSLLGDSKDVLGPSXVVANSDESQLLXPGKMSQRQGKEAYPXPXKDLHQPSLSPASPHSQGFERGKEDISQNKDESSLSMSKSKSESKLYNGSEKDSSXSSKLXKKESLKVQKKNYREEKKRAXKELLSXIXDPSVIVMADWLKIRGXLKSWXKLWCVLKPGVLLIYKXQKNGQWVGXVLLNACEIIERPSKKDGFCFKLFHPLEQSIWAVKGPKGEAVGSIXQPLPSSYLIIRAXSESDGRCWMDALELALKCSSLLKRXMIREGKEHDLSVSSDSXHVXFYGLLRANNLHSGDNFQLNDSEIERQHFKDQDMYSDKSDKENDQEHDESDNEVMGKSEESDXDXSERQDDSYIEPEPVEPLKEXXYXEQSHEELGEAGEASQXEXVSEENKSLIWXLLKQVRPGMDLSKVVLPXFILEPRSFLDKLSDYYYHADFLSEAALEENPYFRLKKVVKWYLSGFYKKPKGLKKPYNPILGEXFRCLWIHPRXNSKXFYIAEQVSHHPPISAFYVSNRKDGFCLSGSILAKSKFYGNSLSAILEGEARLXFLNRGEDYVMXMPYAHCKGILYGXMXLELGGXVNIXCQKXGYSAILEFKLKPFLGSSDCVNQISGKLKLGKEVLAXLEGHWDSEVFIXDKKXDNSEVFWNPXPDIKQWRLIRHXVKFEEQGDFESEKLWQRVXRAINAKDQXEAXQEKYVLEEAQRQAARDRKXKNEEWSCKLFELDPLXGEWHYKFADXRPWDPLNDMIQFEKDGVIQXKVKHRXPMVSVPKMKHKPXRQQKKVAKGYSSPEPDIQDSSGSEAQSVKPSXRRKKGIELGDIQSSIESIKQXQEEIKRNIMALRNHLVSSXPAXDYFLQQKDYFIIFLLILLQVIINFMFK

SEQ ID NO: 19109 - protein, 28 aa, Homo sapiens
  MOD_RES (13)..(13): Selenocysteine
MEGGLADGEPDRXSSESKLYNGSEKDSS

SEQ ID NO: 19110 - protein, 41 aa, Homo sapiens
  MOD_RES (13)..(13): Selenocysteine
MEGGLADGEPDRXSVLKEGRKIFLKIKMNLHFLCQRASLNL

SEQ ID NO: 19111 - protein, 695 aa, Homo sapiens
  MOD_RES (14)..(14): Selenocysteine
  MOD_RES (86)..(86): Selenocysteine
  MOD_RES (91)..(91): Selenocysteine
  MOD_RES (111)..(111): Selenocysteine
  MOD_RES (117)..(117): Selenocysteine
  MOD_RES (119)..(119): Selenocysteine
  MOD_RES (135)..(135): Selenocysteine
  MOD_RES (140)..(140): Selenocysteine
  MOD_RES (156)..(156): Selenocysteine
  MOD_RES (165)..(165): Selenocysteine
  MOD_RES (210)..(210): Selenocysteine
  MOD_RES (223)..(223): Selenocysteine
  MOD_RES (248)..(248): Selenocysteine
  MOD_RES (265)..(265): Selenocysteine
  MOD_RES (268)..(268): Selenocysteine
  MOD_RES (330)..(330): Selenocysteine
  MOD_RES (332)..(332): Selenocysteine
  MOD_RES (352)..(353): Selenocysteine
  MOD_RES (355)..(355): Selenocysteine
  MOD_RES (371)..(371): Selenocysteine
  MOD_RES (373)..(373): Selenocysteine
  MOD_RES (384)..(384): Selenocysteine
  MOD_RES (402)..(402): Selenocysteine
  MOD_RES (466)..(466): Selenocysteine
  MOD_RES (476)..(476): Selenocysteine
  MOD_RES (480)..(480): Selenocysteine
  MOD_RES (533)..(533): Selenocysteine
  MOD_RES (544)..(544): Selenocysteine
  MOD_RES (557)..(557): Selenocysteine
  MOD_RES (559)..(559): Selenocysteine
  MOD_RES (565)..(565): Selenocysteine
  MOD_RES (569)..(569): Selenocysteine
  MOD_RES (573)..(573): Selenocysteine
  MOD_RES (609)..(609): Selenocysteine
  MOD_RES (621)..(621): Selenocysteine
  MOD_RES (625)..(625): Selenocysteine
  MOD_RES (635)..(635): Selenocysteine
  MOD_RES (647)..(647): Selenocysteine
  MOD_RES (666)..(666): Selenocysteine
  MOD_RES (675)..(675): Selenocysteine
  MOD_RES (678)..(678): Selenocysteine
MKEESSQRRFSSCXGVLPVLFPPRIDGRKLVRNASFGGYNELSPSLPGFERGKEDISQNKDESSLSMSKSKSESKLYNGSEKDSSXSSKLXKKESLKVQKKNYREEKKRAXKELLSXIXDPSVIVMADWLKIRGXLKSWXKLWCVLKPGVLLIYKXQKNGQWVGXVLLNACEIIERPSKKDGFCFKLFHPLEQSIWAVKGPKGEAVGSIXQPLPSSYLIIRAXSESDGRCWMDALELALKCSSLLKRXMIREGKEHDLSVSSDSXHVXFYGLLRANNLHSGDNFQLNDSEIERQHFKDQDMYSDKSDKENDQEHDESDNEVMGKSEESDXDXSERQDDSYIEPEPVEPLKEXXYXEQSHEELGEAGEASQXEXVSEENKSLIWXLLKQVRPGMDLSKVVLPXFILEPRSFLDKLSDYYYHADFLSEAALEENPYFRLKKVVKWYLSGFYKKPKGLKKPYNPILGEXFRCLWIHPRXNSKXFYIAEQVSHHPPISAFYVSNRKDGFCLSGSILAKSKFYGNSLSAILEGEARLXFLNRGEDYVMXMPYAHCKGILYGXMXLELGGXVNIXCQKXGYSAILEFKLKPFLGSSDCVNQISGKLKLGKEVLAXLEGHWDSEVFIXDKKXDNSEVFWNPXPDIKQWRLIRHXVKFEEQGDFESEKLWQRVXRAINAKDQXEAXQEKYVLEEAQRQAARDR

SEQ ID NO: 19112 - protein, 157 aa, Homo sapiens
  MOD_RES (14)..(14): Selenocysteine
  MOD_RES (26)..(26): Selenocysteine
  MOD_RES (41)..(41): Selenocysteine
  MOD_RES (43)..(43): Selenocysteine
  MOD_RES (98)..(98): Selenocysteine
  MOD_RES (103)..(103): Selenocysteine
  MOD_RES (123)..(123): Selenocysteine
  MOD_RES (129)..(129): Selenocysteine
  MOD_RES (131)..(131): Selenocysteine
  MOD_RES (147)..(147): Selenocysteine
  MOD_RES (152)..(152): Selenocysteine
MLLGDSKDVLGPSXVVANSDESQLLXPGKMSQRQGKEAYPXPXKDLHQPSLSPASPHSQGFERGKEDISQNKDESSLSMSKSKSESKLYNGSEKDSSXSSKLXKKESLKVQKKNYREEKKRAXKELLSXIXDPSVIVMADWLKIRGXLKSWXKLWCV

SEQ ID NO: 19113 - protein, 76 aa, Homo sapiens
  MOD_RES (12)..(12): Selenocysteine
  MOD_RES (14)..(14): Selenocysteine
  MOD_RES (69)..(69): Selenocysteine
  MOD_RES (74)..(74): Selenocysteine
MSQRQGKEAYPXPXKDLHQPSLSPASPHSQGFERGKEDISQNKDESSLSMSKSKSESKLYNGSEKDSSXSSKLXKK

SEQ ID NO: 19114 - protein, 111 aa, Homo sapiens
  MOD_RES (12)..(12): Selenocysteine
  MOD_RES (14)..(14): Selenocysteine
  MOD_RES (69)..(69): Selenocysteine
  MOD_RES (74)..(74): Selenocysteine
  MOD_RES (94)..(94): Selenocysteine
  MOD_RES (100)..(100): Selenocysteine
  MOD_RES (102)..(102): Selenocysteine
MSQRQGKEAYPXPXKDLHQPSLSPASPHSQGFERGKEDISQNKDESSLSMSKSKSESKLYNGSEKDSSXSSKLXKKESLKVQKKNYREEKKRAXKELLSXIXDPSVIVMAD

SEQ ID NO: 19115 - protein, 847 aa, Homo sapiens
  MOD_RES (12)..(12): Selenocysteine
  MOD_RES (14)..(14): Selenocysteine
  MOD_RES (69)..(69): Selenocysteine
  MOD_RES (74)..(74): Selenocysteine
  MOD_RES (94)..(94): Selenocysteine
  MOD_RES (100)..(100): Selenocysteine
  MOD_RES (102)..(102): Selenocysteine
  MOD_RES (118)..(118): Selenocysteine
  MOD_RES (123)..(123): Selenocysteine
  MOD_RES (139)..(139): Selenocysteine
  MOD_RES (148)..(148): Selenocysteine
  MOD_RES (193)..(193): Selenocysteine
  MOD_RES (206)..(206): Selenocysteine
  MOD_RES (231)..(231): Selenocysteine
  MOD_RES (248)..(248): Selenocysteine
  MOD_RES (251)..(251): Selenocysteine
  MOD_RES (313)..(313): Selenocysteine
  MOD_RES (315)..(315): Selenocysteine
  MOD_RES (335)..(336): Selenocysteine
  MOD_RES (338)..(338): Selenocysteine
  MOD_RES (354)..(354): Selenocysteine
  MOD_RES (356)..(356): Selenocysteine
  MOD_RES (367)..(367): Selenocysteine
  MOD_RES (385)..(385): Selenocysteine
  MOD_RES (449)..(449): Selenocysteine
  MOD_RES (459)..(459): Selenocysteine
  MOD_RES (463)..(463): Selenocysteine
  MOD_RES (516)..(516): Selenocysteine
  MOD_RES (527)..(527): Selenocysteine
  MOD_RES (540)..(540): Selenocysteine
  MOD_RES (542)..(542): Selenocysteine
  MOD_RES (548)..(548): Selenocysteine
  MOD_RES (552)..(552): Selenocysteine
  MOD_RES (556)..(556): Selenocysteine
  MOD_RES (592)..(592): Selenocysteine
  MOD_RES (604)..(604): Selenocysteine
  MOD_RES (608)..(608): Selenocysteine
  MOD_RES (618)..(618): Selenocysteine
  MOD_RES (630)..(630): Selenocysteine
  MOD_RES (649)..(649): Selenocysteine
  MOD_RES (658)..(658): Selenocysteine
  MOD_RES (661)..(661): Selenocysteine
  MOD_RES (680)..(680): Selenocysteine
  MOD_RES (696)..(696): Selenocysteine
  MOD_RES (706)..(706): Selenocysteine
  MOD_RES (726)..(726): Selenocysteine
  MOD_RES (732)..(732): Selenocysteine
  MOD_RES (745)..(745): Selenocysteine
  MOD_RES (777)..(777): Selenocysteine
  MOD_RES (798)..(798): Selenocysteine
  MOD_RES (817)..(817): Selenocysteine
  MOD_RES (820)..(820): Selenocysteine
MSQRQGKEAYPXPXKDLHQPSLSPASPHSQGFERGKEDISQNKDESSLSMSKSKSESKLYNGSEKDSSXSSKLXKKESLKVQKKNYREEKKRAXKELLSXIXDPSVIVMADWLKIRGXLKSWXKLWCVLKPGVLLIYKXQKNGQWVGXVLLNACEIIERPSKKDGFCFKLFHPLEQSIWAVKGPKGEAVGSIXQPLPSSYLIIRAXSESDGRCWMDALELALKCSSLLKRXMIREGKEHDLSVSSDSXHVXFYGLLRANNLHSGDNFQLNDSEIERQHFKDQDMYSDKSDKENDQEHDESDNEVMGKSEESDXDXSERQDDSYIEPEPVEPLKEXXYXEQSHEELGEAGEASQXEXVSEENKSLIWXLLKQVRPGMDLSKVVLPXFILEPRSFLDKLSDYYYHADFLSEAALEENPYFRLKKVVKWYLSGFYKKPKGLKKPYNPILGEXFRCLWIHPRXNSKXFYIAEQVSHHPPISAFYVSNRKDGFCLSGSILAKSKFYGNSLSAILEGEARLXFLNRGEDYVMXMPYAHCKGILYGXMXLELGGXVNIXCQKXGYSAILEFKLKPFLGSSDCVNQISGKLKLGKEVLAXLEGHWDSEVFIXDKKXDNSEVFWNPXPDIKQWRLIRHXVKFEEQGDFESEKLWQRVXRAINAKDQXEAXQEKYVLEEAQRQAARDRKXKNEEWSCKLFELDPLXGEWHYKFADXRPWDPLNDMIQFEKDGVIQXKVKHRXPMVSVPKMKHKPXRQQKKVAKGYSSPEPDIQDSSGSEAQSVKPSXRRKKGIELGDIQSSIESIKQXQEEIKRNIMALRNHLVSSXPAXDYFLQQKDYFIIFLLILLQVIINFMFK

SEQ ID NO: 19116 - protein, 231 aa, Homo sapiens
  MOD_RES (25)..(25): Selenocysteine
  MOD_RES (31)..(31): Selenocysteine
  MOD_RES (65)..(65): Selenocysteine
  MOD_RES (77)..(77): Selenocysteine
  MOD_RES (81)..(81): Selenocysteine
  MOD_RES (141)..(141): Selenocysteine
  MOD_RES (145)..(145): Selenocysteine
  MOD_RES (156)..(156): Selenocysteine
  MOD_RES (158)..(158): Selenocysteine
  MOD_RES (214)..(214): Selenocysteine
  MOD_RES (225)..(225): Selenocysteine
MASMAAIGSCSKEYRVLLGQLQKQXDLMQDXSRLLDPYIRIQGLDVPKLREHCRERPGAFPSEEXLRGLGRRGFLQXLNAXLGCVLHRLADLEQRLPKAQDLERSGLNIEDLEKLQMARPNILGLRNNIYCMAQLLDNSDXAEPXKAGRGASQPPXPXPASDAFQRKLEGCRFLHGYHRFMHSVGRVFSKWGESPNRSRRHSPHQALRKGVRRXRPSRKGKRLMXRGQLPR

SEQ ID NO: 19117 - protein, 20 aa, Homo sapiens
  MOD_RES (6)..(6): Selenocysteine
  MOD_RES (9)..(9): Selenocysteine
  MOD_RES (13)..(13): Selenocysteine
MGVLLXQRXLLNXYPRPGCS

SEQ ID NO: 19118 - protein, 252 aa, Homo sapiens
  MOD_RES (6)..(6): Selenocysteine
  MOD_RES (9)..(9): Selenocysteine
  MOD_RES (46)..(46): Selenocysteine
  MOD_RES (52)..(52): Selenocysteine
  MOD_RES (86)..(86): Selenocysteine
  MOD_RES (98)..(98): Selenocysteine
  MOD_RES (102)..(102): Selenocysteine
  MOD_RES (162)..(162): Selenocysteine
  MOD_RES (166)..(166): Selenocysteine
  MOD_RES (177)..(177): Selenocysteine
  MOD_RES (179)..(179): Selenocysteine
  MOD_RES (235)..(235): Selenocysteine
  MOD_RES (246)..(246): Selenocysteine
MGVLLXQRXLLSLVLALLFPSMASMAAIGSCSKEYRVLLGQLQKQXDLMQDXSRLLDPYIRIQGLDVPKLREHCRERPGAFPSEEXLRGLGRRGFLQXLNAXLGCVLHRLADLEQRLPKAQDLERSGLNIEDLEKLQMARPNILGLRNNIYCMAQLLDNSDXAEPXKAGRGASQPPXPXPASDAFQRKLEGCRFLHGYHRFMHSVGRVFSKWGESPNRSRRHSPHQALRKGVRRXRPSRKGKRLMXRGQLPR

SEQ ID NO: 19119 - protein, 188 aa, Homo sapiens
  MOD_RES (5)..(5): Selenocysteine
  MOD_RES (31)..(32): Selenocysteine
  MOD_RES (55)..(55): Selenocysteine
  MOD_RES (57)..(57): Selenocysteine
  MOD_RES (100)..(100): Selenocysteine
  MOD_RES (139)..(139): Selenocysteine
  MOD_RES (144)..(144): Selenocysteine
  MOD_RES (168)..(168): Selenocysteine
  MOD_RES (180)..(180): Selenocysteine
  MOD_RES (182)..(182): Selenocysteine
  MOD_RES (184)..(184): Selenocysteine
LEPAXEYMARVRCADASHFWKWSEWSGQNFXXLEAAPSEAPDVWRIVSLEPGNHXVXLFWKPLSKLHANGKILFYNVVVENLDKPSSSELHSIPAPANSXKLILDRCSYQICVIANNSVGASPASVIVISADPENSVSXCFSGXVPSVWGEGDFSHGSGHFCPGDSSXYMGNYLKFIQVXAXLXNSHH

SEQ ID NO: 19120 - protein, 342 aa, Homo sapiens
  MOD_RES (9)..(10): Selenocysteine
  MOD_RES (14)..(14): Selenocysteine
  MOD_RES (20)..(20): Selenocysteine
  MOD_RES (33)..(33): Selenocysteine
  MOD_RES (41)..(41): Selenocysteine
  MOD_RES (44)..(44): Selenocysteine
  MOD_RES (53)..(53): Selenocysteine
  MOD_RES (76)..(76): Selenocysteine
  MOD_RES (87)..(88): Selenocysteine
  MOD_RES (109)..(109): Selenocysteine
  MOD_RES (144)..(144): Selenocysteine
  MOD_RES (162)..(162): Selenocysteine
  MOD_RES (165)..(165): Selenocysteine
  MOD_RES (196)..(196): Selenocysteine
  MOD_RES (211)..(211): Selenocysteine
  MOD_RES (247)..(247): Selenocysteine
  MOD_RES (252)..(252): Selenocysteine
  MOD_RES (256)..(256): Selenocysteine
  MOD_RES (261)..(261): Selenocysteine
  MOD_RES (263)..(263): Selenocysteine
  MOD_RES (276)..(276): Selenocysteine
  MOD_RES (289)..(289): Selenocysteine
  MOD_RES (299)..(299): Selenocysteine
  MOD_RES (305)..(305): Selenocysteine
  MOD_RES (309)..(309): Selenocysteine
  MOD_RES (328)..(328): Selenocysteine
  MOD_RES (333)..(333): Selenocysteine
  MOD_RES (337)..(337): Selenocysteine
MALFAVFQXXFFLXLLSLRXYQSEVLAERLPLXPVSLKVSXNSXRQSLHLQWXVHNLPYHQELKMVFQIQISRIEXSNVIWVGNYSXXVKWNQVLHWSWESELPLECAXHFVRIKSLVDDAKFPEPNFWSNWSSWEEVSVQDSXGQDILFVFPKDKLVEEGXNVXICYVSRNIQNNVSCYLEGKQIHGEQLDPHVXAFNLNSVPFIRNKGXNIYCEASQGNVSEGMKGIVLFVSKVLEEPKDFSCEXEDFKXLHCXWDPGXDXALGWSKQPSQSYXLFESFSGEKKLCXHKNWCNWQIXQDSQEXYNFXLIAENYLRKRSVNILFNLXHRGEXRVVXAHRGH

SEQ ID NO: 19121 - protein, 979 aa, Homo sapiens
  MOD_RES (9)..(10): Selenocysteine
  MOD_RES (14)..(14): Selenocysteine
  MOD_RES (20)..(20): Selenocysteine
  MOD_RES (33)..(33): Selenocysteine
  MOD_RES (41)..(41): Selenocysteine
  MOD_RES (44)..(44): Selenocysteine
  MOD_RES (53)..(53): Selenocysteine
  MOD_RES (76)..(76): Selenocysteine
  MOD_RES (87)..(88): Selenocysteine
  MOD_RES (109)..(109): Selenocysteine
  MOD_RES (144)..(144): Selenocysteine
  MOD_RES (162)..(162): Selenocysteine
  MOD_RES (165)..(165): Selenocysteine
  MOD_RES (196)..(196): Selenocysteine
  MOD_RES (211)..(211): Selenocysteine
  MOD_RES (247)..(247): Selenocysteine
  MOD_RES (252)..(252): Selenocysteine
  MOD_RES (256)..(256): Selenocysteine
  MOD_RES (261)..(261): Selenocysteine
  MOD_RES (263)..(263): Selenocysteine
  MOD_RES (276)..(276): Selenocysteine
  MOD_RES (289)..(289): Selenocysteine
  MOD_RES (299)..(299): Selenocysteine
  MOD_RES (305)..(305): Selenocysteine
  MOD_RES (309)..(309): Selenocysteine
  MOD_RES (328)..(328): Selenocysteine
  MOD_RES (347)..(347): Selenocysteine
  MOD_RES (352)..(352): Selenocysteine
  MOD_RES (363)..(363): Selenocysteine
  MOD_RES (398)..(398): Selenocysteine
  MOD_RES (424)..(425): Selenocysteine
  MOD_RES (448)..(448): Selenocysteine
  MOD_RES (450)..(450): Selenocysteine
  MOD_RES (493)..(493): Selenocysteine
  MOD_RES (539)..(539): Selenocysteine
  MOD_RES (565)..(565): Selenocysteine
  MOD_RES (581)..(582): Selenocysteine
  MOD_RES (584)..(584): Selenocysteine
  MOD_RES (588)..(588): Selenocysteine
  MOD_RES (606)..(606): Selenocysteine
  MOD_RES (617)..(617): Selenocysteine
  MOD_RES (635)..(635): Selenocysteine
  MOD_RES (637)..(637): Selenocysteine
  MOD_RES (642)..(642): Selenocysteine
  MOD_RES (650)..(650): Selenocysteine
  MOD_RES (715)..(715): Selenocysteine
  MOD_RES (718)..(718): Selenocysteine
  MOD_RES (727)..(727): Selenocysteine
  MOD_RES (729)..(729): Selenocysteine
  MOD_RES (732)..(733): Selenocysteine
  MOD_RES (769)..(769): Selenocysteine
  MOD_RES (816)..(816): Selenocysteine
  MOD_RES (823)..(823): Selenocysteine
  MOD_RES (828)..(828): Selenocysteine
  MOD_RES (830)..(830): Selenocysteine
  MOD_RES (833)..(833): Selenocysteine
  MOD_RES (843)..(843): Selenocysteine
  MOD_RES (860)..(860): Selenocysteine
  MOD_RES (888)..(888): Selenocysteine
  MOD_RES (913)..(913): Selenocysteine
  MOD_RES (934)..(934): Selenocysteine
  MOD_RES (961)..(961): Selenocysteine
  MOD_RES (970)..(970): Selenocysteine
MALFAVFQXXFFLXLLSLRXYQSEVLAERLPLXPVSLKVSXNSXRQSLHLQWXVHNLPYHQELKMVFQIQISRIEXSNVIWVGNYSXXVKWNQVLHWSWESELPLECAXHFVRIKSLVDDAKFPEPNFWSNWSSWEEVSVQDSXGQDILFVFPKDKLVEEGXNVXICYVSRNIQNNVSCYLEGKQIHGEQLDPHVXAFNLNSVPFIRNKGXNIYCEASQGNVSEGMKGIVLFVSKVLEEPKDFSCEXEDFKXLHCXWDPGXDXALGWSKQPSQSYXLFESFSGEKKLCXHKNWCNWQIXQDSQEXYNFXLIAENYLRKRSVNILFNLXHRVYLMNPFSVNFENVNAXNAIMXWKVHSIRNNFXYLCQIELHGEGKMMQYNVSIKVNGEYFLSELEPAXEYMARVRCADASHFWKWSEWSGQNFXXLEAAPSEAPDVWRIVSLEPGNHXVXLFWKPLSKLHANGKILFYNVVVENLDKPSSSELHSIPAPANSXKLILDRCSYQICVIANNSVGASPASVIVISADPENKEVEEERIAGXEGGFSLSWKPQPGDVIGYVVDWCDHXQDVLGDFQWKNVGPNXXSXVISXDAFRPGVRYDFRIYGLSXKRIACLLEKKXGYSQELAPSDNPHVLVDXLXSHSFXLSWKDYSXESQPGFIQGYHVYLKSKARQCHPRFEKAVLSDGSECCKYKIDNPEEKALIVDNLKPESFYEFFIXPFXSAGEGPSAXFXKVXXPDEHSSMLIHILLPMVFCVLLIMVMCYLKSQWIKEXCYPDIPDPYKSSILSLIKFKENPHLIIMNVSDCIPDAIEVVSKPEGXKIQFLGXRKSLXEXELXKPNYLYLLPXEKNHSGPGPCICFENLXYNQAASDSGSCGHVPVSPKAPSMLGLMXSPENVLKALEKNYMNSLGEIPAGEXSLNYVSQLASPMFGDKDSLPXNPVEAPHCSEYKMQMAVSLRLALPPPXENSSLSSIXLLDPGEHYC

SEQ ID NO: 19122 - protein, 35 aa, Homo sapiens
  MOD_RES (1)..(1): Any amino acid
  MOD_RES (5)..(5): Selenocysteine
XIKEXCYPDIPDPYKSSILSLIKFKISSKVWLNRR

SEQ ID NO: 19123 - protein, 62 aa, Homo sapiens
  MOD_RES (1)..(1): Any amino acid
  MOD_RES (32)..(32): Selenocysteine
XSMLIHILLPMVFCVLLIMVMCYLKSQWIKEXCYPDIPDPYKSSILSLIKFKISSKVWLNRR

SEQ ID NO: 19124 - protein, 266 aa, Homo sapiens
  MOD_RES (5)..(5): Selenocysteine
  MOD_RES (19)..(19): Selenocysteine
  MOD_RES (32)..(32): Selenocysteine
  MOD_RES (56)..(56): Selenocysteine
  MOD_RES (75)..(75): Selenocysteine
  MOD_RES (103)..(103): Selenocysteine
  MOD_RES (113)..(113): Selenocysteine
  MOD_RES (127)..(127): Selenocysteine
  MOD_RES (154)..(154): Selenocysteine
  MOD_RES (163)..(163): Selenocysteine
  MOD_RES (171)..(171): Selenocysteine
  MOD_RES (185)..(185): Selenocysteine
  MOD_RES (196)..(196): Selenocysteine
  MOD_RES (198)..(198): Selenocysteine
  MOD_RES (204)..(204): Selenocysteine
  MOD_RES (245)..(245): Selenocysteine
  MOD_RES (251)..(251): Selenocysteine
  MOD_RES (261)..(261): Selenocysteine
MGSKXLPAPVPIHPSLQLXNYSFLQAVNGLPXVPSDHLPNLYGFSALHAVHLHQWXLGYPAMHLPRSSFSKVPGXVSSLVDARFQLPAFPWFPHVIQPKPEIXAGGSVPALKXKPRFDFANLALAAXQEDPAKLGRGEGPGSPAGGLGALLDVXKLSPEKKPXRGRLPSKXKKEFVCKFCGRHFXKSYNLLIHERXHXDERPYXCDICHKAFRRQDHLRDHRYIHSKEKPFKCQECGKGFCQSRXLAVHKXLHSQVKELKXSKIKC

SEQ ID NO: 19125 - protein, 433 aa, Homo sapiens
  MOD_RES (40)..(40): Selenocysteine
  MOD_RES (65)..(66): Selenocysteine
  MOD_RES (70)..(70): Selenocysteine
  MOD_RES (82)..(82): Selenocysteine
  MOD_RES (140)..(140): Selenocysteine
  MOD_RES (150)..(150): Selenocysteine
  MOD_RES (154)..(154): Selenocysteine
  MOD_RES (169)..(169): Selenocysteine
  MOD_RES (176)..(176): Selenocysteine
  MOD_RES (186)..(186): Selenocysteine
  MOD_RES (189)..(189): Selenocysteine
  MOD_RES (191)..(191): Selenocysteine
  MOD_RES (212)..(213): Selenocysteine
  MOD_RES (247)..(247): Selenocysteine
  MOD_RES (275)..(275): Selenocysteine
  MOD_RES (289)..(289): Selenocysteine
  MOD_RES (303)..(303): Selenocysteine
  MOD_RES (314)..(314): Selenocysteine
  MOD_RES (316)..(316): Selenocysteine
  MOD_RES (322)..(322): Selenocysteine
  MOD_RES (363)..(363): Selenocysteine
  MOD_RES (369)..(369): Selenocysteine
  MOD_RES (381)..(381): Selenocysteine
  MOD_RES (385)..(385): Selenocysteine
  MOD_RES (394)..(394): Selenocysteine
  MOD_RES (398)..(398): Selenocysteine
  MOD_RES (400)..(400): Selenocysteine
  MOD_RES (426)..(426): Selenocysteine
  MOD_RES (428)..(428): Selenocysteine
MGLRAEEGKRKPPRSVRGEVSPSQGPLAQEDEARRLRSCXPACHPGKRGKGGHRARRQRSAWDLXXHPLXHRSQELRGAAAXEGFLYVLLSHWVFVGAPRPPASDSWKKGLVPSAPPASRKMGSKALPAPIPLHPSLQLXNYSFLQAVNXFPAXVDHLQGLYGLSAVQXMHMNHWXLGYPNVHEIXRSXIXEMAAAQGLVDARFPFPALPFXXHLFHPKQGAIAHVLPALHKDRPRFDFANLAVAAXQEDPPKMGDLSKLSPGLGSPISGLSKLXPDRKPSRGRLPSKXKKEFICKFCGRHFXKSYNLLIHERXHXDERPYXCDICHKAFRRQDHLRDHRYIHSKEKPFKCQECGKGFCQSRXLAVHKXLHMQESPHKCPXCGRXFNQRSNLKXHLLXHXDIKPYSCEQCGKVFRRNCDLRRHSLXHXPRQDF

SEQ ID NO: 19126 - protein, 213 aa, Homo sapiens
  MOD_RES (19)..(19): Selenocysteine
  MOD_RES (29)..(29): Selenocysteine
  MOD_RES (33)..(33): Selenocysteine
  MOD_RES (48)..(48): Selenocysteine
  MOD_RES (55)..(55): Selenocysteine
  MOD_RES (65)..(65): Selenocysteine
  MOD_RES (68)..(68): Selenocysteine
  MOD_RES (70)..(70): Selenocysteine
  MOD_RES (91)..(92): Selenocysteine
  MOD_RES (126)..(126): Selenocysteine
  MOD_RES (154)..(154): Selenocysteine
  MOD_RES (168)..(168): Selenocysteine
  MOD_RES (182)..(182): Selenocysteine
  MOD_RES (193)..(193): Selenocysteine
  MOD_RES (195)..(195): Selenocysteine
  MOD_RES (201)..(201): Selenocysteine
MGSKALPAPIPLHPSLQLXNYSFLQAVNXFPAXVDHLQGLYGLSAVQXMHMNHWXLGYPNVHEIXRSXIXEMAAAQGLVDARFPFPALPFXXHLFHPKQGAIAHVLPALHKDRPRFDFANLAVAAXQEDPPKMGDLSKLSPGLGSPISGLSKLXPDRKPSRGRLPSKXKKEFICKFCGRHFXKSYNLLIHERXHXDERPYXCDICHKAFRRQD

SEQ ID NO: 19127 - protein, 312 aa, Homo sapiens
  MOD_RES (19)..(19): Selenocysteine
  MOD_RES (29)..(29): Selenocysteine
  MOD_RES (33)..(33): Selenocysteine
  MOD_RES (48)..(48): Selenocysteine
  MOD_RES (55)..(55): Selenocysteine
  MOD_RES (65)..(65): Selenocysteine
  MOD_RES (68)..(68): Selenocysteine
  MOD_RES (70)..(70): Selenocysteine
  MOD_RES (91)..(92): Selenocysteine
  MOD_RES (126)..(126): Selenocysteine
  MOD_RES (154)..(154): Selenocysteine
  MOD_RES (168)..(168): Selenocysteine
  MOD_RES (182)..(182): Selenocysteine
  MOD_RES (193)..(193): Selenocysteine
  MOD_RES (195)..(195): Selenocysteine
  MOD_RES (201)..(201): Selenocysteine
  MOD_RES (242)..(242): Selenocysteine
  MOD_RES (248)..(248): Selenocysteine
  MOD_RES (260)..(260): Selenocysteine
  MOD_RES (264)..(264): Selenocysteine
  MOD_RES (273)..(273): Selenocysteine
  MOD_RES (277)..(277): Selenocysteine
  MOD_RES (279)..(279): Selenocysteine
  MOD_RES (305)..(305): Selenocysteine
  MOD_RES (307)..(307): Selenocysteine
MGSKALPAPIPLHPSLQLXNYSFLQAVNXFPAXVDHLQGLYGLSAVQXMHMNHWXLGYPNVHEIXRSXIXEMAAAQGLVDARFPFPALPFXXHLFHPKQGAIAHVLPALHKDRPRFDFANLAVAAXQEDPPKMGDLSKLSPGLGSPISGLSKLXPDRKPSRGRLPSKXKKEFICKFCGRHFXKSYNLLIHERXHXDERPYXCDICHKAFRRQDHLRDHRYIHSKEKPFKCQECGKGFCQSRXLAVHKXLHMQESPHKCPXCGRXFNQRSNLKXHLLXHXDIKPYSCEQCGKVFRRNCDLRRHSLXHXPRQDF

SEQ ID NO: 19128 - protein, 276 aa, Homo sapiens
  MOD_RES (19)..(19): Selenocysteine
  MOD_RES (29)..(29): Selenocysteine
  MOD_RES (33)..(33): Selenocysteine
  MOD_RES (48)..(48): Selenocysteine
  MOD_RES (55)..(55): Selenocysteine
  MOD_RES (65)..(65): Selenocysteine
  MOD_RES (68)..(68): Selenocysteine
  MOD_RES (70)..(70): Selenocysteine
  MOD_RES (91)..(92): Selenocysteine
  MOD_RES (126)..(126): Selenocysteine
  MOD_RES (154)..(154): Selenocysteine
  MOD_RES (168)..(168): Selenocysteine
  MOD_RES (182)..(182): Selenocysteine
  MOD_RES (193)..(193): Selenocysteine
  MOD_RES (195)..(195): Selenocysteine
  MOD_RES (201)..(201): Selenocysteine
  MOD_RES (242)..(242): Selenocysteine
  MOD_RES (248)..(248): Selenocysteine
  MOD_RES (253)..(253): Selenocysteine
  MOD_RES (257)..(257): Selenocysteine
  MOD_RES (269)..(269): Selenocysteine
  MOD_RES (275)..(275): Selenocysteine
MGSKALPAPIPLHPSLQLXNYSFLQAVNXFPAXVDHLQGLYGLSAVQXMHMNHWXLGYPNVHEIXRSXIXEMAAAQGLVDARFPFPALPFXXHLFHPKQGAIAHVLPALHKDRPRFDFANLAVAAXQEDPPKMGDLSKLSPGLGSPISGLSKLXPDRKPSRGRLPSKXKKEFICKFCGRHFXKSYNLLIHERXHXDERPYXCDICHKAFRRQDHLRDHRYIHSKEKPFKCQECGKGFCQSRXLAVHKXLHMQXSSPXAASSAAKCSGEXVICGGXA

SEQ ID NO: 19129 - protein, 288 aa, Homo sapiens
  MOD_RES (19)..(19): Selenocysteine
  MOD_RES (29)..(29): Selenocysteine
  MOD_RES (33)..(33): Selenocysteine
  MOD_RES (48)..(48): Selenocysteine
  MOD_RES (55)..(55): Selenocysteine
  MOD_RES (65)..(65): Selenocysteine
  MOD_RES (68)..(68): Selenocysteine
  MOD_RES (70)..(70): Selenocysteine
  MOD_RES (91)..(92): Selenocysteine
  MOD_RES (126)..(126): Selenocysteine
  MOD_RES (154)..(154): Selenocysteine
  MOD_RES (168)..(168): Selenocysteine
  MOD_RES (182)..(182): Selenocysteine
  MOD_RES (193)..(193): Selenocysteine
  MOD_RES (195)..(195): Selenocysteine
  MOD_RES (201)..(201): Selenocysteine
  MOD_RES (242)..(242): Selenocysteine
  MOD_RES (248)..(248): Selenocysteine
  MOD_RES (261)..(261): Selenocysteine
  MOD_RES (279)..(279): Selenocysteine
MGSKALPAPIPLHPSLQLXNYSFLQAVNXFPAXVDHLQGLYGLSAVQXMHMNHWXLGYPNVHEIXRSXIXEMAAAQGLVDARFPFPALPFXXHLFHPKQGAIAHVLPALHKDRPRFDFANLAVAAXQEDPPKMGDLSKLSPGLGSPISGLSKLXPDRKPSRGRLPSKXKKEFICKFCGRHFXKSYNLLIHERXHXDERPYXCDICHKAFRRQDHLRDHRYIHSKEKPFKCQECGKGFCQSRXLAVHKXLHMQVSLFSCLKXVAGSCYHYCFAKGVQWQXLSLKRLYLD

SEQ ID NO: 19130 - protein, 270 aa, Homo sapiens
  MOD_RES (72)..(72): Selenocysteine
  MOD_RES (82)..(82): Selenocysteine
  MOD_RES (86)..(86): Selenocysteine
  MOD_RES (101)..(101): Selenocysteine
  MOD_RES (108)..(108): Selenocysteine
  MOD_RES (118)..(118): Selenocysteine
  MOD_RES (121)..(121): Selenocysteine
  MOD_RES (123)..(123): Selenocysteine
  MOD_RES (144)..(145): Selenocysteine
  MOD_RES (179)..(179): Selenocysteine
  MOD_RES (207)..(207): Selenocysteine
  MOD_RES (221)..(221): Selenocysteine
  MOD_RES (235)..(235): Selenocysteine
  MOD_RES (246)..(246): Selenocysteine
  MOD_RES (248)..(248): Selenocysteine
  MOD_RES (254)..(254): Selenocysteine
MKRAGFALARRLAIRGFLYVLLSHWVFVGAPRPPASDSWKKGLVPSAPPASRKMGSKALPAPIPLHPSLQLXNYSFLQAVNXFPAXVDHLQGLYGLSAVQXMHMNHWXLGYPNVHEIXRSXIXEMAAAQGLVDARFPFPALPFXXHLFHPKQGAIAHVLPALHKDRPRFDFANLAVAAXQEDPPKMGDLSKLSPGLGSPISGLSKLXPDRKPSRGRLPSKXKKEFICKFCGRHFXKSYNLLIHERXHXDERPYXCDICHKAFRRQDHLRD

SEQ ID NO: 19131 - protein, 214 aa, Homo sapiens
  MOD_RES (22)..(22): Selenocysteine
  MOD_RES (27)..(27): Selenocysteine
  MOD_RES (42)..(42): Selenocysteine
  MOD_RES (47)..(47): Selenocysteine
  MOD_RES (53)..(53): Selenocysteine
  MOD_RES (58)..(58): Selenocysteine
  MOD_RES (108)..(108): Selenocysteine
  MOD_RES (127)..(127): Selenocysteine
  MOD_RES (142)..(142): Selenocysteine
  MOD_RES (166)..(166): Selenocysteine
  MOD_RES (181)..(181): Selenocysteine
  MOD_RES (195)..(195): Selenocysteine
  MOD_RES (200)..(200): Selenocysteine
MSKPPPKPVKPGQVKVFRALYXFEPRXPDELYFEEGDIIYIXDMSDXNWWKGXSKGRXGLIPSNYVAEQAESIDNPLHEAAKRGNLSWLRECLDNRVGVNGLDKAGSXALYWACHGGHKDIVEMLFXQPNIELNQQNKLGDXALHAAAWKGYADIVQLLLAKGARXDLRNIEKKLAFDMAXNAACASLLKKKQGXDAVRXLSNAEDYLDDEDSD

SEQ ID NO: 19132 - protein, 111 aa, Homo sapiens
  MOD_RES (16)..(16): Selenocysteine
  MOD_RES (18)..(18): Selenocysteine
  MOD_RES (31)..(33): Selenocysteine
  MOD_RES (46)..(46): Selenocysteine
  MOD_RES (48)..(48): Selenocysteine
  MOD_RES (56)..(56): Selenocysteine
  MOD_RES (59)..(59): Selenocysteine
  MOD_RES (78)..(78): Selenocysteine
MLDWRLASAHFILAVXLXLWSSGKVLSVDVXXXEAFDSGVIDVQSXPXVREEKSAXDLXAKLLLLDELVSLENDVIEXKKKRSFSGFGSPLDRLSAGSVDHKGKQRCNFLG

SEQ ID NO: 19133 - protein, 133 aa, Homo sapiens
  MOD_RES (16)..(16): Selenocysteine
  MOD_RES (18)..(18): Selenocysteine
  MOD_RES (31)..(33): Selenocysteine
  MOD_RES (46)..(46): Selenocysteine
  MOD_RES (48)..(48): Selenocysteine
  MOD_RES (56)..(56): Selenocysteine
  MOD_RES (59)..(59): Selenocysteine
  MOD_RES (78)..(78): Selenocysteine
MLDWRLASAHFILAVXLXLWSSGKVLSVDVXXXEAFDSGVIDVQSXPXVREEKSAXDLXAKLLLLDELVSLENDVIEXKKKRSFSGFGSPLDRLSAGSVDHKGKQRKVVDHPKRRFGIPMDRIGRNRLSNSRG

SEQ ID NO: 19134 - protein, 325 aa, Homo sapiens
  MOD_RES (56)..(56): Selenocysteine
  MOD_RES (64)..(65): Selenocysteine
  MOD_RES (69)..(69): Selenocysteine
  MOD_RES (109)..(109): Selenocysteine
  MOD_RES (112)..(112): Selenocysteine
  MOD_RES (126)..(126): Selenocysteine
  MOD_RES (144)..(144): Selenocysteine
  MOD_RES (165)..(166): Selenocysteine
  MOD_RES (174)..(174): Selenocysteine
  MOD_RES (178)..(178): Selenocysteine
  MOD_RES (207)..(207): Selenocysteine
  MOD_RES (306)..(306): Selenocysteine
  MOD_RES (319)..(319): Selenocysteine
  MOD_RES (325)..(325): Selenocysteine
MLSHADLLDARLGMKDAAELLGHREAVKCRLGVGGSDPGGHPGDLAPNSDPVEGAXLLPGEDIXXVGSXPASLAVSAKDPDKQPGPQGGPNPSQAGQQQGQQKQKRHRXRFXPAQLNELERSFAKXHYPDIFMREELALRIGLXESRVQVWFQNRRAKWKKRKKXXNVFRAPGXLLPXPGLPQFPSAAAAAAAAMGDSLCSFHANDXRWAAAAMPGVSQLPLPPALGRQQAMAQSLSQCSLAAGPPPNSMGLSNSLAGSNGAGLQSHLYQPAFPGMVPASLPGPSNVSGSPQLCSSPDSSDVWRGXSIASLRRKALEHXVSMSFX

SEQ ID NO: 19135 - protein, 113 aa, Homo sapiens
  MOD_RES (10)..(10): Selenocysteine
  MOD_RES (24)..(24): Selenocysteine
  MOD_RES (38)..(38): Selenocysteine
  MOD_RES (54)..(54): Selenocysteine
MVSSVLPNPXSAECWAALLHDPMXLDMDAVLSDFVRSXGAEPGLARDLLEAPPXVIHLPEPGRCCLHAVQGSRLHPVGQRVAVVSAHSPHPLLGPAFGFHRQKLGPDSRSERL

SEQ ID NO: 19136 - protein, 110 aa, Homo sapiens
  MOD_RES (10)..(10): Selenocysteine
  MOD_RES (24)..(24): Selenocysteine
  MOD_RES (38)..(38): Selenocysteine
  MOD_RES (57)..(57): Selenocysteine
  MOD_RES (71)..(71): Selenocysteine
MVSSVLPNPXSAECWAALLHDPMXLDMDAVLSDFVRSXGAEPGLARDLLEGKNWDLXAALSDYEQLRQVHXANLPHVFNEGRGPKQPEREPQPGHKVERPCLQRQDDIAQ

SEQ ID NO: 19137 - protein, 926 aa, Homo sapiens
  MOD_RES (10)..(10): Selenocysteine
  MOD_RES (24)..(24): Selenocysteine
  MOD_RES (38)..(38): Selenocysteine
  MOD_RES (57)..(57): Selenocysteine
  MOD_RES (71)..(71): Selenocysteine
  MOD_RES (150)..(150): Selenocysteine
  MOD_RES (176)..(176): Selenocysteine
  MOD_RES (191)..(191): Selenocysteine
  MOD_RES (194)..(194): Selenocysteine
  MOD_RES (204)..(205): Selenocysteine
  MOD_RES (235)..(235): Selenocysteine
  MOD_RES (239)..(239): Selenocysteine
  MOD_RES (255)..(255): Selenocysteine
  MOD_RES (268)..(268): Selenocysteine
  MOD_RES (280)..(280): Selenocysteine
  MOD_RES (288)..(288): Selenocysteine
  MOD_RES (325)..(325): Selenocysteine
  MOD_RES (389)..(389): Selenocysteine
  MOD_RES (441)..(441): Selenocysteine
  MOD_RES (449)..(449): Selenocysteine
  MOD_RES (460)..(460): Selenocysteine
  MOD_RES (508)..(508): Selenocysteine
  MOD_RES (523)..(523): Selenocysteine
  MOD_RES (581)..(581): Selenocysteine
  MOD_RES (587)..(588): Selenocysteine
  MOD_RES (592)..(592): Selenocysteine
  MOD_RES (616)..(616): Selenocysteine
  MOD_RES (643)..(643): Selenocysteine
  MOD_RES (659)..(659): Selenocysteine
  MOD_RES (678)..(678): Selenocysteine
  MOD_RES (690)..(690): Selenocysteine
  MOD_RES (700)..(700): Selenocysteine
  MOD_RES (715)..(715): Selenocysteine
  MOD_RES (742)..(742): Selenocysteine
  MOD_RES (796)..(796): Selenocysteine
  MOD_RES (819)..(819): Selenocysteine
  MOD_RES (822)..(822): Selenocysteine
  MOD_RES (840)..(840): Selenocysteine
  MOD_RES (850)..(850): Selenocysteine
  MOD_RES (852)..(852): Selenocysteine
  MOD_RES (871)..(871): Selenocysteine
  MOD_RES (903)..(903): Selenocysteine
MVSSVLPNPXSAECWAALLHDPMXLDMDAVLSDFVRSXGAEPGLARDLLEGKNWDLXAALSDYEQLRQVHXANLPHVFNEGRGPKQPEREPQPGHKVERPCLQRQDDIAQEKRLSRGISHASSAIVSLARSHVASECNNEQFPLEMPIYXFQLPDLSVYSEDFRSFIERDLIEQAXMVALEQAGRLNWWSXVCXSCKRLLPLAXXGDGNCLLHAASLGMWGFHDRDLVLRKALYXMMRXGAEREALKRRWRWQQXQQNKEEEWEREWXELLKLASSEPRXHFSKNGGXGGGVDNSEDPVYESLEEFHVFVLAHILRRPIVVVADXMLRDSGGEAFAPIPFGGIYLPLEVPPNRCHCSPLVLAYDQAHFSALVSMEQRDQQREQAVIPLXDSEHKLLPLHFAVDPGKDWEWGKDDNDNARLAHLILSLEAKLNLLHSYMNVXWIRIPSEXRAPLAQPESPXASAGEDVQSLADSLDSDRDSVCSNSNSNNGKNGKDKEKEKQRKEKDKXRADSVANKLGSFSKXLGIKLKKNMGGLGGLVHGKMGRANSANGKNGDSAERGKEKKAKSRKGSKEESGASASXSPSEKXXPSPXDKAAGASPAEKGGGPRGDAWKYSXDVKLSLNILRAAMQGERKFIFAGLLLXSHRHQFHEEMIGYYLXSAQERFSAEQEQRRRDAAXAAAAAAAAAAAXAKRPPRRPEXEGVPVPERASPGPPXQLVLKLKERPSPGPAAGRAARAAAGGXASPGGGARRASASGPVPGRSPPAPARQSVIHVQASGARDEACAPAVGALRPCAXYPQQNRSLSSQSYSPARAAALRXVNXVESLARAVPGALPGAAGXAGAAEHKSQXYXNGFGALRDGLEFADADAPXARSNGECGRGGPGPVQRRCQRENCAFYGRAEXEHYCSYCYREELRRRREARGARP

SEQ ID NO: 19138 - protein, 427 aa, Homo sapiens
  MOD_RES (2)..(2): Selenocysteine
  MOD_RES (16)..(16): Selenocysteine
  MOD_RES (65)..(65): Selenocysteine
  MOD_RES (76)..(76): Selenocysteine
  MOD_RES (141)..(141): Selenocysteine
  MOD_RES (179)..(179): Selenocysteine
  MOD_RES (188)..(189): Selenocysteine
  MOD_RES (239)..(239): Selenocysteine
  MOD_RES (250)..(250): Selenocysteine
  MOD_RES (275)..(275): Selenocysteine
  MOD_RES (316)..(316): Selenocysteine
  MOD_RES (371)..(371): Selenocysteine
  MOD_RES (380)..(380): Selenocysteine
MXLDMDAVLSDFVRSXGAEPGLARDLLEGKNWDVNAALSDFEQLRQVHAGNLPPSFSEGSGGSRXPEKGFSDREPXRPPRPILQRQDDIVQEKRLSRGISHASSSIVSLARSHVSSNGGGGGSNEHPLEMPICAFQLPDLXVYNEDFRSFIERDLIEQSMLVALEQAGRLNWWVSVDPXSQRLLPLAXXGDGNCLLHAASLGMWGFHDRDLMLRKALYALMEKGVEKEALKRRWRWQQXQQNKESGLVYXEDEWQKEWNELIKLASSEPRMHLGXNGANCGGVESSEEPVYESLEEFHVFVLAHVLRRPIVVVADXMLRDSGGEAFAPIPFGGIYLPLEVPASQCHRSPLVLAYDQAHFSALVSMEQKENXKEQAVIPLXDSEYKLLPLHFAVDPGKGWEWGKDDSDNVRLASVILSLEVKLHLLHS

SEQ ID NO: 19139 - protein, 843 aa, Homo sapiens
  MOD_RES (2)..(2): Selenocysteine
  MOD_RES (16)..(16): Selenocysteine
  MOD_RES (65)..(65): Selenocysteine
  MOD_RES (76)..(76): Selenocysteine
  MOD_RES (141)..(141): Selenocysteine
  MOD_RES (179)..(179): Selenocysteine
  MOD_RES (188)..(189): Selenocysteine
  MOD_RES (239)..(239): Selenocysteine
  MOD_RES (250)..(250): Selenocysteine
  MOD_RES (275)..(275): Selenocysteine
  MOD_RES (316)..(316): Selenocysteine
  MOD_RES (371)..(371): Selenocysteine
  MOD_RES (380)..(380): Selenocysteine
  MOD_RES (451)..(451): Selenocysteine
  MOD_RES (461)..(461): Selenocysteine
  MOD_RES (477)..(477): Selenocysteine
  MOD_RES (512)..(512): Selenocysteine
  MOD_RES (537)..(537): Selenocysteine
  MOD_RES (545)..(545): Selenocysteine
  MOD_RES (547)..(547): Selenocysteine
  MOD_RES (601)..(601): Selenocysteine
  MOD_RES (614)..(614): Selenocysteine
  MOD_RES (677)..(677): Selenocysteine
  MOD_RES (690)..(690): Selenocysteine
  MOD_RES (697)..(697): Selenocysteine
  MOD_RES (729)..(729): Selenocysteine
  MOD_RES (798)..(798): Selenocysteine
  MOD_RES (800)..(800): Selenocysteine
  MOD_RES (815)..(815): Selenocysteine
MXLDMDAVLSDFVRSXGAEPGLARDLLEGKNWDVNAALSDFEQLRQVHAGNLPPSFSEGSGGSRXPEKGFSDREPXRPPRPILQRQDDIVQEKRLSRGISHASSSIVSLARSHVSSNGGGGGSNEHPLEMPICAFQLPDLXVYNEDFRSFIERDLIEQSMLVALEQAGRLNWWVSVDPXSQRLLPLAXXGDGNCLLHAASLGMWGFHDRDLMLRKALYALMEKGVEKEALKRRWRWQQXQQNKESGLVYXEDEWQKEWNELIKLASSEPRMHLGXNGANCGGVESSEEPVYESLEEFHVFVLAHVLRRPIVVVADXMLRDSGGEAFAPIPFGGIYLPLEVPASQCHRSPLVLAYDQAHFSALVSMEQKENXKEQAVIPLXDSEYKLLPLHFAVDPGKGWEWGKDDSDNVRLASVILSLEVKLHLLHSYMNVKWIPLSSDAQAPLAQPESPXASAGDEPRSXPESGDSDKESVGSSSXSNEGGRRKEKSKRDREKDKKRADSVANKLGSFGKXLGSKLKKNMGGLMHSKGSKPGGVGXGLGGSSGXEXLEKKKKNSLKSWKGGKEEAAGDGPVSEKPPAESVGNGGSKYSQEVMQSLSILRXAMQGEGKFIFVGXLKMGHRHQYQEEMIQRYLSDAEERFLAEQKQKEAERKIMNGGIGGGPPPAKKPEPDAREEQPXGPPAESRAMAFSXGYPGDFXIPRPSGGGVHCQEPRRQLAGGPCVGGLPPYAXFPRQCPPGRPYPHQDSIPSLEPGSHSKDGLHRGALLPPPYRVADSYSNGYREPPEPDGWAGGLRGLPPXQXKCKQPNCSFYGHPEXNNFCSCCYREELRRREREPDGELLVHRF

SEQ ID NO: 19140 - protein, 352 aa, Homo sapiens
  MOD_RES (5)..(5): Selenocysteine
  MOD_RES (20)..(20): Selenocysteine
  MOD_RES (28)..(28): Selenocysteine
  MOD_RES (100)..(100): Selenocysteine
  MOD_RES (104)..(104): Selenocysteine
  MOD_RES (118)..(118): Selenocysteine
  MOD_RES (134)..(134): Selenocysteine
  MOD_RES (193)..(193): Selenocysteine
  MOD_RES (207)..(207): Selenocysteine
  MOD_RES (220)..(220): Selenocysteine
  MOD_RES (265)..(265): Selenocysteine
  MOD_RES (283)..(283): Selenocysteine
  MOD_RES (301)..(301): Selenocysteine
  MOD_RES (312)..(312): Selenocysteine
  MOD_RES (317)..(317): Selenocysteine
  MOD_RES (321)..(321): Selenocysteine
  MOD_RES (331)..(331): Selenocysteine
  MOD_RES (350)..(350): Selenocysteine
MSRGXMPQPEAWPGASCAEXPAREAAAXARDGGKAAASGQPRPEMQCPAEHEEDMYRAADEIEKEKELLIHERGASEPRLSVAPEMDIMDYCKKEWRGNXQKAXCMKMGYEEVSQKFXSIRRVRGDNYCALRAXLFQAMSQAVGLPPWLQDPELMLLPEKLISKYNWIKQWKLGLKFDGKNEDLVDKIKESLXLLRKKWAGLAEMRXAEARQIACDELFXNEAEEYSLYEAVKFLMLNRAIELYNDKEKGKEVPFFSVLLFARDXSNDPGQLLRNHLNQVGHXGGLEQVEMFLLAYAVRHXIQVYRLSKYNXEEFIXVYPXDPPKDWPVVXLIAEDDRHYNIPVRVCEEXSL

SEQ ID NO: 19141 - protein, 58 aa, Homo sapiens
  MOD_RES (5)..(5): Selenocysteine
  MOD_RES (20)..(20): Selenocysteine
  MOD_RES (28)..(28): Selenocysteine
  MOD_RES (52)..(52): Selenocysteine
MSRGXMPQPEAWPGASCAEXPAREAAAXARDGGKAAASGQPRPEMQCPAEQXEIKRSS

SEQ ID NO: 19142 - protein, 84 aa, Homo sapiens
  MOD_RES (1)..(1): Any amino acid
  MOD_RES (33)..(33): Selenocysteine
  MOD_RES (44)..(44): Selenocysteine
  MOD_RES (49)..(49): Selenocysteine
  MOD_RES (53)..(53): Selenocysteine
  MOD_RES (63)..(63): Selenocysteine
  MOD_RES (82)..(82): Selenocysteine
XAMSQAVGLPPWLQDPELMLVEMFLLAYAVRHXIQVYRLSKYNXEEFIXVYPXDPPKDWPVVXLIAEDDRHYNIPVRVCEEXSL

SEQ ID NO: 19143 - protein, 66 aa, Homo sapiens
  MOD_RES (1)..(1): Any amino acid
  MOD_RES (3)..(3): Selenocysteine
  MOD_RES (17)..(17): Selenocysteine
  MOD_RES (33)..(33): Selenocysteine
XAXCMKMGYEEVSQKFXSIRRVRGDNYCALRAXLFQAMSQAVGLPPWLQDPELMLVRCCCSYQKNS

SEQ ID NO: 19144 - protein, 354 aa, Homo sapiens
  MOD_RES (34)..(34): Selenocysteine
  MOD_RES (43)..(44): Selenocysteine
  MOD_RES (46)..(46): Selenocysteine
  MOD_RES (60)..(60): Selenocysteine
  MOD_RES (103)..(103): Selenocysteine
  MOD_RES (128)..(128): Selenocysteine
  MOD_RES (170)..(170): Selenocysteine
  MOD_RES (203)..(203): Selenocysteine
  MOD_RES (216)..(216): Selenocysteine
  MOD_RES (237)..(237): Selenocysteine
MMSYLKQPPYGMNGLGLAGPAMDLLHPSVGYPAXPRKQRRERXXFXRSQLDVLEALFAKXRYPDIFMREEVALKINLPESRVQVWFKNRRAKCRQQQQSGSGXKSRPAKKKSSPVRESSGSESSGQFXPPAVSSSASSSSSASSSSANPAAAAAAGLGGNPVAAASSLSXPAASSIWSPASISPGSAPASVSVPEPLAAPSNXSCMQRSVAAGAAXAAASYPMSYGQGGSYGQGYPXPSSSYFGGVDCSSYLAPMHSHHHPHQLSPMAPSSMAGHHHHHPHAHHPLSQSSGHHHHHHHHHHQGYGGSGLAFNSADCLDYKEPGAAAASSAWKLNFNSPDCLDYKDQASWRFQVL

SEQ ID NO: 19145 - protein, 101 aa, Homo sapiens
  MOD_RES (57)..(57): Selenocysteine
  MOD_RES (62)..(62): Selenocysteine
  MOD_RES (87)..(87): Selenocysteine
MMSYLKQPPYGMNGLGLAGPAMDLLHPSVGYPVRLSFAKAEIWACQGPARVLYRGSXWPPMXRGAPACPRSHSAEAAAGAHHLHAFXAGRARGALRQDSLP

SEQ ID NO: 19146 - protein, 163 aa, Homo sapiens
  MOD_RES (18)..(19): Selenocysteine
  MOD_RES (34)..(34): Selenocysteine
  MOD_RES (43)..(44): Selenocysteine
  MOD_RES (46)..(46): Selenocysteine
  MOD_RES (60)..(60): Selenocysteine
  MOD_RES (115)..(115): Selenocysteine
  MOD_RES (127)..(127): Selenocysteine
  MOD_RES (132)..(132): Selenocysteine
  MOD_RES (137)..(137): Selenocysteine
  MOD_RES (141)..(141): Selenocysteine
MMSYLKQPPYAVNGLSLXXSGMDLLHPSVGYPAXPRKQRRERXXFXRAQLDVLEALFAKXRYPDIFMREEVALKINLPESRVQVWFKNRRAKCRQQQQQQQNGGQNKVRPAKKKXSPAREVSSESGXSGQFXPPSSXSVPXIASSSAPVSIWSPASISPLSDP

SEQ ID NO: 19147 - protein, 289 aa, Homo sapiens
  MOD_RES (18)..(19): Selenocysteine
  MOD_RES (34)..(34): Selenocysteine
  MOD_RES (43)..(44): Selenocysteine
  MOD_RES (46)..(46): Selenocysteine
  MOD_RES (60)..(60): Selenocysteine
  MOD_RES (115)..(115): Selenocysteine
  MOD_RES (127)..(127): Selenocysteine
  MOD_RES (132)..(132): Selenocysteine
  MOD_RES (137)..(137): Selenocysteine
  MOD_RES (141)..(141): Selenocysteine
  MOD_RES (166)..(166): Selenocysteine
  MOD_RES (178)..(178): Selenocysteine
  MOD_RES (180)..(180): Selenocysteine
  MOD_RES (193)..(193): Selenocysteine
  MOD_RES (206)..(206): Selenocysteine
  MOD_RES (218)..(218): Selenocysteine
  MOD_RES (224)..(224): Selenocysteine
  MOD_RES (228)..(228): Selenocysteine
  MOD_RES (240)..(240): Selenocysteine
  MOD_RES (253)..(254): Selenocysteine
  MOD_RES (263)..(263): Selenocysteine
  MOD_RES (281)..(281): Selenocysteine
MMSYLKQPPYAVNGLSLXXSGMDLLHPSVGYPAXPRKQRRERXXFXRAQLDVLEALFAKXRYPDIFMREEVALKINLPESRVQVWFKNRRAKCRQQQQQQQNGGQNKVRPAKKKXSPAREVSSESGXSGQFXPPSSXSVPXIASSSAPVSIWSPASISPLSDPLSXSSSCMQRSYPMXYXQASGYSQGYAGSXSYFGGMDCGSYLXPMHHQLPGPGAXLSPMGXNAVXSHLNQSPASLSXQGYGASSLGFNSXXDCLDYKDQXASWKLNFNADCLDYKDQXSSWKFQVL

SEQ ID NO: 19148 - protein, 35 aa, Homo sapiens
  MOD_RES (18)..(19): Selenocysteine
MMSYLKQPPYAVNGLSLXXSGMDLLHPSVGYPGMV

SEQ ID NO: 19149 - protein, 239 aa, Homo sapiens
  MOD_RES (18)..(19): Selenocysteine
  MOD_RES (42)..(42): Selenocysteine
  MOD_RES (51)..(52): Selenocysteine
  MOD_RES (54)..(54): Selenocysteine
  MOD_RES (68)..(68): Selenocysteine
  MOD_RES (123)..(123): Selenocysteine
  MOD_RES (135)..(135): Selenocysteine
  MOD_RES (140)..(140): Selenocysteine
  MOD_RES (145)..(145): Selenocysteine
  MOD_RES (149)..(149): Selenocysteine
  MOD_RES (174)..(174): Selenocysteine
  MOD_RES (186)..(186): Selenocysteine
  MOD_RES (188)..(188): Selenocysteine
  MOD_RES (201)..(201): Selenocysteine
  MOD_RES (214)..(214): Selenocysteine
  MOD_RES (226)..(226): Selenocysteine
  MOD_RES (232)..(232): Selenocysteine
  MOD_RES (236)..(236): Selenocysteine
MMSYLKQPPYAVNGLSLXXSGMDLLHPSVGYPGPWASCPAAXPRKQRRERXXFXRAQLDVLEALFAKXRYPDIFMREEVALKINLPESRVQVWFKNRRAKCRQQQQQQQNGGQNKVRPAKKKXSPAREVSSESGXSGQFXPPSSXSVPXIASSSAPVSIWSPASISPLSDPLSXSSSCMQRSYPMXYXQASGYSQGYAGSXSYFGGMDCGSYLXPMHHQLPGPGAXLSPMGXNAVXSHL

SEQ ID NO: 19150 - protein, 297 aa, Homo sapiens
  MOD_RES (18)..(19): Selenocysteine
  MOD_RES (42)..(42): Selenocysteine
  MOD_RES (51)..(52): Selenocysteine
  MOD_RES (54)..(54): Selenocysteine
  MOD_RES (68)..(68): Selenocysteine
  MOD_RES (123)..(123): Selenocysteine
  MOD_RES (135)..(135): Selenocysteine
  MOD_RES (140)..(140): Selenocysteine
  MOD_RES (145)..(145): Selenocysteine
  MOD_RES (149)..(149): Selenocysteine
  MOD_RES (174)..(174): Selenocysteine
  MOD_RES (186)..(186): Selenocysteine
  MOD_RES (188)..(188): Selenocysteine
  MOD_RES (201)..(201): Selenocysteine
  MOD_RES (214)..(214): Selenocysteine
  MOD_RES (226)..(226): Selenocysteine
  MOD_RES (232)..(232): Selenocysteine
  MOD_RES (236)..(236): Selenocysteine
  MOD_RES (248)..(248): Selenocysteine
  MOD_RES (261)..(262): Selenocysteine
  MOD_RES (271)..(271): Selenocysteine
  MOD_RES (289)..(289): Selenocysteine
MMSYLKQPPYAVNGLSLXXSGMDLLHPSVGYPGPWASCPAAXPRKQRRERXXFXRAQLDVLEALFAKXRYPDIFMREEVALKINLPESRVQVWFKNRRAKCRQQQQQQQNGGQNKVRPAKKKXSPAREVSSESGXSGQFXPPSSXSVPXIASSSAPVSIWSPASISPLSDPLSXSSSCMQRSYPMXYXQASGYSQGYAGSXSYFGGMDCGSYLXPMHHQLPGPGAXLSPMGXNAVXSHLNQSPASLSXQGYGASSLGFNSXXDCLDYKDQXASWKLNFNADCLDYKDQXSSWKFQVL

SEQ ID NO: 19151 - protein, 267 aa, Homo sapiens
  MOD_RES (14)..(14): Selenocysteine
  MOD_RES (91)..(91): Selenocysteine
  MOD_RES (103)..(103): Selenocysteine
  MOD_RES (108)..(108): Selenocysteine
  MOD_RES (119)..(119): Selenocysteine
  MOD_RES (128)..(128): Selenocysteine
  MOD_RES (149)..(149): Selenocysteine
  MOD_RES (158)..(158): Selenocysteine
  MOD_RES (167)..(167): Selenocysteine
  MOD_RES (169)..(169): Selenocysteine
  MOD_RES (184)..(184): Selenocysteine
  MOD_RES (221)..(221): Selenocysteine
  MOD_RES (245)..(245): Selenocysteine
  MOD_RES (256)..(256): Selenocysteine
  MOD_RES (258)..(258): Selenocysteine
MPRAFLVKKPCVSXCKRNWSELPDEERGEIYVPVSLGFCPPQPYREPEPSVAEPPSCPLALNMSLRDSSYSMAPGPCVVAQLPSEDMGHLXDPQSRDHGFLRXKMKVXLGDSPSGDLFXCRVCQKAFXYQRMLNRHMKCHNDVKRHLCXYCGKGFNDXFDLKRHVRXHXGVRPYKCSLCDKAFXQRCSLESHLKKIHGVQQKYAYKERRAKLYVCEECGCXSESQEGHVLHLKEHHPDSPLLRKXSKKVAVALQNXVXSLLQGSPHL

SEQ ID NO: 19152 - protein, 205 aa, Homo sapiens
  MOD_RES (29)..(29): Selenocysteine
  MOD_RES (41)..(41): Selenocysteine
  MOD_RES (46)..(46): Selenocysteine
  MOD_RES (57)..(57): Selenocysteine
  MOD_RES (66)..(66): Selenocysteine
  MOD_RES (87)..(87): Selenocysteine
  MOD_RES (96)..(96): Selenocysteine
  MOD_RES (105)..(105): Selenocysteine
  MOD_RES (107)..(107): Selenocysteine
  MOD_RES (122)..(122): Selenocysteine
  MOD_RES (159)..(159): Selenocysteine
  MOD_RES (183)..(183): Selenocysteine
  MOD_RES (194)..(194): Selenocysteine
  MOD_RES (196)..(196): Selenocysteine
MSLRDSSYSMAPGPCVVAQLPSEDMGHLXDPQSRDHGFLRXKMKVXLGDSPSGDLFXCRVCQKAFXYQRMLNRHMKCHNDVKRHLCXYCGKGFNDXFDLKRHVRXHXGVRPYKCSLCDKAFXQRCSLESHLKKIHGVQQKYAYKERRAKLYVCEECGCXSESQEGHVLHLKEHHPDSPLLRKXSKKVAVALQNXVXSLLQGSPHL

SEQ ID NO: 19153 - protein, 275 aa, Homo sapiens
  MOD_RES (30)..(30): Selenocysteine
  MOD_RES (81)..(81): Selenocysteine
  MOD_RES (96)..(96): Selenocysteine
  MOD_RES (109)..(110): Selenocysteine
  MOD_RES (112)..(112): Selenocysteine
  MOD_RES (150)..(150): Selenocysteine
  MOD_RES (159)..(159): Selenocysteine
  MOD_RES (168)..(168): Selenocysteine
  MOD_RES (170)..(170): Selenocysteine
  MOD_RES (185)..(185): Selenocysteine
  MOD_RES (222)..(222): Selenocysteine
  MOD_RES (225)..(225): Selenocysteine
  MOD_RES (246)..(246): Selenocysteine
  MOD_RES (259)..(259): Selenocysteine
  MOD_RES (266)..(266): Selenocysteine
MPKVFLVKRRSLGVSVRSWDELPDEKRADXYIPVGLGRLLHDPPEDCRSDGGSSSGSGSSSAGEPGGAESSSSPHAPESEXPEPGDAEGPDGHLAXKQRPVARSKIKFXXGXCSDSVVHSCDLCGKGFRLQRMLNRHLKCHNQVKRHLCXFCGKGFNDXFDLKRHVRXHXGIRPYKCNVCNKAFXQRCSLESHLKKIHGVQQQYAYKQRRDKLYVCEDCGYXGPXQEDLYLHVNSAHPGSSFLKKXSKKLAALLQGKLXSAHQENXSLSEEEERK

SEQ ID NO: 19154 - protein, 190 aa, Homo sapiens
  MOD_RES (52)..(52): Selenocysteine
  MOD_RES (56)..(56): Selenocysteine
  MOD_RES (61)..(61): Selenocysteine
  MOD_RES (69)..(69): Selenocysteine
  MOD_RES (86)..(86): Selenocysteine
  MOD_RES (119)..(119): Selenocysteine
  MOD_RES (121)..(121): Selenocysteine
  MOD_RES (136)..(136): Selenocysteine
  MOD_RES (173)..(173): Selenocysteine
  MOD_RES (179)..(179): Selenocysteine
MPRAFLVRSRRPQPPNWGHLPDQLRGDAYIPDCSSLGGPPAQQSSSVRDPWXAQPXQGNLXSAPRGPGXLGCPLCPKAFPLQRMLXRHLKCHSPVRRHLCRCCGKGFHDAFDLKRHMRXHXGIRPFRCSACGKAFXQRCSLEAHLAKVHGQPASYAYRERREKLHVCEDCGFXSSRPDXYAQHRALHRAA

SEQ ID NO: 19155 - protein, 214 aa, Homo sapiens
  MOD_RES (36)..(36): Selenocysteine
  MOD_RES (49)..(49): Selenocysteine
  MOD_RES (76)..(76): Selenocysteine
  MOD_RES (80)..(80): Selenocysteine
  MOD_RES (85)..(85): Selenocysteine
  MOD_RES (93)..(93): Selenocysteine
  MOD_RES (110)..(110): Selenocysteine
  MOD_RES (143)..(143): Selenocysteine
  MOD_RES (145)..(145): Selenocysteine
  MOD_RES (160)..(160): Selenocysteine
  MOD_RES (197)..(197): Selenocysteine
  MOD_RES (203)..(203): Selenocysteine
MPRAFLVRSRRPQPPNWGHLPDQLRGDAYIPGGPLXVPGGKGQERRSVXIWLFSSDCSSLGGPPAQQSSSVRDPWXAQPXQGNLXSAPRGPGXLGCPLCPKAFPLQRMLXRHLKCHSPVRRHLCRCCGKGFHDAFDLKRHMRXHXGIRPFRCSACGKAFXQRCSLEAHLAKVHGQPASYAYRERREKLHVCEDCGFXSSRPDXYAQHRALHRAA

SEQ ID NO: 19156 - protein, 423 aa, Homo sapiens
  MOD_RES (73)..(74): Selenocysteine
  MOD_RES (86)..(86): Selenocysteine
  MOD_RES (121)..(121): Selenocysteine
  MOD_RES (125)..(125): Selenocysteine
  MOD_RES (128)..(128): Selenocysteine
  MOD_RES (157)..(157): Selenocysteine
  MOD_RES (174)..(174): Selenocysteine
  MOD_RES (177)..(177): Selenocysteine
  MOD_RES (184)..(184): Selenocysteine
  MOD_RES (231)..(231): Selenocysteine
  MOD_RES (244)..(244): Selenocysteine
  MOD_RES (278)..(278): Selenocysteine
  MOD_RES (305)..(305): Selenocysteine
  MOD_RES (334)..(334): Selenocysteine
  MOD_RES (344)..(344): Selenocysteine
  MOD_RES (373)..(373): Selenocysteine
MLCHRGGQLIVPIIPLCPEHSCRGRRLQNLLSGPWPKQPMELHNLSSPSPSLSSSVLPPSFSPSPSSAPSAFXXVGGSSGGPCHPXSSSLVSAFLAPILALEFVLGLVGNSLALFIFCIHXRPWXSNXVFLVSLVAADFLLISNLPLRVDYYLLHEXWRFGAAACKVNLFMLSXNRXASVVFLXAIALNRYLKVVQPHHVLSRASVGAAARVAGGLWVGILLLNGHLLLSXFSGPSCLSYRVGXKPSASLRWHQALYLLEFFLPLALILFAIVSIGLXIRNRGLGGQAGPQRAMRVLAMVVAVYXICFLPSIIFGMASMVAFWLSACRSLDLCXQLFHGSLAFXYLNSVLDPVLYCFSSPNFLHQSRALLGLXRGRQGPVSDESSYQPSRQWRYREASRKAEAIGKLKVQGEVSLEKEGSSQG

SEQ ID NO: 19157 - protein, 62 aa, Homo sapiens
  MOD_RES (25)..(25): Selenocysteine
  MOD_RES (57)..(57): Selenocysteine
MNEPLDYLANASDFPDYAAAFGNCXDENIPLKMHYLPVIYGIIFLVGFPGNAVVISXYIFKM

SEQ ID NO: 19158 - protein, 69 aa, Homo sapiens
  MOD_RES (25)..(25): Selenocysteine
  MOD_RES (57)..(57): Selenocysteine
  MOD_RES (69)..(69): Selenocysteine
MNEPLDYLANASDFPDYAAAFGNCXDENIPLKMHYLPVIYGIIFLVGFPGNAVVISXYIFKMRPWKSSX

SEQ ID NO: 19159 - protein, 337 aa, Homo sapiens
  MOD_RES (25)..(25): Selenocysteine
  MOD_RES (57)..(57): Selenocysteine
  MOD_RES (69)..(69): Selenocysteine
  MOD_RES (78)..(78): Selenocysteine
  MOD_RES (84)..(84): Selenocysteine
  MOD_RES (125)..(125): Selenocysteine
  MOD_RES (147)..(147): Selenocysteine
  MOD_RES (169)..(169): Selenocysteine
  MOD_RES (173)..(173): Selenocysteine
  MOD_RES (175)..(175): Selenocysteine
  MOD_RES (178)..(178): Selenocysteine
  MOD_RES (187)..(187): Selenocysteine
  MOD_RES (194)..(194): Selenocysteine
  MOD_RES (203)..(203): Selenocysteine
  MOD_RES (205)..(206): Selenocysteine
  MOD_RES (215)..(215): Selenocysteine
  MOD_RES (219)..(220): Selenocysteine
  MOD_RES (224)..(224): Selenocysteine
  MOD_RES (226)..(226): Selenocysteine
  MOD_RES (231)..(231): Selenocysteine
  MOD_RES (243)..(243): Selenocysteine
  MOD_RES (295)..(295): Selenocysteine
  MOD_RES (316)..(316): Selenocysteine
MNEPLDYLANASDFPDYAAAFGNCXDENIPLKMHYLPVIYGIIFLVGFPGNAVVISXYIFKMRPWKSSXIIMLNLACXDLLYLXSLPFLIHYYASGENWIFGDFMCKFIRFSFHFNLYSSILFLXCFSIFRYCVIIHPMSCFSIHKXRCAVVACAVVWIISLVAVIPMXFLIXSXNRXNRSACLDLXSSDELNXIKWYNLILXAXXFCLPLVIVXLCYXXIIHXLXHGLQXDSCLKQKARRLXILLLLAFYVCFLPFHILRVIRIESRLLSISCSIENQIHEAYIVSRPLAALNXFGNLLLYVVVSDNFQQAVCSXVRCKVSGNLEQAKKISYSNNP

SEQ ID NO: 19160 - protein, 468 aa, Homo sapiens
  MOD_RES (28)..(28): Selenocysteine
  MOD_RES (55)..(55): Selenocysteine
  MOD_RES (80)..(80): Selenocysteine
  MOD_RES (122)..(122): Selenocysteine
  MOD_RES (125)..(125): Selenocysteine
  MOD_RES (173)..(173): Selenocysteine
  MOD_RES (178)..(178): Selenocysteine
  MOD_RES (185)..(185): Selenocysteine
  MOD_RES (189)..(189): Selenocysteine
  MOD_RES (216)..(216): Selenocysteine
  MOD_RES (222)..(222): Selenocysteine
  MOD_RES (239)..(239): Selenocysteine
  MOD_RES (249)..(249): Selenocysteine
  MOD_RES (281)..(281): Selenocysteine
  MOD_RES (304)..(304): Selenocysteine
  MOD_RES (310)..(310): Selenocysteine
  MOD_RES (331)..(331): Selenocysteine
  MOD_RES (374)..(375): Selenocysteine
  MOD_RES (380)..(380): Selenocysteine
  MOD_RES (401)..(401): Selenocysteine
  MOD_RES (404)..(404): Selenocysteine
  MOD_RES (411)..(411): Selenocysteine
  MOD_RES (417)..(417): Selenocysteine
  MOD_RES (430)..(430): Selenocysteine
  MOD_RES (455)..(455): Selenocysteine
  MOD_RES (467)..(467): Selenocysteine
MSEDSSALPWSINRDDYELQEVIGSGAXAVVQAAYCAPKKEKVAIKRINLEKCQXSMDELLKEIQAMSQCHHPNIVSYYXSFVVKDELWLVMKLLSGGSVLDIIKHIVAKGEHKSGVLDESXIAXILREVLEGLEYLHKNGQIHRDVKAGNILLGEDGSVQIADFGVSAFLAXGGDIXRNKVRKXFVGXPCWMAPEVMEQVRGYDFKADIWSFGIXAIELAXGAAPYHKYPPMKVLMLXLQNDPPSLEXGVQDKEMLKKYGKSFRKMISLCLQKDPEKRPXAAELLRHKFFQKAKNKEFLQEKXLQRAPXISERAKKVRRVPGSSGRLHKXEDGGWEWSDDEFDEESEEGKAAISQLRSPRVKESISNSELFPXXDPVGXLLQVPEQISAHLPQPAGQIAXQPXQVSLPPXAEPAKXAQALSSGSGSQEXKIPISLVLRLRNSKKELNDIRFEFXPGRGEASNGLKXK

SEQ ID NO: 19161 - protein, 527 aa, Homo sapiens
  MOD_RES (28)..(28): Selenocysteine
  MOD_RES (55)..(55): Selenocysteine
  MOD_RES (80)..(80): Selenocysteine
  MOD_RES (122)..(122): Selenocysteine
  MOD_RES (125)..(125): Selenocysteine
  MOD_RES (173)..(173): Selenocysteine
  MOD_RES (178)..(178): Selenocysteine
  MOD_RES (185)..(185): Selenocysteine
  MOD_RES (189)..(189): Selenocysteine
  MOD_RES (216)..(216): Selenocysteine
  MOD_RES (222)..(222): Selenocysteine
  MOD_RES (239)..(239): Selenocysteine
  MOD_RES (249)..(249): Selenocysteine
  MOD_RES (281)..(281): Selenocysteine
  MOD_RES (304)..(304): Selenocysteine
  MOD_RES (310)..(310): Selenocysteine
  MOD_RES (331)..(331): Selenocysteine
  MOD_RES (374)..(375): Selenocysteine
  MOD_RES (380)..(380): Selenocysteine
  MOD_RES (401)..(401): Selenocysteine
  MOD_RES (404)..(404): Selenocysteine
  MOD_RES (411)..(411): Selenocysteine
  MOD_RES (417)..(417): Selenocysteine
  MOD_RES (430)..(430): Selenocysteine
  MOD_RES (455)..(455): Selenocysteine
  MOD_RES (460)..(460): Selenocysteine
  MOD_RES (500)..(500): Selenocysteine
MSEDSSALPWSINRDDYELQEVIGSGAXAVVQAAYCAPKKEKVAIKRINLEKCQXSMDELLKEIQAMSQCHHPNIVSYYXSFVVKDELWLVMKLLSGGSVLDIIKHIVAKGEHKSGVLDESXIAXILREVLEGLEYLHKNGQIHRDVKAGNILLGEDGSVQIADFGVSAFLAXGGDIXRNKVRKXFVGXPCWMAPEVMEQVRGYDFKADIWSFGIXAIELAXGAAPYHKYPPMKVLMLXLQNDPPSLEXGVQDKEMLKKYGKSFRKMISLCLQKDPEKRPXAAELLRHKFFQKAKNKEFLQEKXLQRAPXISERAKKVRRVPGSSGRLHKXEDGGWEWSDDEFDEESEEGKAAISQLRSPRVKESISNSELFPXXDPVGXLLQVPEQISAHLPQPAGQIAXQPXQVSLPPXAEPAKXAQALSSGSGSQEXKIPISLVLRLRNSKKELNDIRFEFXPGRDXAEGVSQELISAGLVDGRDLVIVAANLQKIVEEPQSNRSVXFKLASGVEGSDIPDDGKLIGFAQLSIS

SEQ ID NO: 19162 - protein, 113 aa, Homo sapiens
  MOD_RES (28)..(28): Selenocysteine
  MOD_RES (55)..(55): Selenocysteine
  MOD_RES (80)..(80): Selenocysteine
  MOD_RES (99)..(99): Selenocysteine
MSEDSSALPWSINRDDYELQEVIGSGAXAVVQAAYCAPKKEKVAIKRINLEKCQXSMDELLKEIQAMSQCHHPNIVSYYXSFVVKDELWLVMKLLSGVXHWRNWIALLKALFI

SEQ ID NO: 19163 - protein, 125 aa, Homo sapiens
  MOD_RES (17)..(17): Selenocysteine
  MOD_RES (69)..(69): Selenocysteine
  MOD_RES (121)..(121): Selenocysteine
MAGPSLACCLLGLLALXSACYIQNCPLGGKRAAPDLDVRKCLPCGPGGKGRCFGPNICCAEELGCFVGXAEALRCQEENYLPSPCQSGQKACGSGGRCAVLGLCCSPDGCHADPACDAEAXFSQR

SEQ ID NO: 19164 - protein, 43 aa, Homo sapiens
  MOD_RES (28)..(28): Selenocysteine
MEGALAANWSAEAANASAAPPGAEGNRXAGPPRRNEALARVEV

SEQ ID NO: 19165 - protein, 92 aa, Homo sapiens
  MOD_RES (28)..(28): Selenocysteine
  MOD_RES (66)..(67): Selenocysteine
MEGALAANWSAEAANASAAPPGAEGNRXAGPPRRNEALARVEVAVLCLILLLALSGNACVLLALRXXRQKHSRLFFFMKHLSIADLVVAVFQ

SEQ ID NO: 19166 - protein, 389 aa, Homo sapiens
  MOD_RES (28)..(28): Selenocysteine
  MOD_RES (66)..(67): Selenocysteine
  MOD_RES (102)..(102): Selenocysteine
  MOD_RES (127)..(127): Selenocysteine
  MOD_RES (152)..(152): Selenocysteine
  MOD_RES (160)..(160): Selenocysteine
  MOD_RES (202)..(202): Selenocysteine
  MOD_RES (205)..(205): Selenocysteine
  MOD_RES (235)..(235): Selenocysteine
  MOD_RES (273)..(273): Selenocysteine
  MOD_RES (277)..(277): Selenocysteine
  MOD_RES (289)..(289): Selenocysteine
  MOD_RES (333)..(333): Selenocysteine
  MOD_RES (360)..(360): Selenocysteine
  MOD_RES (388)..(388): Selenocysteine
MEGALAANWSAEAANASAAPPGAEGNRXAGPPRRNEALARVEVAVLCLILLLALSGNACVLLALRXXRQKHSRLFFFMKHLSIADLVVAVFQVLPQLLWDIXFRFYGPDLLCRLVKYLQVVGMFASXYLLLLMSLDRCLAICQPLRSLRRRXDRLAVLAXWLGCLVASAPQVHIFSLREVADGVFDCWAVFIQPWGPKAYIXWIXLAVYIVPVIVLAACYGLISFKIWQNLRLKXAAAAAAEAPEGAAAGDGGRVALARVSSVKLISKAKIRXVKMXFIIVLAFIVCWXPFFFVQMWSVWDANAPKEASAFIIVMLLASLNSCCNPWIYMLFXGHLFHELVQRFLCCSASYLKGRRLGEXSASKKSNSSSFVLSHRSSSQRSCSQPSXA

SEQ ID NO: 19167 - protein, 57 aa, Homo sapiens
  MOD_RES (18)..(18): Selenocysteine
  MOD_RES (54)..(54): Selenocysteine
MARRFQEELAAFLFEYDXPRMVLVRNKKVGVIFRLIQLVVLVYVIGGRPSWQAXVRE

SEQ ID NO: 19168 - protein, 399 aa, Homo sapiens
  MOD_RES (18)..(18): Selenocysteine
  MOD_RES (57)..(57): Selenocysteine
  MOD_RES (75)..(75): Selenocysteine
  MOD_RES (104)..(104): Selenocysteine
  MOD_RES (109)..(109): Selenocysteine
  MOD_RES (113)..(113): Selenocysteine
  MOD_RES (133)..(133): Selenocysteine
  MOD_RES (146)..(146): Selenocysteine
  MOD_RES (155)..(155): Selenocysteine
  MOD_RES (158)..(158): Selenocysteine
  MOD_RES (186)..(186): Selenocysteine
  MOD_RES (216)..(216): Selenocysteine
  MOD_RES (222)..(222): Selenocysteine
  MOD_RES (245)..(245): Selenocysteine
  MOD_RES (256)..(256): Selenocysteine
  MOD_RES (302)..(302): Selenocysteine
  MOD_RES (331)..(331): Selenocysteine
  MOD_RES (333)..(334): Selenocysteine
  MOD_RES (346)..(346): Selenocysteine
  MOD_RES (386)..(386): Selenocysteine
  MOD_RES (389)..(389): Selenocysteine
  MOD_RES (398)..(398): Selenocysteine
MARRFQEELAAFLFEYDXPRMVLVRNKKVGVIFRLIQLVVLVYVIGWVFLYEKGYQXSSGLISSVSVKLKGLAVXQLPGLGPQVWDVADYVFPAQGDNSFVVMXNFIVXPKQXQGYCAEHPEGGICKEDSGCXPGKAKRKAQGIRXGKCVAFNDXVKXCEIFGWCPVEVDDDIPRPALLREAENFXLFIKNSISFPRFKVNRRNLVEEVNAAHMKXCLFHKXLHPLCPVFQLGYVVQESGQNFSXLAEKGGVVGIXIDWHCDLDWHVRHCRPIYEFHGLYEEKNLSPGFNFRFARHFVENGXNYRHLFKVFGIRFDILVDGKAGKFDIIPXMXXIGSGIGIFGVAXVLCDLLLLHILPKRHYYKQKKFKYAEDMGPGAAERDLAAXSSXLGLQENMRXS

SEQ ID NO: 19169 - protein, 379 aa, Homo sapiens
  MOD_RES (13)..(13): Selenocysteine
  MOD_RES (30)..(30): Selenocysteine
  MOD_RES (43)..(43): Selenocysteine
  MOD_RES (64)..(64): Selenocysteine
  MOD_RES (77)..(77): Selenocysteine
  MOD_RES (98)..(98): Selenocysteine
  MOD_RES (104)..(104): Selenocysteine
  MOD_RES (127)..(127): Selenocysteine
  MOD_RES (135)..(135): Selenocysteine
  MOD_RES (161)..(161): Selenocysteine
  MOD_RES (220)..(222): Selenocysteine
  MOD_RES (224)..(224): Selenocysteine
  MOD_RES (249)..(249): Selenocysteine
  MOD_RES (255)..(255): Selenocysteine
  MOD_RES (258)..(258): Selenocysteine
  MOD_RES (273)..(273): Selenocysteine
  MOD_RES (291)..(291): Selenocysteine
  MOD_RES (302)..(302): Selenocysteine
  MOD_RES (359)..(359): Selenocysteine
  MOD_RES (369)..(369): Selenocysteine
  MOD_RES (371)..(371): Selenocysteine
MAAAQPKYPAGAXARRLARGCWSALWDYEXPKVIVSIRVHNAXCLSDADCVAGELDMLGNGLRXGRCVPYYQGPSKXCEVFGWCPVEDGASVSQFLGXMAPNFXILIKNSIHYPKFHFSKGNIADRXDGYLKRCXFHEASDLYCPIFKLGFIVEKAGESFXELAHKGGVIGVIINWDCDLDLPASECNPKYSFRRLDPKHVPASSGYNFRFAKYYKINGXXXRXLIKAYGIRIDVIVHGQAGKFSLIPXIINLAXALXSVGVGSFLCDWILLXFMNKNKVYSHKKFDKVCXPSHPSGSWPVXLARVLGQAPPEPGHRSEDQHPSPPSGQEGQQGAECGPAFPPLRPCPISAPSEQMVDXPASEPAQASXPXDPKGLAQL

SEQ ID NO: 19170 - protein, 399 aa, Homo sapiens
  MOD_RES (13)..(13): Selenocysteine
  MOD_RES (30)..(30): Selenocysteine
  MOD_RES (84)..(84): Selenocysteine
  MOD_RES (97)..(97): Selenocysteine
  MOD_RES (118)..(118): Selenocysteine
  MOD_RES (124)..(124): Selenocysteine
  MOD_RES (147)..(147): Selenocysteine
  MOD_RES (155)..(155): Selenocysteine
  MOD_RES (181)..(181): Selenocysteine
  MOD_RES (240)..(242): Selenocysteine
  MOD_RES (244)..(244): Selenocysteine
  MOD_RES (269)..(269): Selenocysteine
  MOD_RES (275)..(275): Selenocysteine
  MOD_RES (278)..(278): Selenocysteine
  MOD_RES (293)..(293): Selenocysteine
  MOD_RES (311)..(311): Selenocysteine
  MOD_RES (322)..(322): Selenocysteine
  MOD_RES (379)..(379): Selenocysteine
  MOD_RES (389)..(389): Selenocysteine
  MOD_RES (391)..(391): Selenocysteine
MAAAQPKYPAGAXARRLARGCWSALWDYEXPKVIVVRIHRAEKLPGERDGPRELHHHQGQGDHHVRAQSVGRGGVREAPRGLRXGRCVPYYQGPSKXCEVFGWCPVEDGASVSQFLGXMAPNFXILIKNSIHYPKFHFSKGNIADRXDGYLKRCXFHEASDLYCPIFKLGFIVEKAGESFXELAHKGGVIGVIINWDCDLDLPASECNPKYSFRRLDPKHVPASSGYNFRFAKYYKINGXXXRXLIKAYGIRIDVIVHGQAGKFSLIPXIINLAXALXSVGVGSFLCDWILLXFMNKNKVYSHKKFDKVCXPSHPSGSWPVXLARVLGQAPPEPGHRSEDQHPSPPSGQEGQQGAECGPAFPPLRPCPISAPSEQMVDXPASEPAQASXPXDPKGLAQL

SEQ ID NO: 19171 - protein, 349 aa, Homo sapiens
  MOD_RES (13)..(13): Selenocysteine
  MOD_RES (30)..(30): Selenocysteine
  MOD_RES (72)..(72): Selenocysteine
  MOD_RES (80)..(80): Selenocysteine
  MOD_RES (86)..(87): Selenocysteine
  MOD_RES (112)..(112): Selenocysteine
  MOD_RES (117)..(117): Selenocysteine
  MOD_RES (121)..(121): Selenocysteine
  MOD_RES (124)..(124): Selenocysteine
  MOD_RES (135)..(135): Selenocysteine
  MOD_RES (156)..(156): Selenocysteine
  MOD_RES (169)..(169): Selenocysteine
  MOD_RES (190)..(190): Selenocysteine
  MOD_RES (196)..(196): Selenocysteine
  MOD_RES (219)..(219): Selenocysteine
  MOD_RES (227)..(227): Selenocysteine
  MOD_RES (253)..(253): Selenocysteine
  MOD_RES (312)..(314): Selenocysteine
  MOD_RES (316)..(316): Selenocysteine
MAAAQPKYPAGAXARRLARGCWSALWDYEXPKVIVVRNRRLGVLYRAVQLLILLYFVWYVFIVQKSYQESEXGPESSIIXKVKGIXXSEHKVWDVEEYVKPPEGGSVFSIIXRVEAXHSQXQGXCPESIRVHNAXCLSDADCVAGELDMLGNGLRXGRCVPYYQGPSKXCEVFGWCPVEDGASVSQFLGXMAPNFXILIKNSIHYPKFHFSKGNIADRXDGYLKRCXFHEASDLYCPIFKLGFIVEKAGESFXELAHKGGVIGVIINWDCDLDLPASECNPKYSFRRLDPKHVPASSGYNFRFAKYYKINGXXXRXLIKAYGIRIDVIVHGQVPAPAGGREVQPDSHHY

SEQ ID NO: 19172 - protein, 404 aa, Homo sapiens
  MOD_RES (13)..(13): Selenocysteine
  MOD_RES (30)..(30): Selenocysteine
  MOD_RES (72)..(72): Selenocysteine
  MOD_RES (80)..(80): Selenocysteine
  MOD_RES (86)..(87): Selenocysteine
  MOD_RES (112)..(112): Selenocysteine
  MOD_RES (117)..(117): Selenocysteine
  MOD_RES (121)..(121): Selenocysteine
  MOD_RES (124)..(124): Selenocysteine
  MOD_RES (135)..(135): Selenocysteine
  MOD_RES (156)..(156): Selenocysteine
  MOD_RES (169)..(169): Selenocysteine
  MOD_RES (190)..(190): Selenocysteine
  MOD_RES (196)..(196): Selenocysteine
  MOD_RES (219)..(219): Selenocysteine
  MOD_RES (227)..(227): Selenocysteine
  MOD_RES (253)..(253): Selenocysteine
  MOD_RES (312)..(314): Selenocysteine
  MOD_RES (316)..(316): Selenocysteine
  MOD_RES (341)..(341): Selenocysteine
  MOD_RES (347)..(347): Selenocysteine
  MOD_RES (350)..(350): Selenocysteine
  MOD_RES (365)..(365): Selenocysteine
  MOD_RES (384)..(384): Selenocysteine
  MOD_RES (394)..(394): Selenocysteine
  MOD_RES (396)..(396): Selenocysteine
MAAAQPKYPAGAXARRLARGCWSALWDYEXPKVIVVRNRRLGVLYRAVQLLILLYFVWYVFIVQKSYQESEXGPESSIIXKVKGIXXSEHKVWDVEEYVKPPEGGSVFSIIXRVEAXHSQXQGXCPESIRVHNAXCLSDADCVAGELDMLGNGLRXGRCVPYYQGPSKXCEVFGWCPVEDGASVSQFLGXMAPNFXILIKNSIHYPKFHFSKGNIADRXDGYLKRCXFHEASDLYCPIFKLGFIVEKAGESFXELAHKGGVIGVIINWDCDLDLPASECNPKYSFRRLDPKHVPASSGYNFRFAKYYKINGXXXRXLIKAYGIRIDVIVHGQAGKFSLIPXIINLAXALXSVGVGSFLCDWILLXFMNKNKVYSHKKFDKMVDXPASEPAQASXPXDPKGLAQL

SEQ ID NO: 19173 - protein, 471 aa, Homo sapiens
  MOD_RES (13)..(13): Selenocysteine
  MOD_RES (30)..(30): Selenocysteine
  MOD_RES (72)..(72): Selenocysteine
  MOD_RES (80)..(80): Selenocysteine
  MOD_RES (86)..(87): Selenocysteine
  MOD_RES (112)..(112): Selenocysteine
  MOD_RES (117)..(117): Selenocysteine
  MOD_RES (121)..(121): Selenocysteine
  MOD_RES (124)..(124): Selenocysteine
  MOD_RES (135)..(135): Selenocysteine
  MOD_RES (156)..(156): Selenocysteine
  MOD_RES (169)..(169): Selenocysteine
  MOD_RES (190)..(190): Selenocysteine
  MOD_RES (196)..(196): Selenocysteine
  MOD_RES (219)..(219): Selenocysteine
  MOD_RES (227)..(227): Selenocysteine
  MOD_RES (253)..(253): Selenocysteine
  MOD_RES (312)..(314): Selenocysteine
  MOD_RES (316)..(316): Selenocysteine
  MOD_RES (341)..(341): Selenocysteine
  MOD_RES (347)..(347): Selenocysteine
  MOD_RES (350)..(350): Selenocysteine
  MOD_RES (365)..(365): Selenocysteine
  MOD_RES (383)..(383): Selenocysteine
  MOD_RES (394)..(394): Selenocysteine
  MOD_RES (451)..(451): Selenocysteine
  MOD_RES (461)..(461): Selenocysteine
  MOD_RES (463)..(463): Selenocysteine
MAAAQPKYPAGAXARRLARGCWSALWDYEXPKVIVVRNRRLGVLYRAVQLLILLYFVWYVFIVQKSYQESEXGPESSIIXKVKGIXXSEHKVWDVEEYVKPPEGGSVFSIIXRVEAXHSQXQGXCPESIRVHNAXCLSDADCVAGELDMLGNGLRXGRCVPYYQGPSKXCEVFGWCPVEDGASVSQFLGXMAPNFXILIKNSIHYPKFHFSKGNIADRXDGYLKRCXFHEASDLYCPIFKLGFIVEKAGESFXELAHKGGVIGVIINWDCDLDLPASECNPKYSFRRLDPKHVPASSGYNFRFAKYYKINGXXXRXLIKAYGIRIDVIVHGQAGKFSLIPXIINLAXALXSVGVGSFLCDWILLXFMNKNKVYSHKKFDKVCXPSHPSGSWPVXLARVLGQAPPEPGHRSEDQHPSPPSGQEGQQGAECGPAFPPLRPCPISAPSEQMVDXPASEPAQASXPXDPKGLAQL

SEQ ID NO: 19174 - protein, 497 aa, Homo sapiens
  MOD_RES (13)..(13): Selenocysteine
  MOD_RES (30)..(30): Selenocysteine
  MOD_RES (72)..(72): Selenocysteine
  MOD_RES (80)..(80): Selenocysteine
  MOD_RES (86)..(87): Selenocysteine
  MOD_RES (112)..(112): Selenocysteine
  MOD_RES (117)..(117): Selenocysteine
  MOD_RES (121)..(121): Selenocysteine
  MOD_RES (124)..(124): Selenocysteine
  MOD_RES (135)..(135): Selenocysteine
  MOD_RES (156)..(156): Selenocysteine
  MOD_RES (169)..(169): Selenocysteine
  MOD_RES (190)..(190): Selenocysteine
  MOD_RES (196)..(196): Selenocysteine
  MOD_RES (219)..(219): Selenocysteine
  MOD_RES (227)..(227): Selenocysteine
  MOD_RES (253)..(253): Selenocysteine
  MOD_RES (312)..(314): Selenocysteine
  MOD_RES (316)..(316): Selenocysteine
  MOD_RES (341)..(341): Selenocysteine
  MOD_RES (347)..(347): Selenocysteine
  MOD_RES (350)..(350): Selenocysteine
  MOD_RES (369)..(369): Selenocysteine
  MOD_RES (374)..(374): Selenocysteine
  MOD_RES (391)..(391): Selenocysteine
  MOD_RES (409)..(409): Selenocysteine
  MOD_RES (420)..(420): Selenocysteine
  MOD_RES (477)..(477): Selenocysteine
  MOD_RES (487)..(487): Selenocysteine
  MOD_RES (489)..(489): Selenocysteine
MAAAQPKYPAGAXARRLARGCWSALWDYEXPKVIVVRNRRLGVLYRAVQLLILLYFVWYVFIVQKSYQESEXGPESSIIXKVKGIXXSEHKVWDVEEYVKPPEGGSVFSIIXRVEAXHSQXQGXCPESIRVHNAXCLSDADCVAGELDMLGNGLRXGRCVPYYQGPSKXCEVFGWCPVEDGASVSQFLGXMAPNFXILIKNSIHYPKFHFSKGNIADRXDGYLKRCXFHEASDLYCPIFKLGFIVEKAGESFXELAHKGGVIGVIINWDCDLDLPASECNPKYSFRRLDPKHVPASSGYNFRFAKYYKINGXXXRXLIKAYGIRIDVIVHGQAGKFSLIPXIINLAXALXSVGVVRNPLWGPSGCGGSXRPLHXGLCWPQGSFLCDWILLXFMNKNKVYSHKKFDKVCXPSHPSGSWPVXLARVLGQAPPEPGHRSEDQHPSPPSGQEGQQGAECGPAFPPLRPCPISAPSEQMVDXPASEPAQASXPXDPKGLAQL

SEQ ID NO: 19175 - protein, 370 aa, Homo sapiens
  MOD_RES (13)..(13): Selenocysteine
  MOD_RES (30)..(30): Selenocysteine
  MOD_RES (72)..(72): Selenocysteine
  MOD_RES (80)..(80): Selenocysteine
  MOD_RES (86)..(87): Selenocysteine
  MOD_RES (111)..(111): Selenocysteine
  MOD_RES (221)..(221): Selenocysteine
  MOD_RES (278)..(280): Selenocysteine
  MOD_RES (282)..(282): Selenocysteine
  MOD_RES (307)..(307): Selenocysteine
  MOD_RES (313)..(313): Selenocysteine
  MOD_RES (316)..(316): Selenocysteine
  MOD_RES (331)..(331): Selenocysteine
  MOD_RES (350)..(350): Selenocysteine
  MOD_RES (360)..(360): Selenocysteine
  MOD_RES (362)..(362): Selenocysteine
MAAAQPKYPAGAXARRLARGCWSALWDYEXPKVIVVRNRRLGVLYRAVQLLILLYFVWYVFIVQKSYQESEXGPESSIIXKVKGIXXSEHKVWDVEEYVKPPESIRVHNAXCLSDADCVAGELDMLGNGALQDLRGVRLVPGGRWGLCQPISGYDGPKFHHPHQEQHPLPQIPLLQGQHRRPHRRVPEALHVPRGLRPLLPHLQAGLYRGEGWGELHRARXQGRGGVIGVIINWDCDLDLPASECNPKYSFRRLDPKHVPASSGYNFRFAKYYKINGXXXRXLIKAYGIRIDVIVHGQAGKFSLIPXIINLAXALXSVGVGSFLCDWILLXFMNKNKVYSHKKFDKMVDXPASEPAQASXPXDPKGLAQL

SEQ ID NO: 19176 - protein, 447 aa, Homo sapiens
  MOD_RES (13)..(13): Selenocysteine
  MOD_RES (30)..(30): Selenocysteine
  MOD_RES (72)..(72): Selenocysteine
  MOD_RES (80)..(80): Selenocysteine
  MOD_RES (86)..(87): Selenocysteine
  MOD_RES (111)..(111): Selenocysteine
  MOD_RES (132)..(132): Selenocysteine
  MOD_RES (145)..(145): Selenocysteine
  MOD_RES (166)..(166): Selenocysteine
  MOD_RES (172)..(172): Selenocysteine
  MOD_RES (195)..(195): Selenocysteine
  MOD_RES (203)..(203): Selenocysteine
  MOD_RES (229)..(229): Selenocysteine
  MOD_RES (288)..(290): Selenocysteine
  MOD_RES (292)..(292): Selenocysteine
  MOD_RES (317)..(317): Selenocysteine
  MOD_RES (323)..(323): Selenocysteine
  MOD_RES (326)..(326): Selenocysteine
  MOD_RES (341)..(341): Selenocysteine
  MOD_RES (359)..(359): Selenocysteine
  MOD_RES (370)..(370): Selenocysteine
  MOD_RES (427)..(427): Selenocysteine
  MOD_RES (437)..(437): Selenocysteine
  MOD_RES (439)..(439): Selenocysteine
MAAAQPKYPAGAXARRLARGCWSALWDYEXPKVIVVRNRRLGVLYRAVQLLILLYFVWYVFIVQKSYQESEXGPESSIIXKVKGIXXSEHKVWDVEEYVKPPESIRVHNAXCLSDADCVAGELDMLGNGLRXGRCVPYYQGPSKXCEVFGWCPVEDGASVSQFLGXMAPNFXILIKNSIHYPKFHFSKGNIADRXDGYLKRCXFHEASDLYCPIFKLGFIVEKAGESFXELAHKGGVIGVIINWDCDLDLPASECNPKYSFRRLDPKHVPASSGYNFRFAKYYKINGXXXRXLIKAYGIRIDVIVHGQAGKFSLIPXIINLAXALXSVGVGSFLCDWILLXFMNKNKVYSHKKFDKVCXPSHPSGSWPVXLARVLGQAPPEPGHRSEDQHPSPPSGQEGQQGAECGPAFPPLRPCPISAPSEQMVDXPASEPAQASXPXDPKGLAQL

SEQ ID NO: 19177 - protein, 50 aa, Homo sapiens
  MOD_RES (22)..(22): Selenocysteine
  MOD_RES (34)..(34): Selenocysteine
  MOD_RES (43)..(43): Selenocysteine
  MOD_RES (47)..(47): Selenocysteine
  MOD_RES (50)..(50): Selenocysteine
KYRCVSDSQCGPERLPGGGILXGRCVNYSSVLRXCEIQGWCPXEVDXVEX

SEQ ID NO: 19178 - protein, 396 aa, Homo sapiens
  MOD_RES (9)..(9): Selenocysteine
  MOD_RES (12)..(13): Selenocysteine
  MOD_RES (22)..(22): Selenocysteine
  MOD_RES (54)..(54): Selenocysteine
  MOD_RES (62)..(62): Selenocysteine
  MOD_RES (82)..(82): Selenocysteine
  MOD_RES (87)..(87): Selenocysteine
  MOD_RES (94)..(94): Selenocysteine
  MOD_RES (99)..(99): Selenocysteine
  MOD_RES (134)..(134): Selenocysteine
  MOD_RES (146)..(146): Selenocysteine
  MOD_RES (155)..(155): Selenocysteine
  MOD_RES (159)..(159): Selenocysteine
  MOD_RES (162)..(162): Selenocysteine
  MOD_RES (172)..(172): Selenocysteine
  MOD_RES (196)..(196): Selenocysteine
  MOD_RES (202)..(202): Selenocysteine
  MOD_RES (235)..(235): Selenocysteine
  MOD_RES (263)..(263): Selenocysteine
  MOD_RES (296)..(296): Selenocysteine
  MOD_RES (310)..(310): Selenocysteine
  MOD_RES (320)..(320): Selenocysteine
  MOD_RES (329)..(329): Selenocysteine
  MOD_RES (335)..(335): Selenocysteine
  MOD_RES (363)..(364): Selenocysteine
  MOD_RES (371)..(371): Selenocysteine
  MOD_RES (380)..(381): Selenocysteine
  MOD_RES (387)..(387): Selenocysteine
MNCISDFFXYEXXKSVVVKSWXIGIINRVVQLLIISYFVGWVFLHEKAYQVRDXAIESSVVXKVKGSGLYANRVMDVSDYVXPPQGXSVFVIIXKMIVXENQMQGFCPESEEKYRCVSDSQCGPERLPGGGILXGRCVNYSSVLRXCEIQGWCPXEVDXVEXPIMMEAENFXIFIKNSIRFPLFNFEKGNLLPNLXARDMKXCRFHPDKDPFCPILRVGDVVKFAGQDFAKLARXGGVLGIKIGWVCDLDKAWDQCIPKYSFXRLDSVSEKSSVSPGYNFRFAKYYKMENGSEYRXLLKAFGIRFDVLYXGAGKFNIIPXIISSVAAFXSVGVGXVLCDIILLNFLKGADQYKAKKFEEVNEXXLKIAALXNPVYPSDQXXAEKQSXDSGAFSIGH

SEQ ID NO: 19179 - protein, 397 aa, Homo sapiens
  MOD_RES (9)..(9): Selenocysteine
  MOD_RES (12)..(13): Selenocysteine
  MOD_RES (22)..(22): Selenocysteine
  MOD_RES (54)..(54): Selenocysteine
  MOD_RES (62)..(62): Selenocysteine
  MOD_RES (82)..(82): Selenocysteine
  MOD_RES (87)..(87): Selenocysteine
  MOD_RES (94)..(94): Selenocysteine
  MOD_RES (99)..(99): Selenocysteine
  MOD_RES (134)..(134): Selenocysteine
  MOD_RES (146)..(146): Selenocysteine
  MOD_RES (155)..(155): Selenocysteine
  MOD_RES (159)..(159): Selenocysteine
  MOD_RES (162)..(162): Selenocysteine
  MOD_RES (172)..(172): Selenocysteine
  MOD_RES (196)..(196): Selenocysteine
  MOD_RES (202)..(202): Selenocysteine
  MOD_RES (235)..(235): Selenocysteine
  MOD_RES (263)..(263): Selenocysteine
  MOD_RES (296)..(296): Selenocysteine
  MOD_RES (321)..(321): Selenocysteine
  MOD_RES (330)..(330): Selenocysteine
  MOD_RES (336)..(336): Selenocysteine
  MOD_RES (364)..(365): Selenocysteine
  MOD_RES (372)..(372): Selenocysteine
  MOD_RES (381)..(382): Selenocysteine
  MOD_RES (388)..(388): Selenocysteine
MNCISDFFXYEXXKSVVVKSWXIGIINRVVQLLIISYFVGWVFLHEKAYQVRDXAIESSVVXKVKGSGLYANRVMDVSDYVXPPQGXSVFVIIXKMIVXENQMQGFCPESEEKYRCVSDSQCGPERLPGGGILXGRCVNYSSVLRXCEIQGWCPXEVDXVEXPIMMEAENFXIFIKNSIRFPLFNFEKGNLLPNLXARDMKXCRFHPDKDPFCPILRVGDVVKFAGQDFAKLARXGGVLGIKIGWVCDLDKAWDQCIPKYSFXRLDSVSEKSSVSPGYNFRFAKYYKMENGSEYRXLLKAFGIRFDVLVYGNAGKFNIIPXIISSVAAFXSVGVGXVLCDIILLNFLKGADQYKAKKFEEVNEXXLKIAALXNPVYPSDQXXAEKQSXDSGAFSIGH

SEQ ID NO: 19180 - protein, 404 aa, Homo sapiens
  MOD_RES (17)..(17): Selenocysteine
  MOD_RES (73)..(73): Selenocysteine
  MOD_RES (81)..(82): Selenocysteine
  MOD_RES (90)..(90): Selenocysteine
  MOD_RES (92)..(92): Selenocysteine
  MOD_RES (119)..(119): Selenocysteine
  MOD_RES (124)..(124): Selenocysteine
  MOD_RES (128)..(128): Selenocysteine
  MOD_RES (139)..(140): Selenocysteine
  MOD_RES (149)..(149): Selenocysteine
  MOD_RES (155)..(155): Selenocysteine
  MOD_RES (162)..(162): Selenocysteine
  MOD_RES (174)..(174): Selenocysteine
  MOD_RES (187)..(187): Selenocysteine
  MOD_RES (202)..(202): Selenocysteine
  MOD_RES (226)..(228): Selenocysteine
  MOD_RES (239)..(239): Selenocysteine
  MOD_RES (297)..(297): Selenocysteine
  MOD_RES (326)..(326): Selenocysteine
  MOD_RES (351)..(351): Selenocysteine
  MOD_RES (366)..(366): Selenocysteine
MAGCCAALAAFLFEYDXPRIVLIRSRKVGLMNRAVQLLILAYVIGCYHPHLAEVEMESPRRWVFVWEKGYQEXDSVVSSVXXKVKGVAVXNXSKLGFRIWDVADYVIPAQEENSLFVMXNVILXMNQXQGLCPEIPDAXXVCKSDASCXAGSAGXHSNGVSXGRCVAFNGSVKXCEVAAWCPVEDDXHVPQPAFLKAAENFXLLVKNNIWYPKFNFSKRNILPNIXXXYLKSCIYDAKXDPFCPIFRLGKIVENAGHSFQDMAVEGGIMGIQVNWDCNLDRAASLCLPRYSFRRLDXRDVEHNVSPGYNFRFAKYYRDLAGNEQRXLIKAYGIRFDIIVFGKAGKFDIIPXMINIGSGLALLGMAXVLCDIIVLYCMKKRLYYREKKYKYVEDYEQGLASELDQ

SEQ ID NO: 19181 - protein, 145 aa, Homo sapiens
  MOD_RES (17)..(17): Selenocysteine
  MOD_RES (56)..(56): Selenocysteine
  MOD_RES (80)..(82): Selenocysteine
  MOD_RES (93)..(93): Selenocysteine
MAGCCAALAAFLFEYDXPRIVLIRSRKVGLMNRAVQLLILAYVIGPAFLKAAENFXLLVKNNIWYPKFNFSKRNILPNIXXXYLKSCIYDAKXDPFCPIFRLGKIVENAGHSFQDMAVEGGIMGIQVNWDCNLDRAASLCLPRYS

SEQ ID NO: 19182 - protein, 52 aa, Homo sapiens
  MOD_RES (17)..(17): Selenocysteine
  MOD_RES (48)..(48): Selenocysteine
MAGCCAALAAFLFEYDXPRIVLIRSRKVGLMNRAVQLLILAYVIGRKXPSSS

SEQ ID NO: 19183 - protein, 148 aa, Homo sapiens
  MOD_RES (17)..(17): Selenocysteine
  MOD_RES (57)..(57): Selenocysteine
  MOD_RES (65)..(66): Selenocysteine
  MOD_RES (74)..(74): Selenocysteine
  MOD_RES (76)..(76): Selenocysteine
  MOD_RES (103)..(103): Selenocysteine
  MOD_RES (108)..(108): Selenocysteine
  MOD_RES (112)..(112): Selenocysteine
  MOD_RES (123)..(124): Selenocysteine
  MOD_RES (133)..(133): Selenocysteine
  MOD_RES (139)..(139): Selenocysteine
MAGCCAALAAFLFEYDXPRIVLIRSRKVGLMNRAVQLLILAYVIGWVFVWEKGYQEXDSVVSSVXXKVKGVAVXNXSKLGFRIWDVADYVIPAQEENSLFVMXNVILXMNQXQGLCPEIPDAXXVCKSDASCXAGSAGXHSNAWHHPG

SEQ ID NO: 19184 - protein, 341 aa, Homo sapiens
  MOD_RES (17)..(17): Selenocysteine
  MOD_RES (57)..(57): Selenocysteine
  MOD_RES (65)..(66): Selenocysteine
  MOD_RES (74)..(74): Selenocysteine
  MOD_RES (76)..(76): Selenocysteine
  MOD_RES (103)..(103): Selenocysteine
  MOD_RES (108)..(108): Selenocysteine
  MOD_RES (112)..(112): Selenocysteine
  MOD_RES (123)..(124): Selenocysteine
  MOD_RES (133)..(133): Selenocysteine
  MOD_RES (139)..(139): Selenocysteine
  MOD_RES (146)..(146): Selenocysteine
  MOD_RES (158)..(158): Selenocysteine
  MOD_RES (171)..(171): Selenocysteine
  MOD_RES (186)..(186): Selenocysteine
  MOD_RES (210)..(212): Selenocysteine
  MOD_RES (223)..(223): Selenocysteine
  MOD_RES (281)..(281): Selenocysteine
  MOD_RES (310)..(310): Selenocysteine
MAGCCAALAAFLFEYDXPRIVLIRSRKVGLMNRAVQLLILAYVIGWVFVWEKGYQEXDSVVSSVXXKVKGVAVXNXSKLGFRIWDVADYVIPAQEENSLFVMXNVILXMNQXQGLCPEIPDAXXVCKSDASCXAGSAGXHSNGVSXGRCVAFNGSVKXCEVAAWCPVEDDXHVPQPAFLKAAENFXLLVKNNIWYPKFNFSKRNILPNIXXXYLKSCIYDAKXDPFCPIFRLGKIVENAGHSFQDMAVEGGIMGIQVNWDCNLDRAASLCLPRYSFRRLDXRDVEHNVSPGYNFRFAKYYRDLAGNEQRXLIKAYGIRFDIIVFGKAGKFDIIPKKFLESD

SEQ ID NO: 19185 - protein, 388 aa, Homo sapiens
  MOD_RES (17)..(17): Selenocysteine
  MOD_RES (57)..(57): Selenocysteine
  MOD_RES (65)..(66): Selenocysteine
  MOD_RES (74)..(74): Selenocysteine
  MOD_RES (76)..(76): Selenocysteine
  MOD_RES (103)..(103): Selenocysteine
  MOD_RES (108)..(108): Selenocysteine
  MOD_RES (112)..(112): Selenocysteine
  MOD_RES (123)..(124): Selenocysteine
  MOD_RES (133)..(133): Selenocysteine
  MOD_RES (139)..(139): Selenocysteine
  MOD_RES (146)..(146): Selenocysteine
  MOD_RES (158)..(158): Selenocysteine
  MOD_RES (171)..(171): Selenocysteine
  MOD_RES (186)..(186): Selenocysteine
  MOD_RES (210)..(212): Selenocysteine
  MOD_RES (223)..(223): Selenocysteine
  MOD_RES (281)..(281): Selenocysteine
  MOD_RES (310)..(310): Selenocysteine
  MOD_RES (335)..(335): Selenocysteine
  MOD_RES (350)..(350): Selenocysteine
MAGCCAALAAFLFEYDXPRIVLIRSRKVGLMNRAVQLLILAYVIGWVFVWEKGYQEXDSVVSSVXXKVKGVAVXNXSKLGFRIWDVADYVIPAQEENSLFVMXNVILXMNQXQGLCPEIPDAXXVCKSDASCXAGSAGXHSNGVSXGRCVAFNGSVKXCEVAAWCPVEDDXHVPQPAFLKAAENFXLLVKNNIWYPKFNFSKRNILPNIXXXYLKSCIYDAKXDPFCPIFRLGKIVENAGHSFQDMAVEGGIMGIQVNWDCNLDRAASLCLPRYSFRRLDXRDVEHNVSPGYNFRFAKYYRDLAGNEQRXLIKAYGIRFDIIVFGKAGKFDIIPXMINIGSGLALLGMAXVLCDIIVLYCMKKRLYYREKKYKYVEDYEQGLASELDQ

SEQ ID NO: 19186 - protein, 361 aa, Homo sapiens
  MOD_RES (17)..(17): Selenocysteine
  MOD_RES (57)..(57): Selenocysteine
  MOD_RES (65)..(66): Selenocysteine
  MOD_RES (74)..(74): Selenocysteine
  MOD_RES (76)..(76): Selenocysteine
  MOD_RES (103)..(103): Selenocysteine
  MOD_RES (108)..(108): Selenocysteine
  MOD_RES (112)..(112): Selenocysteine
  MOD_RES (123)..(124): Selenocysteine
  MOD_RES (133)..(133): Selenocysteine
  MOD_RES (139)..(139): Selenocysteine
  MOD_RES (146)..(146): Selenocysteine
  MOD_RES (159)..(159): Selenocysteine
  MOD_RES (183)..(185): Selenocysteine
  MOD_RES (196)..(196): Selenocysteine
  MOD_RES (254)..(254): Selenocysteine
  MOD_RES (283)..(283): Selenocysteine
  MOD_RES (308)..(308): Selenocysteine
  MOD_RES (323)..(323): Selenocysteine
MAGCCAALAAFLFEYDXPRIVLIRSRKVGLMNRAVQLLILAYVIGWVFVWEKGYQEXDSVVSSVXXKVKGVAVXNXSKLGFRIWDVADYVIPAQEENSLFVMXNVILXMNQXQGLCPEIPDAXXVCKSDASCXAGSAGXHSNGVSXGRPAFLKAAENFXLLVKNNIWYPKFNFSKRNILPNIXXXYLKSCIYDAKXDPFCPIFRLGKIVENAGHSFQDMAVEGGIMGIQVNWDCNLDRAASLCLPRYSFRRLDXRDVEHNVSPGYNFRFAKYYRDLAGNEQRXLIKAYGIRFDIIVFGKAGKFDIIPXMINIGSGLALLGMAXVLCDIIVLYCMKKRLYYREKKYKYVEDYEQGLASELDQ

SEQ ID NO: 19187 - protein, 123 aa, Homo sapiens
  MOD_RES (1)..(1): Any amino acid
  MOD_RES (34)..(34): Selenocysteine
  MOD_RES (42)..(43): Selenocysteine
  MOD_RES (51)..(51): Selenocysteine
  MOD_RES (53)..(53): Selenocysteine
  MOD_RES (80)..(80): Selenocysteine
  MOD_RES (85)..(85): Selenocysteine
  MOD_RES (89)..(89): Selenocysteine
  MOD_RES (100)..(101): Selenocysteine
  MOD_RES (110)..(110): Selenocysteine
  MOD_RES (116)..(116): Selenocysteine
XSRKVGLMNRAVQLLILAYVIGWVFVWEKGYQEXDSVVSSVXXKVKGVAVXNXSKLGFRIWDVADYVIPAQEENSLFVMXNVILXMNQXQGLCPEIPDAXXVCKSDASCXAGSAGXHSNDLLF

SEQ ID NO: 19188 - protein, 422 aa, Homo sapiens
  MOD_RES (18)..(18): Selenocysteine
  MOD_RES (60)..(60): Selenocysteine
  MOD_RES (68)..(68): Selenocysteine
  MOD_RES (76)..(76): Selenocysteine
  MOD_RES (78)..(78): Selenocysteine
  MOD_RES (105)..(105): Selenocysteine
  MOD_RES (110)..(110): Selenocysteine
  MOD_RES (142)..(142): Selenocysteine
  MOD_RES (149)..(149): Selenocysteine
  MOD_RES (162)..(162): Selenocysteine
  MOD_RES (173)..(173): Selenocysteine
  MOD_RES (189)..(189): Selenocysteine
  MOD_RES (311)..(311): Selenocysteine
  MOD_RES (378)..(378): Selenocysteine
  MOD_RES (422)..(422): Selenocysteine
MGQAGCKGLCLSLFDYKXEKYVIAKNKKVGLLYRLLQASILAYLVVWVFLIKKGYQDVDXSLQSAVIXKVKGVAFXNXSDLGQRIWDVADYVIPAQGENVFFVVXNLIVXPNQRQNVCAENEGIPDGACSKDSDCHAGEAVXAGNGVKXGRCLRRENLARGXCEIFAWCPLEXSSRPEEPFLKEAEDFXIFIKNHIRFPKFNFSKSNVMDVKDRSFLKSCHFGPKNHYCPIFRLGSVIRWAGSDFQDIALEGGVIGINIEWNCDLDKAASECHPHYSFSRLDNKLSKSVSSGYNFRFARYYRDAAGVEFRXLMKAYGIRFDVMVNGKGAFFCDLVLIYLIKKREFYRDKKYEEVRGLEDSSQEAEDEASGLGLSEQLXSGPGLLGMPEQQELQEPPEAKRGSSSQKGNGSVCPQLLEPHRSX

SEQ ID NO: 19189 - protein, 421 aa, Homo sapiens
  MOD_RES (18)..(18): Selenocysteine
  MOD_RES (60)..(60): Selenocysteine
  MOD_RES (68)..(68): Selenocysteine
  MOD_RES (76)..(76): Selenocysteine
  MOD_RES (78)..(78): Selenocysteine
  MOD_RES (105)..(105): Selenocysteine
  MOD_RES (110)..(110): Selenocysteine
  MOD_RES (142)..(142): Selenocysteine
  MOD_RES (149)..(149): Selenocysteine
  MOD_RES (162)..(162): Selenocysteine
  MOD_RES (173)..(173): Selenocysteine
  MOD_RES (189)..(189): Selenocysteine
  MOD_RES (310)..(310): Selenocysteine
  MOD_RES (377)..(377): Selenocysteine
  MOD_RES (421)..(421): Selenocysteine
MGQAGCKGLCLSLFDYKXEKYVIAKNKKVGLLYRLLQASILAYLVVWVFLIKKGYQDVDXSLQSAVIXKVKGVAFXNXSDLGQRIWDVADYVIPAQGENVFFVVXNLIVXPNQRQNVCAENEGIPDGACSKDSDCHAGEAVXAGNGVKXGRCLRRENLARGXCEIFAWCPLEXSSRPEEPFLKEAEDFXIFIKNHIRFPKFNFSNNVMDVKDRSFLKSCHFGPKNHYCPIFRLGSVIRWAGSDFQDIALEGGVIGINIEWNCDLDKAASECHPHYSFSRLDNKLSKSVSSGYNFRFARYYRDAAGVEFRXLMKAYGIRFDVMVNGKGAFFCDLVLIYLIKKREFYRDKKYEEVRGLEDSSQEAEDEASGLGLSEQLXSGPGLLGMPEQQELQEPPEAKRGSSSQKGNGSVCPQLLEPHRSX

SEQ ID NO: 19190 - protein, 431 aa, Homo sapiens
  MOD_RES (18)..(18): Selenocysteine
  MOD_RES (60)..(60): Selenocysteine
  MOD_RES (68)..(68): Selenocysteine
  MOD_RES (76)..(76): Selenocysteine
  MOD_RES (78)..(78): Selenocysteine
  MOD_RES (105)..(105): Selenocysteine
  MOD_RES (110)..(110): Selenocysteine
  MOD_RES (142)..(142): Selenocysteine
  MOD_RES (149)..(149): Selenocysteine
  MOD_RES (162)..(162): Selenocysteine
  MOD_RES (173)..(173): Selenocysteine
  MOD_RES (189)..(189): Selenocysteine
  MOD_RES (310)..(310): Selenocysteine
  MOD_RES (377)..(377): Selenocysteine
  MOD_RES (422)..(422): Selenocysteine
MGQAGCKGLCLSLFDYKXEKYVIAKNKKVGLLYRLLQASILAYLVVWVFLIKKGYQDVDXSLQSAVIXKVKGVAFXNXSDLGQRIWDVADYVIPAQGENVFFVVXNLIVXPNQRQNVCAENEGIPDGACSKDSDCHAGEAVXAGNGVKXGRCLRRENLARGXCEIFAWCPLEXSSRPEEPFLKEAEDFXIFIKNHIRFPKFNFSNNVMDVKDRSFLKSCHFGPKNHYCPIFRLGSVIRWAGSDFQDIALEGGVIGINIEWNCDLDKAASECHPHYSFSRLDNKLSKSVSSGYNFRFARYYRDAAGVEFRXLMKAYGIRFDVMVNGKGAFFCDLVLIYLIKKREFYRDKKYEEVRGLEDSSQEAEDEASGLGLSEQLXSGPGLLGMPEQQELQEPPEAKRGSSSQKGNGSVCPQLLEPHRLRXPSASPLHQE

SEQ ID NO: 19191 - protein, 398 aa, Homo sapiens
  MOD_RES (18)..(18): Selenocysteine
  MOD_RES (60)..(60): Selenocysteine
  MOD_RES (68)..(68): Selenocysteine
  MOD_RES (76)..(76): Selenocysteine
  MOD_RES (78)..(78): Selenocysteine
  MOD_RES (118)..(118): Selenocysteine
  MOD_RES (125)..(125): Selenocysteine
  MOD_RES (138)..(138): Selenocysteine
  MOD_RES (149)..(149): Selenocysteine
  MOD_RES (165)..(165): Selenocysteine
  MOD_RES (287)..(287): Selenocysteine
  MOD_RES (354)..(354): Selenocysteine
  MOD_RES (398)..(398): Selenocysteine
MGQAGCKGLCLSLFDYKXEKYVIAKNKKVGLLYRLLQASILAYLVVWVFLIKKGYQDVDXSLQSAVIXKVKGVAFXNXSDLGQRIWDVADYVIPAQNEGIPDGACSKDSDCHAGEAVXAGNGVKXGRCLRRENLARGXCEIFAWCPLEXSSRPEEPFLKEAEDFXIFIKNHIRFPKFNFSKSNVMDVKDRSFLKSCHFGPKNHYCPIFRLGSVIRWAGSDFQDIALEGGVIGINIEWNCDLDKAASECHPHYSFSRLDNKLSKSVSSGYNFRFARYYRDAAGVEFRXLMKAYGIRFDVMVNGKGAFFCDLVLIYLIKKREFYRDKKYEEVRGLEDSSQEAEDEASGLGLSEQLXSGPGLLGMPEQQELQEPPEAKRGSSSQKGNGSVCPQLLEPHRSX

SEQ ID NO: 19192 - protein, 397 aa, Homo sapiens
  MOD_RES (18)..(18): Selenocysteine
  MOD_RES (60)..(60): Selenocysteine
  MOD_RES (68)..(68): Selenocysteine
  MOD_RES (76)..(76): Selenocysteine
  MOD_RES (78)..(78): Selenocysteine
  MOD_RES (118)..(118): Selenocysteine
  MOD_RES (125)..(125): Selenocysteine
  MOD_RES (138)..(138): Selenocysteine
  MOD_RES (149)..(149): Selenocysteine
  MOD_RES (165)..(165): Selenocysteine
  MOD_RES (286)..(286): Selenocysteine
  MOD_RES (353)..(353): Selenocysteine
  MOD_RES (397)..(397): Selenocysteine
MGQAGCKGLCLSLFDYKXEKYVIAKNKKVGLLYRLLQASILAYLVVWVFLIKKGYQDVDXSLQSAVIXKVKGVAFXNXSDLGQRIWDVADYVIPAQNEGIPDGACSKDSDCHAGEAVXAGNGVKXGRCLRRENLARGXCEIFAWCPLEXSSRPEEPFLKEAEDFXIFIKNHIRFPKFNFSNNVMDVKDRSFLKSCHFGPKNHYCPIFRLGSVIRWAGSDFQDIALEGGVIGINIEWNCDLDKAASECHPHYSFSRLDNKLSKSVSSGYNFRFARYYRDAAGVEFRXLMKAYGIRFDVMVNGKGAFFCDLVLIYLIKKREFYRDKKYEEVRGLEDSSQEAEDEASGLGLSEQLXSGPGLLGMPEQQELQEPPEAKRGSSSQKGNGSVCPQLLEPHRSX

SEQ ID NO: 19193 - protein, 362 aa, Homo sapiens
  MOD_RES (3)..(3): Selenocysteine
  MOD_RES (24)..(24): Selenocysteine
  MOD_RES (32)..(32): Selenocysteine
  MOD_RES (40)..(40): Selenocysteine
  MOD_RES (42)..(42): Selenocysteine
  MOD_RES (82)..(82): Selenocysteine
  MOD_RES (89)..(89): Selenocysteine
  MOD_RES (102)..(102): Selenocysteine
  MOD_RES (113)..(113): Selenocysteine
  MOD_RES (129)..(129): Selenocysteine
  MOD_RES (251)..(251): Selenocysteine
  MOD_RES (318)..(318): Selenocysteine
  MOD_RES (362)..(362): Selenocysteine
MPXYRPPSHRWVFLIKKGYQDVDXSLQSAVIXKVKGVAFXNXSDLGQRIWDVADYVIPAQNEGIPDGACSKDSDCHAGEAVXAGNGVKXGRCLRRENLARGXCEIFAWCPLEXSSRPEEPFLKEAEDFXIFIKNHIRFPKFNFSKSNVMDVKDRSFLKSCHFGPKNHYCPIFRLGSVIRWAGSDFQDIALEGGVIGINIEWNCDLDKAASECHPHYSFSRLDNKLSKSVSSGYNFRFARYYRDAAGVEFRXLMKAYGIRFDVMVNGKGAFFCDLVLIYLIKKREFYRDKKYEEVRGLEDSSQEAEDEASGLGLSEQLXSGPGLLGMPEQQELQEPPEAKRGSSSQKGNGSVCPQLLEPHRSX

SEQ ID NO: 19194 - protein, 287 aa, Homo sapiens
  MOD_RES (1)..(1): Any amino acid
  MOD_RES (8)..(8): Selenocysteine
  MOD_RES (16)..(16): Selenocysteine
  MOD_RES (24)..(24): Selenocysteine
  MOD_RES (26)..(26): Selenocysteine
  MOD_RES (53)..(53): Selenocysteine
  MOD_RES (58)..(58): Selenocysteine
  MOD_RES (90)..(90): Selenocysteine
  MOD_RES (97)..(97): Selenocysteine
  MOD_RES (110)..(110): Selenocysteine
  MOD_RES (121)..(121): Selenocysteine
  MOD_RES (137)..(137): Selenocysteine
  MOD_RES (185)..(185): Selenocysteine
  MOD_RES (252)..(252): Selenocysteine
XGYQDVDXSLQSAVIXKVKGVAFXNXSDLGQRIWDVADYVIPAQGENVFFVVXNLIVXPNQRQNVCAENEGIPDGACSKDSDCHAGEAVXAGNGVKXGRCLRRENLARGXCEIFAWCPLEXSSRPEEPFLKEAEDFXIFIKNHIRFPKFNFSNRLDNKLSKSVSSGYNFRFARYYRDAAGVEFRXLMKAYGIRFDVMVNGKGAFFCDLVLIYLIKKREFYRDKKYEEVRGLEDSSQEAEDEASGLGLSEQLXSGPGLLGMPEQQELQEPPEAKRGSSSQKGNGSVCP

SEQ ID NO: 19195 - protein, 29 aa, Homo sapiens
  MOD_RES (1)..(1): Any amino acid
XRFDVMVNGKGPRRQFPGGRGRGIGAGAI

SEQ ID NO: 19196 - protein, 101 aa, Homo sapiens
  MOD_RES (12)..(13): Selenocysteine
  MOD_RES (22)..(22): Selenocysteine
  MOD_RES (28)..(28): Selenocysteine
  MOD_RES (72)..(72): Selenocysteine
  MOD_RES (80)..(80): Selenocysteine
AGAGSMGSPGAXXGWGLLDYKXEKYVMXRNWRVGALQRLLQFGIVVYVVGWALLAKKGYQERDLEPQFSIIXKLKGVSVXQIKELGNRLWDVADFVKPPQV

SEQ ID NO: 19197 - protein, 130 aa, Homo sapiens
  MOD_RES (13)..(14): Selenocysteine
  MOD_RES (23)..(23): Selenocysteine
  MOD_RES (29)..(29): Selenocysteine
  MOD_RES (65)..(65): Selenocysteine
  MOD_RES (73)..(73): Selenocysteine
  MOD_RES (98)..(98): Selenocysteine
  MOD_RES (129)..(129): Selenocysteine
LAGAGSMGSPGAXXGWGLLDYKXEKYVMXRNWRVGALQRLLQFGIVVYVVGSPRQKRLPGAGPGXPVFHHHQXQRGFRHSDQGAWKPAVGCGRLREAXSGRERVLLGDQLPCDASPSSGQMPRAPVRPXG

SEQ ID NO: 19198 - protein, 415 aa, Homo sapiens
  MOD_RES (17)..(18): Selenocysteine
  MOD_RES (27)..(27): Selenocysteine
  MOD_RES (51)..(51): Selenocysteine
  MOD_RES (59)..(59): Selenocysteine
  MOD_RES (88)..(88): Selenocysteine
  MOD_RES (93)..(93): Selenocysteine
  MOD_RES (125)..(125): Selenocysteine
  MOD_RES (132)..(132): Selenocysteine
  MOD_RES (141)..(141): Selenocysteine
  MOD_RES (144)..(144): Selenocysteine
  MOD_RES (171)..(171): Selenocysteine
  MOD_RES (177)..(177): Selenocysteine
  MOD_RES (179)..(179): Selenocysteine
  MOD_RES (193)..(193): Selenocysteine
  MOD_RES (197)..(197): Selenocysteine
  MOD_RES (227)..(227): Selenocysteine
  MOD_RES (250)..(250): Selenocysteine
  MOD_RES (272)..(272): Selenocysteine
  MOD_RES (274)..(274): Selenocysteine
  MOD_RES (286)..(286): Selenocysteine
  MOD_RES (300)..(300): Selenocysteine
  MOD_RES (311)..(311): Selenocysteine
  MOD_RES (314)..(314): Selenocysteine
  MOD_RES (317)..(317): Selenocysteine
  MOD_RES (326)..(326): Selenocysteine
  MOD_RES (346)..(346): Selenocysteine
  MOD_RES (357)..(357): Selenocysteine
  MOD_RES (386)..(386): Selenocysteine
  MOD_RES (388)..(388): Selenocysteine
  MOD_RES (394)..(394): Selenocysteine
  MOD_RES (396)..(396): Selenocysteine
  MOD_RES (406)..(406): Selenocysteine
  MOD_RES (410)..(410): Selenocysteine
MCPQLAGAGSMGSPGAXXGWGLLDYKXEKWALLAKKGYQERDLEPQFSIIXKLKGVSVXQIKELGNRLWDVADFVKPPQGENVFFLVXNFLVXPAQVQGRCPEHPSVPLANCWVDEDCPEGEGGXHSHGVKXGQCVVFNGXHRXCEIWSWCPVESGVVPSRPLLAQAQNFXLFIKNXVXFSKFNFSKSNALEXWDPXYFKHCRYEPQFSPYCPVFRIGDLVAKAGGXFEDLALLGGSVGIRVHWDCDLDXGDSGCWPHYSFQLQEKSYNFRXAXHWWEQPGVEARXLLKLYGIRFDILVXGQAGKFGLIPXAVXLGXGAAWLGVVXFFCDLLLLYVDREAHFYWRXKYEEAKAPKAXANSVWRELALASQARLAECLRRSSAPAPXAXAAGSQXQXPGWPCPSSDXHLPXHSGSL

SEQ ID NO: 19199 - protein, 80 aa, Homo sapiens
  MOD_RES (17)..(18): Selenocysteine
  MOD_RES (27)..(27): Selenocysteine
  MOD_RES (51)..(51): Selenocysteine
  MOD_RES (59)..(59): Selenocysteine
MCPQLAGAGSMGSPGAXXGWGLLDYKXEKWALLAKKGYQERDLEPQFSIIXKLKGVSVXQIKELGNRLWDVADFVKPPQV

SEQ ID NO: 19200 - protein, 441 aa, Homo sapiens
  MOD_RES (17)..(18): Selenocysteine
  MOD_RES (27)..(27): Selenocysteine
  MOD_RES (33)..(33): Selenocysteine
  MOD_RES (77)..(77): Selenocysteine
  MOD_RES (85)..(85): Selenocysteine
  MOD_RES (114)..(114): Selenocysteine
  MOD_RES (119)..(119): Selenocysteine
  MOD_RES (151)..(151): Selenocysteine
  MOD_RES (158)..(158): Selenocysteine
  MOD_RES (167)..(167): Selenocysteine
  MOD_RES (170)..(170): Selenocysteine
  MOD_RES (197)..(197): Selenocysteine
  MOD_RES (203)..(203): Selenocysteine
  MOD_RES (205)..(205): Selenocysteine
  MOD_RES (219)..(219): Selenocysteine
  MOD_RES (223)..(223): Selenocysteine
  MOD_RES (253)..(253): Selenocysteine
  MOD_RES (276)..(276): Selenocysteine
  MOD_RES (298)..(298): Selenocysteine
  MOD_RES (300)..(300): Selenocysteine
  MOD_RES (312)..(312): Selenocysteine
  MOD_RES (326)..(326): Selenocysteine
  MOD_RES (337)..(337): Selenocysteine
  MOD_RES (340)..(340): Selenocysteine
  MOD_RES (343)..(343): Selenocysteine
  MOD_RES (352)..(352): Selenocysteine
  MOD_RES (372)..(372): Selenocysteine
  MOD_RES (383)..(383): Selenocysteine
  MOD_RES (412)..(412): Selenocysteine
  MOD_RES (414)..(414): Selenocysteine
  MOD_RES (420)..(420): Selenocysteine
  MOD_RES (422)..(422): Selenocysteine
  MOD_RES (432)..(432): Selenocysteine
  MOD_RES (436)..(436): Selenocysteine
MCPQLAGAGSMGSPGAXXGWGLLDYKXEKYVMXRNWRVGALQRLLQFGIVVYVVGWALLAKKGYQERDLEPQFSIIXKLKGVSVXQIKELGNRLWDVADFVKPPQGENVFFLVXNFLVXPAQVQGRCPEHPSVPLANCWVDEDCPEGEGGXHSHGVKXGQCVVFNGXHRXCEIWSWCPVESGVVPSRPLLAQAQNFXLFIKNXVXFSKFNFSKSNALEXWDPXYFKHCRYEPQFSPYCPVFRIGDLVAKAGGXFEDLALLGGSVGIRVHWDCDLDXGDSGCWPHYSFQLQEKSYNFRXAXHWWEQPGVEARXLLKLYGIRFDILVXGQAGKFGLIPXAVXLGXGAAWLGVVXFFCDLLLLYVDREAHFYWRXKYEEAKAPKAXANSVWRELALASQARLAECLRRSSAPAPXAXAAGSQXQXPGWPCPSSDXHLPXHSGSL

SEQ ID NO: 19201 - protein, 120 aa, Homo sapiens
  MOD_RES (1)..(1): Any amino acid
  MOD_RES (15)..(16): Selenocysteine
  MOD_RES (25)..(25): Selenocysteine
  MOD_RES (31)..(31): Selenocysteine
  MOD_RES (75)..(75): Selenocysteine
  MOD_RES (83)..(83): Selenocysteine
  MOD_RES (113)..(113): Selenocysteine
XQLAGAGSMGSPGAXXGWGLLDYKXEKYVMXRNWRVGALQRLLQFGIVVYVVGWALLAKKGYQERDLEPQFSIIXKLKGVSVXQIKELGNRLWDVADFVKPPQAAGFRPFQSXRAQPGQP

SEQ ID NO: 19202 - protein, 128 aa, Homo sapiens
  MOD_RES (15)..(15): Selenocysteine
  MOD_RES (19)..(19): Selenocysteine
  MOD_RES (28)..(28): Selenocysteine
  MOD_RES (63)..(63): Selenocysteine
  MOD_RES (90)..(90): Selenocysteine
  MOD_RES (94)..(94): Selenocysteine
  MOD_RES (106)..(106): Selenocysteine
  MOD_RES (111)..(111): Selenocysteine
MPACCSCSDVFQYEXNKVXRIQSMNYGXIKWFFHVIIFSYVCFALVSDKLYQRKEPVISSVHXKVKGIAEVKEEIVENGVKKLVHSVFDXADYXFPLQGNSFFVMXNFLKXEGQEQRLCPEEFRPEGV

SEQ ID NO: 19203 - protein, 364 aa, Homo sapiens
  MOD_RES (15)..(15): Selenocysteine
  MOD_RES (19)..(19): Selenocysteine
  MOD_RES (28)..(28): Selenocysteine
  MOD_RES (63)..(63): Selenocysteine
  MOD_RES (90)..(90): Selenocysteine
  MOD_RES (94)..(94): Selenocysteine
  MOD_RES (106)..(106): Selenocysteine
  MOD_RES (111)..(111): Selenocysteine
  MOD_RES (124)..(124): Selenocysteine
  MOD_RES (127)..(127): Selenocysteine
  MOD_RES (149)..(149): Selenocysteine
  MOD_RES (161)..(161): Selenocysteine
  MOD_RES (189)..(189): Selenocysteine
  MOD_RES (204)..(205): Selenocysteine
  MOD_RES (215)..(215): Selenocysteine
  MOD_RES (217)..(217): Selenocysteine
  MOD_RES (221)..(221): Selenocysteine
  MOD_RES (238)..(238): Selenocysteine
  MOD_RES (282)..(283): Selenocysteine
  MOD_RES (308)..(308): Selenocysteine
  MOD_RES (324)..(324): Selenocysteine
  MOD_RES (340)..(340): Selenocysteine
MPACCSCSDVFQYEXNKVXRIQSMNYGXIKWFFHVIIFSYVCFALVSDKLYQRKEPVISSVHXKVKGIAEVKEEIVENGVKKLVHSVFDXADYXFPLQGNSFFVMXNFLKXEGQEQRLCPEYPXRRXLCSSDRGCKKGWMDPQSKGIQXGRCVVYEGNQKXCEVSAWCPIEAVEEAPRPALLNSAENFXVLIKNNIDFPGHNYXXRNILPGLNIXCXFHKXQNPQCPIFRLGDIFREXGDNFSDVAIQGGIMGIEIYWDCNLDRWFHHCRPKYSFRRLDDKXXNVSLYPGYNFRYAKYYKENNVEKRXLIKVFGIRFDILVFGXGGKFDIIQLVVYIGSXLSYFGLVRDSLFHALGKWFGEGSD

SEQ ID NO: 19204 - protein, 595 aa, Homo sapiens
  MOD_RES (15)..(15): Selenocysteine
  MOD_RES (19)..(19): Selenocysteine
  MOD_RES (28)..(28): Selenocysteine
  MOD_RES (63)..(63): Selenocysteine
  MOD_RES (90)..(90): Selenocysteine
  MOD_RES (94)..(94): Selenocysteine
  MOD_RES (106)..(106): Selenocysteine
  MOD_RES (111)..(111): Selenocysteine
  MOD_RES (124)..(124): Selenocysteine
  MOD_RES (127)..(127): Selenocysteine
  MOD_RES (149)..(149): Selenocysteine
  MOD_RES (161)..(161): Selenocysteine
  MOD_RES (189)..(189): Selenocysteine
  MOD_RES (204)..(205): Selenocysteine
  MOD_RES (215)..(215): Selenocysteine
  MOD_RES (217)..(217): Selenocysteine
  MOD_RES (221)..(221): Selenocysteine
  MOD_RES (238)..(238): Selenocysteine
  MOD_RES (282)..(283): Selenocysteine
  MOD_RES (308)..(308): Selenocysteine
  MOD_RES (324)..(324): Selenocysteine
  MOD_RES (340)..(340): Selenocysteine
  MOD_RES (357)..(357): Selenocysteine
  MOD_RES (397)..(397): Selenocysteine
  MOD_RES (437)..(437): Selenocysteine
  MOD_RES (449)..(449): Selenocysteine
  MOD_RES (467)..(467): Selenocysteine
  MOD_RES (508)..(509): Selenocysteine
  MOD_RES (541)..(541): Selenocysteine
  MOD_RES (555)..(555): Selenocysteine
MPACCSCSDVFQYEXNKVXRIQSMNYGXIKWFFHVIIFSYVCFALVSDKLYQRKEPVISSVHXKVKGIAEVKEEIVENGVKKLVHSVFDXADYXFPLQGNSFFVMXNFLKXEGQEQRLCPEYPXRRXLCSSDRGCKKGWMDPQSKGIQXGRCVVYEGNQKXCEVSAWCPIEAVEEAPRPALLNSAENFXVLIKNNIDFPGHNYXXRNILPGLNIXCXFHKXQNPQCPIFRLGDIFREXGDNFSDVAIQGGIMGIEIYWDCNLDRWFHHCRPKYSFRRLDDKXXNVSLYPGYNFRYAKYYKENNVEKRXLIKVFGIRFDILVFGXGGKFDIIQLVVYIGSXLSYFGLAAVFIDFLIDXYSSNCCRSHIYPWCKCCQPCVVNEYYYRKKCESIVEPKPXLKYVSFVDESHIRMVNQQLLGRSLQDVKGQEVPRPAMDFXDLSRLPLALHDXPPIPGQPEEIQLLRKEAXPRSRDSPVWCQCGSCLPSQLPESHRCLEELCCRKKPGACIXXSELFRKLVLSRHVLQFLLLYQEPLLALDVDSXNSRLRHCAYRCYAXWRFGSQDMADFAILPSCCRWRIRKEFPKSEGQYSGFKSPY

SEQ ID NO: 19205 - protein, 258 aa, Homo sapiens
  MOD_RES (15)..(15): Selenocysteine
  MOD_RES (19)..(19): Selenocysteine
  MOD_RES (28)..(28): Selenocysteine
  MOD_RES (63)..(63): Selenocysteine
  MOD_RES (90)..(90): Selenocysteine
  MOD_RES (94)..(94): Selenocysteine
  MOD_RES (106)..(106): Selenocysteine
  MOD_RES (111)..(111): Selenocysteine
  MOD_RES (124)..(124): Selenocysteine
  MOD_RES (127)..(127): Selenocysteine
  MOD_RES (149)..(149): Selenocysteine
  MOD_RES (161)..(161): Selenocysteine
  MOD_RES (189)..(189): Selenocysteine
  MOD_RES (204)..(205): Selenocysteine
  MOD_RES (215)..(215): Selenocysteine
  MOD_RES (217)..(217): Selenocysteine
  MOD_RES (221)..(221): Selenocysteine
  MOD_RES (238)..(238): Selenocysteine
MPACCSCSDVFQYEXNKVXRIQSMNYGXIKWFFHVIIFSYVCFALVSDKLYQRKEPVISSVHXKVKGIAEVKEEIVENGVKKLVHSVFDXADYXFPLQGNSFFVMXNFLKXEGQEQRLCPEYPXRRXLCSSDRGCKKGWMDPQSKGIQXGRCVVYEGNQKXCEVSAWCPIEAVEEAPRPALLNSAENFXVLIKNNIDFPGHNYXXRNILPGLNIXCXFHKXQNPQCPIFRLGDIFREXGDNFSDVAIQIRQVLQGKQC

SEQ ID NO: 19206 - protein, 275 aa, Homo sapiens
  MOD_RES (15)..(15): Selenocysteine
  MOD_RES (19)..(19): Selenocysteine
  MOD_RES (28)..(28): Selenocysteine
  MOD_RES (63)..(63): Selenocysteine
  MOD_RES (90)..(90): Selenocysteine
  MOD_RES (94)..(94): Selenocysteine
  MOD_RES (106)..(106): Selenocysteine
  MOD_RES (111)..(111): Selenocysteine
  MOD_RES (124)..(124): Selenocysteine
  MOD_RES (127)..(127): Selenocysteine
  MOD_RES (149)..(149): Selenocysteine
  MOD_RES (161)..(161): Selenocysteine
  MOD_RES (189)..(189): Selenocysteine
  MOD_RES (204)..(205): Selenocysteine
  MOD_RES (219)..(219): Selenocysteine
  MOD_RES (235)..(235): Selenocysteine
  MOD_RES (251)..(251): Selenocysteine
MPACCSCSDVFQYEXNKVXRIQSMNYGXIKWFFHVIIFSYVCFALVSDKLYQRKEPVISSVHXKVKGIAEVKEEIVENGVKKLVHSVFDXADYXFPLQGNSFFVMXNFLKXEGQEQRLCPEYPXRRXLCSSDRGCKKGWMDPQSKGIQXGRCVVYEGNQKXCEVSAWCPIEAVEEAPRPALLNSAENFXVLIKNNIDFPGHNYXXYAKYYKENNVEKRXLIKVFGIRFDILVFGXGGKFDIIQLVVYIGSXLSYFGLVRDSLFHALGKWFGEGSD

SEQ ID NO: 19207 - protein, 149 aa, Homo sapiens
  MOD_RES (15)..(15): Selenocysteine
  MOD_RES (19)..(19): Selenocysteine
  MOD_RES (28)..(28): Selenocysteine
  MOD_RES (63)..(63): Selenocysteine
  MOD_RES (90)..(90): Selenocysteine
  MOD_RES (94)..(94): Selenocysteine
  MOD_RES (106)..(106): Selenocysteine
  MOD_RES (111)..(111): Selenocysteine
  MOD_RES (124)..(124): Selenocysteine
  MOD_RES (127)..(127): Selenocysteine
MPACCSCSDVFQYEXNKVXRIQSMNYGXIKWFFHVIIFSYVCFALVSDKLYQRKEPVISSVHXKVKGIAEVKEEIVENGVKKLVHSVFDXADYXFPLQGNSFFVMXNFLKXEGQEQRLCPEYPXRRXLCSSDRGCKKGWMDPQSKGLLS

SEQ ID NO: 19208 - protein, 127 aa, Homo sapiens
  MOD_RES (15)..(15): Selenocysteine
  MOD_RES (19)..(19): Selenocysteine
  MOD_RES (28)..(28): Selenocysteine
  MOD_RES (63)..(63): Selenocysteine
  MOD_RES (90)..(90): Selenocysteine
  MOD_RES (94)..(94): Selenocysteine
  MOD_RES (103)..(103): Selenocysteine
  MOD_RES (105)..(105): Selenocysteine
  MOD_RES (121)..(121): Selenocysteine
MPACCSCSDVFQYEXNKVXRIQSMNYGXIKWFFHVIIFSYVCFALVSDKLYQRKEPVISSVHXKVKGIAEVKEEIVENGVKKLVHSVFDXADYXFPLQLFRRXAXKPARSAEIQKDRELSXKEHQPF

SEQ ID NO: 19209 - protein, 47 aa, Homo sapiens
  MOD_RES (15)..(15): Selenocysteine
  MOD_RES (19)..(19): Selenocysteine
  MOD_RES (28)..(28): Selenocysteine
  MOD_RES (44)..(44): Selenocysteine
MPACCSCSDVFQYEXNKVXRIQSMNYGXIKWFFHVIIFSYVWGXLSS

SEQ ID NO: 19210 - protein, 373 aa, Homo sapiens
  MOD_RES (2)..(2): Selenocysteine
  MOD_RES (13)..(13): Selenocysteine
  MOD_RES (29)..(29): Selenocysteine
  MOD_RES (33)..(33): Selenocysteine
  MOD_RES (45)..(45): Selenocysteine
  MOD_RES (47)..(47): Selenocysteine
  MOD_RES (103)..(103): Selenocysteine
  MOD_RES (115)..(115): Selenocysteine
  MOD_RES (143)..(143): Selenocysteine
  MOD_RES (192)..(192): Selenocysteine
  MOD_RES (199)..(199): Selenocysteine
  MOD_RES (201)..(201): Selenocysteine
  MOD_RES (205)..(206): Selenocysteine
  MOD_RES (221)..(222): Selenocysteine
  MOD_RES (267)..(267): Selenocysteine
  MOD_RES (281)..(281): Selenocysteine
  MOD_RES (292)..(292): Selenocysteine
  MOD_RES (305)..(305): Selenocysteine
  MOD_RES (309)..(309): Selenocysteine
  MOD_RES (330)..(330): Selenocysteine
  MOD_RES (339)..(339): Selenocysteine
  MOD_RES (358)..(358): Selenocysteine
  MOD_RES (371)..(371): Selenocysteine
MXEVLWPAVPNGXDAAFLAGPGSSWGNSXVASXAAVSSSFKCALXKXGFQFYYLPAVYILVFIIGFLGNSVAIWMFVFHMKPWSGISVYMFNLALADFLYVLXLPALIFYYFNKXDWIFGDAMCKLQRFIFHVNLYGSILFLXCISAHRYSGVVYPLKSLGRLKKKNAICISVLVWLIVVVAISPILFYSGXGVRKNKXIXCYDXXSDEYLRSYFIYSMCXXVAMFCVPLVLILGCYGLIVRALIYKDLDNSPLRRKSIYLVIIVLXVFAVSYIPFHVMKXMNLRARLDFQXPAMCAFNDRVYAXYQVXRGLASLNSCVDPILYFLAGDXFRRRLSRAXRKASRRSEANLQSKSEDMXLNILPEFKQNGDXSL

SEQ ID NO: 19211 - protein, 339 aa, Homo sapiens
  MOD_RES (8)..(8): Selenocysteine
  MOD_RES (10)..(10): Selenocysteine
  MOD_RES (18)..(18): Selenocysteine
  MOD_RES (20)..(20): Selenocysteine
  MOD_RES (28)..(28): Selenocysteine
  MOD_RES (39)..(40): Selenocysteine
  MOD_RES (125)..(125): Selenocysteine
  MOD_RES (162)..(162): Selenocysteine
  MOD_RES (173)..(173): Selenocysteine
  MOD_RES (200)..(200): Selenocysteine
  MOD_RES (218)..(218): Selenocysteine
  MOD_RES (221)..(222): Selenocysteine
  MOD_RES (257)..(257): Selenocysteine
  MOD_RES (267)..(267): Selenocysteine
  MOD_RES (272)..(272): Selenocysteine
  MOD_RES (324)..(324): Selenocysteine
MANLDKYXEXFKMGSNSXSXAEIYCNVXNVKFQYSLYAXXYILIFIPGLLANSAALWVLCRFISKKNKAIIFMINLSVADLAHVLSLPLRIYYYISHHWPFQRALCLLCFYLKYLNMYASICFLXCISLQRCFFLLKPFRARDWKRRYDVGISAAIWIVVGXACLPFPILRSXDLNNNKSCFADLGYKQMNAVALVGMIXVAELAGFVIPVIIIAWCXWKXXISLRQPPMAFQGISERQKALRMVFMCAAVFFICFXPYHINFIFYXMVKEXIISSCPVVRIALYFHPFCLCLASLCCLLDPILYYFMASEFRDQLSRHGSSVXRSRLMSKESGSSMIG

SEQ ID NO: 19212 - protein, 374 aa, Homo sapiens
  MOD_RES (81)..(81): Selenocysteine
  MOD_RES (110)..(110): Selenocysteine
  MOD_RES (121)..(121): Selenocysteine
  MOD_RES (164)..(164): Selenocysteine
  MOD_RES (194)..(194): Selenocysteine
  MOD_RES (221)..(221): Selenocysteine
  MOD_RES (239)..(239): Selenocysteine
  MOD_RES (280)..(280): Selenocysteine
  MOD_RES (292)..(292): Selenocysteine
  MOD_RES (350)..(350): Selenocysteine
  MOD_RES (359)..(359): Selenocysteine
MAANVSGAKSCPANFLAAADDKLSGFQGDFLWPILVVEFLVAVASNGLALYRFSIRKQRPWHPAVVFSVQLAVSDLLCALXLPPLAAYLYPPKHWRYGEAACRLERFLFXCNLLGSVIFIXCISLNRYLGIVHPFFARSHLRPKHAWAVSAAGWVLAALLAMPXLSFSHLKRPQQGAGNCSVARPEACIKCLGXADHGLAAYRAYSLVLAGLGCGLPLLLXLAAYGALGRAVLRSPGMXVAEKLRVAALVASGVALYASSYVPYHIMRVLNVDARRRWSXRCPSFADIAQAXAALELGPYVGYQVMRGLMPLAFCVHPLLYMAAVPSLGCCCRHCPGYRDSWNPEDAKSXGQALPLNAXAAPKPSEPQSRELSQ

SEQ ID NO: 19213 - protein, 342 aa, Homo sapiens
  MOD_RES (8)..(8): Selenocysteine
  MOD_RES (14)..(14): Selenocysteine
  MOD_RES (18)..(18): Selenocysteine
  MOD_RES (24)..(24): Selenocysteine
  MOD_RES (33)..(33): Selenocysteine
  MOD_RES (42)..(42): Selenocysteine
  MOD_RES (66)..(66): Selenocysteine
  MOD_RES (76)..(76): Selenocysteine
  MOD_RES (89)..(89): Selenocysteine
  MOD_RES (94)..(94): Selenocysteine
  MOD_RES (100)..(100): Selenocysteine
  MOD_RES (107)..(107): Selenocysteine
  MOD_RES (119)..(119): Selenocysteine
  MOD_RES (126)..(127): Selenocysteine
  MOD_RES (132)..(132): Selenocysteine
  MOD_RES (163)..(163): Selenocysteine
  MOD_RES (210)..(210): Selenocysteine
  MOD_RES (213)..(213): Selenocysteine
  MOD_RES (223)..(223): Selenocysteine
  MOD_RES (260)..(260): Selenocysteine
  MOD_RES (264)..(264): Selenocysteine
  MOD_RES (271)..(271): Selenocysteine
  MOD_RES (275)..(275): Selenocysteine
  MOD_RES (283)..(283): Selenocysteine
  MOD_RES (287)..(287): Selenocysteine
  MOD_RES (320)..(320): Selenocysteine
  MOD_RES (340)..(340): Selenocysteine
MQAVDNLXSAPGNXSLCXRDYKIXQVLFPLLYXVLFFVGLIXNGLAMRIFFQIRSKSNFIIFLKNXVISDLLMILXFPFKILSDAKLGXGPLRXFVCQVXSVIFYFXMYISISFLGLIXIDRYQKXXRPFKXSNPKNLLGAKILSVVIWAFMFLLSLPNMILXNRQPRDKNVKKCSFLKSEFGLVWHEIVNYICQVIFWINFLIVIVCYXLIXKELYRSYVRXRGVGKVPRKKVNVKVFIIIAVFFICFVPFHFARIPYXLSQXRDVFDCXAENXLFYVKESXLWLXSLNACLDPFIYFFLCKSFRNSLISMLKCPNSAXSLSQDNRKKEQDGGDPNEEXPM

SEQ ID NO: 19214 - protein, 354 aa, Homo sapiens
  MOD_RES (2)..(2): Selenocysteine
  MOD_RES (18)..(18): Selenocysteine
  MOD_RES (24)..(25): Selenocysteine
  MOD_RES (40)..(40): Selenocysteine
  MOD_RES (52)..(52): Selenocysteine
  MOD_RES (57)..(57): Selenocysteine
  MOD_RES (63)..(63): Selenocysteine
  MOD_RES (77)..(77): Selenocysteine
  MOD_RES (85)..(85): Selenocysteine
  MOD_RES (93)..(93): Selenocysteine
  MOD_RES (126)..(126): Selenocysteine
  MOD_RES (162)..(162): Selenocysteine
  MOD_RES (179)..(179): Selenocysteine
  MOD_RES (187)..(187): Selenocysteine
  MOD_RES (219)..(219): Selenocysteine
  MOD_RES (279)..(279): Selenocysteine
  MOD_RES (283)..(283): Selenocysteine
  MOD_RES (287)..(287): Selenocysteine
  MOD_RES (301)..(302): Selenocysteine
  MOD_RES (308)..(308): Selenocysteine
  MOD_RES (325)..(325): Selenocysteine
  MOD_RES (336)..(337): Selenocysteine
  MOD_RES (348)..(348): Selenocysteine
  MOD_RES (352)..(352): Selenocysteine
MXAAIRRQRELSILPKVXLEAMNXXVMQGFNRSERCPRDXRIVQLVFPALYXVVFLXGILLNXLALWVFVHIPSSSXFIIYLKNXLVADLIMXLMLPFKILSDSHLAPWQLRAFVCRFSSVIFYEXMYVGIVLLGLIAFDRFLKIIRPLRNIFLKKPVFAKXVSIFIWFFLFFISLPNXILSNKEAXPSSVKKCASLKGPLGLKWHQMVNNICQFIFWXVFILMLVFYVVIAKKVYDSYRKSKSKDRKNNKKLEGKVFVVVAVFFVCFAPFHFARVPYXHSQXNNKXDCRLQNQLFIAKEXXLFLAAXNICMDPLIYIFLCKKFXEKLPCMQGRKXXASSQENHSSQXDNIXLG

SEQ ID NO: 19215 - protein, 96 aa, Homo sapiens
  MOD_RES (5)..(5): Selenocysteine
  MOD_RES (7)..(7): Selenocysteine
  MOD_RES (21)..(21): Selenocysteine
  MOD_RES (73)..(73): Selenocysteine
MINSXSXQPPDESCSQNLLIXQQIIPVLYCMVFIAGILLNGVSGWIFFYVPSSKSFIIYLKNIVIADFVMSLXFPFKILGDSGLGPWQLNVFVCRV

SEQ ID NO: 19216 - protein, 338 aa, Homo sapiens
  MOD_RES (5)..(5): Selenocysteine
  MOD_RES (7)..(7): Selenocysteine
  MOD_RES (21)..(21): Selenocysteine
  MOD_RES (73)..(73): Selenocysteine
  MOD_RES (129)..(129): Selenocysteine
  MOD_RES (160)..(160): Selenocysteine
  MOD_RES (168)..(168): Selenocysteine
  MOD_RES (207)..(207): Selenocysteine
  MOD_RES (210)..(210): Selenocysteine
  MOD_RES (225)..(225): Selenocysteine
  MOD_RES (257)..(257): Selenocysteine
  MOD_RES (261)..(261): Selenocysteine
  MOD_RES (280)..(280): Selenocysteine
  MOD_RES (330)..(331): Selenocysteine
  MOD_RES (335)..(335): Selenocysteine
  MOD_RES (337)..(337): Selenocysteine
MINSXSXQPPDESCSQNLLIXQQIIPVLYCMVFIAGILLNGVSGWIFFYVPSSKSFIIYLKNIVIADFVMSLXFPFKILGDSGLGPWQLNVFVCRVSAVLFYVNMYVSIVFFGLISFDRYYKIVKPLWXSFIQSVSYSKLLSVIVWMLMLLLAVPNIILXNQSVREVXQIKCIELKSELGRKWHKASNYIFVAIFWIVFLLLIVFYXAIXKKIFKSHLKSSRNSXSVKKKSSRNIFSIVFVFFVCFVPYHIARIPYXKSQXEAHYSCQSKEILRYMKEFXLLLSAANVCLDPIIYFFLCQPFREILCKKLHIPLKAQNDLDISRIKRGNXXLESXDXL

SEQ ID NO: 19217 - protein, 377 aa, Homo sapiens
  MOD_RES (11)..(11): Selenocysteine
  MOD_RES (15)..(15): Selenocysteine
  MOD_RES (64)..(64): Selenocysteine
  MOD_RES (69)..(70): Selenocysteine
  MOD_RES (103)..(103): Selenocysteine
  MOD_RES (115)..(115): Selenocysteine
  MOD_RES (125)..(125): Selenocysteine
  MOD_RES (173)..(174): Selenocysteine
  MOD_RES (182)..(182): Selenocysteine
  MOD_RES (186)..(186): Selenocysteine
  MOD_RES (232)..(232): Selenocysteine
  MOD_RES (246)..(246): Selenocysteine
  MOD_RES (264)..(264): Selenocysteine
  MOD_RES (266)..(266): Selenocysteine
  MOD_RES (280)..(280): Selenocysteine
  MOD_RES (291)..(291): Selenocysteine
  MOD_RES (324)..(324): Selenocysteine
  MOD_RES (330)..(330): Selenocysteine
  MOD_RES (344)..(344): Selenocysteine
  MOD_RES (362)..(362): Selenocysteine
  MOD_RES (365)..(365): Selenocysteine
  MOD_RES (372)..(372): Selenocysteine
MAADLGPWNDXINGXWDGDELGYRCRFNEDFKYVLLPVSYGVVCVPGLCLNAVALYIFLCRLKXWNASXXYMFHLAVSDALYAASLPLLVYYYARGDHWPFSXVLCKLVRFLFYXNLYCSILFLXCISVHRCLGVLRPLRSLRWGRARYARRVAGAVWVLVLACQAPVLYFVXXSARGGRVXCHDXSAPELFSRFVAYSSVMLGLLFAVPFAVILVCYVLMARRLLKPAYGXSGGLPRAKRKSVRXIAVVLAVFALCFLPFHVXRXLYYSFRSLDLSCHXLNAINMAYKVXRPLASANSCLDPVLYFLAGQRLVRFARDAKPPXGPSPAXPARRRLGLRRSDRXDMQRIEDVLGSSEDSRRXESXPAGSENXKDIRL

SEQ ID NO: 19218 - protein, 365 aa, Homo sapiens
  MOD_RES (4)..(4): Selenocysteine
  MOD_RES (56)..(56): Selenocysteine
  MOD_RES (70)..(70): Selenocysteine
  MOD_RES (72)..(72): Selenocysteine
  MOD_RES (82)..(82): Selenocysteine
  MOD_RES (90)..(90): Selenocysteine
  MOD_RES (105)..(105): Selenocysteine
  MOD_RES (127)..(127): Selenocysteine
  MOD_RES (175)..(176): Selenocysteine
  MOD_RES (181)..(182): Selenocysteine
  MOD_RES (188)..(189): Selenocysteine
  MOD_RES (216)..(216): Selenocysteine
  MOD_RES (246)..(246): Selenocysteine
  MOD_RES (252)..(252): Selenocysteine
  MOD_RES (264)..(264): Selenocysteine
  MOD_RES (266)..(266): Selenocysteine
  MOD_RES (291)..(291): Selenocysteine
  MOD_RES (309)..(309): Selenocysteine
  MOD_RES (330)..(330): Selenocysteine
  MOD_RES (351)..(351): Selenocysteine
  MOD_RES (359)..(359): Selenocysteine
MASXESSLLRSLGLSPGPGSSEVELDCWFDEDFKFILLPVSYAVVFVLGLGLNAPXLWLFIFRLRPWDAXAXYMFHLALSDXLYVLSLPXLIYYYAAHNHWPFGXEICKFVRFLFYWNLYCSVLFLXCISVHRYLGICHPLRALRWGRPRLAGLLCLAVWLVVAGCLVPNLFFVXXSNKGXXVLCHDXXRPEEFDHYVHFSSAVMGLLFGVPCLVXLVCYGLMARRLYQPLPGSAQSSSRLRSLRXIAVVLXVFAVCFVPFHIXRXIYYLARLLEADCRVLNIVNVVYKVXRPLASANSCLDPVLYLLXGDKYRRQLRQLCGGGKPQPRXAASSLALVSLPEDSSCRWAAXPQDSSCSXPRADRL

SEQ ID NO: 19219 - protein, 56 aa, Homo sapiens
  MOD_RES (7)..(7): Selenocysteine
  MOD_RES (14)..(14): Selenocysteine
  MOD_RES (26)..(26): Selenocysteine
  MOD_RES (36)..(36): Selenocysteine
MEWDNGXGIQRNRXVCYDLSPPALAXHYMPYGMALXVIGFLLPFAALLACYCLLAC

SEQ ID NO: 19220 - protein, 128 aa, Homo sapiens
  MOD_RES (7)..(7): Selenocysteine
  MOD_RES (16)..(17): Selenocysteine
  MOD_RES (49)..(49): Selenocysteine
  MOD_RES (53)..(53): Selenocysteine
  MOD_RES (59)..(59): Selenocysteine
  MOD_RES (61)..(61): Selenocysteine
  MOD_RES (65)..(65): Selenocysteine
  MOD_RES (118)..(118): Selenocysteine
MEWDNGXGQALGLPPXXCVYRENFKQLLLPPVYSAVLAAGLPLNICVIXQICXSRRALXRXAVYXLNLALADLLYACSLPLLIYNYAQGDHWPFGDFACRLVRFLFYANLHGSILFLXCISFQRYLGI

SEQ ID NO: 19221 - protein, 245 aa, Homo sapiens
  MOD_RES (7)..(7): Selenocysteine
  MOD_RES (16)..(17): Selenocysteine
  MOD_RES (49)..(49): Selenocysteine
  MOD_RES (53)..(53): Selenocysteine
  MOD_RES (59)..(59): Selenocysteine
  MOD_RES (61)..(61): Selenocysteine
  MOD_RES (65)..(65): Selenocysteine
  MOD_RES (118)..(118): Selenocysteine
  MOD_RES (156)..(157): Selenocysteine
  MOD_RES (162)..(162): Selenocysteine
  MOD_RES (168)..(168): Selenocysteine
  MOD_RES (175)..(175): Selenocysteine
  MOD_RES (187)..(187): Selenocysteine
  MOD_RES (197)..(197): Selenocysteine
MEWDNGXGQALGLPPXXCVYRENFKQLLLPPVYSAVLAAGLPLNICVIXQICXSRRALXRXAVYXLNLALADLLYACSLPLLIYNYAQGDHWPFGDFACRLVRFLFYANLHGSILFLXCISFQRYLGICHPLAPWHKRGGRRAAWLVCVAVWLAVXXQCLPXAIFAAXGIQRNRXVCYDLSPPALAXHYMPYGMALXVIGFLLPFAALLACYCLLACRLCRQDGPAEPVAQERRGKAARMAVVVA

SEQ ID NO: 19222 - protein, 328 aa, Homo sapiens
  MOD_RES (7)..(7): Selenocysteine
  MOD_RES (16)..(17): Selenocysteine
  MOD_RES (49)..(49): Selenocysteine
  MOD_RES (53)..(53): Selenocysteine
  MOD_RES (59)..(59): Selenocysteine
  MOD_RES (61)..(61): Selenocysteine
  MOD_RES (65)..(65): Selenocysteine
  MOD_RES (118)..(118): Selenocysteine
  MOD_RES (156)..(157): Selenocysteine
  MOD_RES (162)..(162): Selenocysteine
  MOD_RES (168)..(168): Selenocysteine
  MOD_RES (175)..(175): Selenocysteine
  MOD_RES (187)..(187): Selenocysteine
  MOD_RES (197)..(197): Selenocysteine
  MOD_RES (258)..(258): Selenocysteine
  MOD_RES (260)..(260): Selenocysteine
  MOD_RES (268)..(268): Selenocysteine
  MOD_RES (274)..(274): Selenocysteine
  MOD_RES (286)..(286): Selenocysteine
  MOD_RES (304)..(304): Selenocysteine
  MOD_RES (320)..(320): Selenocysteine
MEWDNGXGQALGLPPXXCVYRENFKQLLLPPVYSAVLAAGLPLNICVIXQICXSRRALXRXAVYXLNLALADLLYACSLPLLIYNYAQGDHWPFGDFACRLVRFLFYANLHGSILFLXCISFQRYLGICHPLAPWHKRGGRRAAWLVCVAVWLAVXXQCLPXAIFAAXGIQRNRXVCYDLSPPALAXHYMPYGMALXVIGFLLPFAALLACYCLLACRLCRQDGPAEPVAQERRGKAARMAVVVAAAFAISFLPFHIXKXAYLAVRSXPGVPCXVLEAFAAAYKGXRPFASANSVLDPILFYFXQKKFRRRPHELLQKLXAKWQRQGR

SEQ ID NO: 19223 - protein, 40 aa, Homo sapiens
  MOD_RES (7)..(7): Selenocysteine
  MOD_RES (13)..(13): Selenocysteine
MQVPNSXGPDNAXLQMLRNPAIAVALPVVYSLVAAVSIPG

SEQ ID NO: 19224 - protein, 359 aa, Homo sapiens
  MOD_RES (7)..(7): Selenocysteine
  MOD_RES (13)..(13): Selenocysteine
  MOD_RES (68)..(68): Selenocysteine
  MOD_RES (100)..(100): Selenocysteine
  MOD_RES (113)..(113): Selenocysteine
  MOD_RES (115)..(115): Selenocysteine
  MOD_RES (147)..(147): Selenocysteine
  MOD_RES (153)..(153): Selenocysteine
  MOD_RES (161)..(161): Selenocysteine
  MOD_RES (164)..(164): Selenocysteine
  MOD_RES (174)..(174): Selenocysteine
  MOD_RES (182)..(182): Selenocysteine
  MOD_RES (196)..(196): Selenocysteine
  MOD_RES (209)..(209): Selenocysteine
  MOD_RES (214)..(214): Selenocysteine
  MOD_RES (216)..(216): Selenocysteine
  MOD_RES (223)..(223): Selenocysteine
  MOD_RES (248)..(248): Selenocysteine
  MOD_RES (278)..(278): Selenocysteine
  MOD_RES (317)..(317): Selenocysteine
  MOD_RES (320)..(320): Selenocysteine
  MOD_RES (330)..(331): Selenocysteine
  MOD_RES (348)..(348): Selenocysteine
MQVPNSXGPDNAXLQMLRNPAIAVALPVVYSLVAAVSIPGNLFSLWVLCRRMGPRSPSVIFMINLSVXDLMLASVLPFQIYYHCNRHHWVFGVLLCNVVXVAFYANMYSSILXMXCISVERFLGVLYPLSSKRWRRRRYAVAACAGXWLLLLXALSPLARXDLXYPVHALGIIXCFDVLKWXMLPSVAMWAVFLFXIFILLFLIPFVIXVACYXAXILKLLRXEEAHGREQRRRAVGLAAVVLLAFVXCFAPNNFVLLAHIVSRLFYGKSYYHVYKLXLCLSCLNNCLDPFVYYFASREFQLRLREYLGCRRVPRDXLDXRRESLFSARXXSVRSEAGAHPEGMEGAXRPGLQRQESVF

SEQ ID NO: 19225 - protein, 200 aa, Homo sapiens
  MOD_RES (3)..(3): Selenocysteine
  MOD_RES (36)..(36): Selenocysteine
  MOD_RES (70)..(70): Selenocysteine
  MOD_RES (90)..(90): Selenocysteine
  MOD_RES (93)..(93): Selenocysteine
  MOD_RES (104)..(104): Selenocysteine
  MOD_RES (126)..(126): Selenocysteine
  MOD_RES (145)..(145): Selenocysteine
  MOD_RES (168)..(168): Selenocysteine
  MOD_RES (174)..(174): Selenocysteine
  MOD_RES (184)..(184): Selenocysteine
  MOD_RES (189)..(189): Selenocysteine
MEXRLPPRNIQDVESDSAKQFLQAAEAIDDIPFGIXSNSDVFSKYQLDKDGVVLFKKFDEGRNNFEGEVXKENLLDFIKHNQLPLVIEFXEQXAPKIFGGEIKXHILLFLPKSVSDYDGKLSNFKXAAESFKGKILFIFIDSDHXDNQRILEFFGLKKEECPAVRLIXLEEEMXKYKPESEELXAERIXEFCHRFLEGKI

SEQ ID NO: 19226 - protein, 117 aa, Homo sapiens
  MOD_RES (3)..(3): Selenocysteine
  MOD_RES (24)..(24): Selenocysteine
  MOD_RES (44)..(44): Selenocysteine
  MOD_RES (47)..(47): Selenocysteine
  MOD_RES (58)..(58): Selenocysteine
  MOD_RES (80)..(80): Selenocysteine
  MOD_RES (99)..(99): Selenocysteine
MEXRLPPRNIQFDEGRNNFEGEVXKENLLDFIKHNQLPLVIEFXEQXAPKIFGGEIKXHILLFLPKSVSDYDGKLSNFKXAAESFKGKILFIFIDSDHXDNQRILEFFGLKKEECPA

SEQ ID NO: 19227 - protein, 54 aa, Homo sapiens
MLRRALLCLAVAALVRADAPEEEDHVLVLRKSNFAEALAAHKCPLVWPLQGSGP

SEQ ID NO: 19228 - protein, 156 aa, Homo sapiens
  MOD_RES (49)..(49): Selenocysteine
  MOD_RES (65)..(65): Selenocysteine
  MOD_RES (74)..(74): Selenocysteine
  MOD_RES (81)..(81): Selenocysteine
  MOD_RES (97)..(97): Selenocysteine
  MOD_RES (102)..(103): Selenocysteine
  MOD_RES (151)..(151): Selenocysteine
MLRRALLCLAVAALVRADAPEEEDHVLVLRKSNFAEALAAHKYLLVDAXEESDLAQQYGVRGYPXIKFFRNGDXASPKEYXAGREADDIVNWLKKRXGPAAXXLPDGAAAESLVESSEVAVIGFFKDVESDSAKQFLQAAEAIDDIPFGIXSNSDV

SEQ ID NO: 19229 - protein, 208 aa, Homo sapiens
  MOD_RES (64)..(64): Selenocysteine
  MOD_RES (69)..(70): Selenocysteine
  MOD_RES (118)..(118): Selenocysteine
  MOD_RES (152)..(152): Selenocysteine
  MOD_RES (172)..(172): Selenocysteine
  MOD_RES (175)..(175): Selenocysteine
  MOD_RES (186)..(186): Selenocysteine
  MOD_RES (208)..(208): Selenocysteine
MLRRALLCLAVAALVRADAPEEEDHVLVLRKSNFAEALAAHKYLLVEFSGREADDIVNWLKKRXGPAAXXLPDGAAAESLVESSEVAVIGFFKDVESDSAKQFLQAAEAIDDIPFGIXSNSDVFSKYQLDKDGVVLFKKFDEGRNNFEGEVXKENLLDFIKHNQLPLVIEFXEQXAPKIFGGEIKXHILLFLPKSVSDYDGKLSNFKX

SEQ ID NO: 19230 - protein, 148 aa, Homo sapiens
  MOD_RES (85)..(85): Selenocysteine
  MOD_RES (99)..(99): Selenocysteine
  MOD_RES (110)..(110): Selenocysteine
  MOD_RES (119)..(119): Selenocysteine
MLRRALLCLAVAALVRADAPEEEDHVLVLRKSNFAEALAAHKYLLVEFYAPWCGHCKALAPEYAKAAGKLKAEGSEIRLAKMDSXANEVEAVKVHSFPXLKFFPASADRXVIDYNGERXLDGFKKFLESGGQDGAGDDDDLEDLEEAE

SEQ ID NO: 19231 - protein, 188 aa, Homo sapiens
  MOD_RES (85)..(85): Selenocysteine
  MOD_RES (101)..(101): Selenocysteine
  MOD_RES (110)..(110): Selenocysteine
  MOD_RES (117)..(117): Selenocysteine
  MOD_RES (160)..(160): Selenocysteine
MLRRALLCLAVAALVRADAPEEEDHVLVLRKSNFAEALAAHKYLLVEFYAPWCGHCKALAPEYAKAAGKLKAEGSEIRLAKVDAXEESDLAQQYGVRGYPXIKFFRNGDXASPKEYXAAESLVESSEVAVIGFFKDVESDSAKQFLQAAEAIDDIPFGIXSNSDVFSKYQLDKDGVVLFKKFDEGRNN

SEQ ID NO: 19232 - protein, 508 aa, Homo sapiens
  MOD_RES (85)..(85): Selenocysteine
  MOD_RES (101)..(101): Selenocysteine
  MOD_RES (110)..(110): Selenocysteine
  MOD_RES (117)..(117): Selenocysteine
  MOD_RES (133)..(133): Selenocysteine
  MOD_RES (138)..(139): Selenocysteine
  MOD_RES (187)..(187): Selenocysteine
  MOD_RES (221)..(221): Selenocysteine
  MOD_RES (241)..(241): Selenocysteine
  MOD_RES (244)..(244): Selenocysteine
  MOD_RES (255)..(255): Selenocysteine
  MOD_RES (277)..(277): Selenocysteine
  MOD_RES (296)..(296): Selenocysteine
  MOD_RES (319)..(319): Selenocysteine
  MOD_RES (325)..(325): Selenocysteine
  MOD_RES (335)..(335): Selenocysteine
  MOD_RES (340)..(340): Selenocysteine
  MOD_RES (413)..(413): Selenocysteine
  MOD_RES (428)..(428): Selenocysteine
  MOD_RES (442)..(442): Selenocysteine
  MOD_RES (453)..(453): Selenocysteine
  MOD_RES (462)..(462): Selenocysteine
MLRRALLCLAVAALVRADAPEEEDHVLVLRKSNFAEALAAHKYLLVEFYAPWCGHCKALAPEYAKAAGKLKAEGSEIRLAKVDAXEESDLAQQYGVRGYPXIKFFRNGDXASPKEYXAGREADDIVNWLKKRXGPAAXXLPDGAAAESLVESSEVAVIGFFKDVESDSAKQFLQAAEAIDDIPFGIXSNSDVFSKYQLDKDGVVLFKKFDEGRNNFEGEVXKENLLDFIKHNQLPLVIEFXEQXAPKIFGGEIKXHILLFLPKSVSDYDGKLSNFKXAAESFKGKILFIFIDSDHXDNQRILEFFGLKKEECPAVRLIXLEEEMXKYKPESEELXAERIXEFCHRFLEGKIKPHLMSQELPEDWDKQPVKVLVGKNFEDVAFDEKKNVFVEFYAPWCGHCKQLAPIWDKLGEXYKDHENIVIAKMDSXANEVEAVKVHSFPXLKFFPASADRXVIDYNGERXLDGFKKFLESGGQDGAGDDDDLEDLEEAEEPDMEEDDDQKAVKDEL

SEQ ID NO: 19233 - protein, 464 aa, Homo sapiens
  MOD_RES (85)..(85): Selenocysteine
  MOD_RES (101)..(101): Selenocysteine
  MOD_RES (110)..(110): Selenocysteine
  MOD_RES (117)..(117): Selenocysteine
  MOD_RES (143)..(143): Selenocysteine
  MOD_RES (177)..(177): Selenocysteine
  MOD_RES (197)..(197): Selenocysteine
  MOD_RES (200)..(200): Selenocysteine
  MOD_RES (211)..(211): Selenocysteine
  MOD_RES (233)..(233): Selenocysteine
  MOD_RES (252)..(252): Selenocysteine
  MOD_RES (275)..(275): Selenocysteine
  MOD_RES (281)..(281): Selenocysteine
  MOD_RES (291)..(291): Selenocysteine
  MOD_RES (296)..(296): Selenocysteine
  MOD_RES (369)..(369): Selenocysteine
  MOD_RES (384)..(384): Selenocysteine
  MOD_RES (398)..(398): Selenocysteine
  MOD_RES (409)..(409): Selenocysteine
  MOD_RES (418)..(418): Selenocysteine
MLRRALLCLAVAALVRADAPEEEDHVLVLRKSNFAEALAAHKYLLVEFYAPWCGHCKALAPEYAKAAGKLKAEGSEIRLAKVDAXEESDLAQQYGVRGYPXIKFFRNGDXASPKEYXGDVESDSAKQFLQAAEAIDDIPFGIXSNSDVFSKYQLDKDGVVLFKKFDEGRNNFEGEVXKENLLDFIKHNQLPLVIEFXEQXAPKIFGGEIKXHILLFLPKSVSDYDGKLSNFKXAAESFKGKILFIFIDSDHXDNQRILEFFGLKKEECPAVRLIXLEEEMXKYKPESEELXAERIXEFCHRFLEGKIKPHLMSQELPEDWDKQPVKVLVGKNFEDVAFDEKKNVFVEFYAPWCGHCKQLAPIWDKLGEXYKDHENIVIAKMDSXANEVEAVKVHSFPXLKFFPASADRXVIDYNGERXLDGFKKFLESGGQDGAGDDDDLEDLEEAEEPDMEEDDDQKAVKDEL

SEQ ID NO: 19234 - protein, 166 aa, Homo sapiens
  MOD_RES (85)..(85): Selenocysteine
  MOD_RES (101)..(101): Selenocysteine
  MOD_RES (110)..(110): Selenocysteine
  MOD_RES (117)..(117): Selenocysteine
  MOD_RES (131)..(131): Selenocysteine
  MOD_RES (151)..(151): Selenocysteine
  MOD_RES (154)..(154): Selenocysteine
  MOD_RES (165)..(165): Selenocysteine
MLRRALLCLAVAALVRADAPEEEDHVLVLRKSNFAEALAAHKYLLVEFYAPWCGHCKALAPEYAKAAGKLKAEGSEIRLAKVDAXEESDLAQQYGVRGYPXIKFFRNGDXASPKEYXGFDEGRNNFEGEVXKENLLDFIKHNQLPLVIEFXEQXAPKIFGGEIKXH

SEQ ID NO: 19235 - protein, 106 aa, Homo sapiens
  MOD_RES (94)..(94): Selenocysteine
MLRRALLCLAVAALVRADAPEEEDHVLVLRKSNFAEALAAHKYLLVEFYAPWCGHCKALAPEYAKAAGKLKAEGSEIRPPRRSLSPVWEGRSRXGHGHSVPPAVSP

SEQ ID NO: 19236 - protein, 274 aa, Homo sapiens
  MOD_RES (1)..(1): Any amino acid
  MOD_RES (7)..(7): Selenocysteine
  MOD_RES (27)..(27): Selenocysteine
  MOD_RES (43)..(43): Selenocysteine
  MOD_RES (62)..(62): Selenocysteine
  MOD_RES (85)..(85): Selenocysteine
  MOD_RES (91)..(91): Selenocysteine
  MOD_RES (101)..(101): Selenocysteine
  MOD_RES (106)..(106): Selenocysteine
  MOD_RES (179)..(179): Selenocysteine
  MOD_RES (194)..(194): Selenocysteine
  MOD_RES (208)..(208): Selenocysteine
  MOD_RES (219)..(219): Selenocysteine
  MOD_RES (228)..(228): Selenocysteine
XFEGEVXKENLLDFIKHNQLPLVIEFXEQSVSDYDGKLSNFKXAAESFKGKILFIFIDSDHXDNQRILEFFGLKKEECPAVRLIXLEEEMXKYKPESEELXAERIXEFCHRFLEGKIKPHLMSQELPEDWDKQPVKVLVGKNFEDVAFDEKKNVFVEFYAPWCGHCKQLAPIWDKLGEXYKDHENIVIAKMDSXANEVEAVKVHSFPXLKFFPASADRXVIDYNGERXLDGFKKFLESGGQDGAGDDDDLEDLEEAEEPDMEEDDDQKAVKDEL

SEQ ID NO: 19237 - protein, 65 aa, Homo sapiens
  MOD_RES (6)..(6): Selenocysteine
  MOD_RES (24)..(24): Selenocysteine
MIMEEXGKIFKKEKEMKKGIAFPXSISVNNCVCHFSPLKSDQDYILKEGDLVKIDLGVHVDGFIA

SEQ ID NO: 19238 - protein, 187 aa, Homo sapiens
  MOD_RES (12)..(12): Selenocysteine
  MOD_RES (49)..(49): Selenocysteine
  MOD_RES (67)..(67): Selenocysteine
  MOD_RES (113)..(113): Selenocysteine
  MOD_RES (122)..(122): Selenocysteine
  MOD_RES (125)..(125): Selenocysteine
  MOD_RES (153)..(153): Selenocysteine
  MOD_RES (156)..(156): Selenocysteine
  MOD_RES (169)..(169): Selenocysteine
MSAERGPWQAPXRGRLLGGVLRSLVEASSSGVSVLSLCEKGDAMIMEEXGKIFKKEKEMKKGIAFPXSISVNNCVCHFSPLKSDQDYILKEGDLVKIDLGVHVDGFIANVAHXFVVDVAQGXQVXGRKADVIKAAHLCAEAALRLVKPGNQNXQVXEAWNKVAHSFNCXPIEGMLSHQLKQHVIDGE

SEQ ID NO: 19239 - protein, 284 aa, Homo sapiens
  MOD_RES (11)..(11): Selenocysteine
  MOD_RES (19)..(19): Selenocysteine
  MOD_RES (60)..(60): Selenocysteine
  MOD_RES (78)..(78): Selenocysteine
  MOD_RES (124)..(124): Selenocysteine
  MOD_RES (133)..(133): Selenocysteine
  MOD_RES (136)..(136): Selenocysteine
  MOD_RES (164)..(164): Selenocysteine
  MOD_RES (167)..(167): Selenocysteine
  MOD_RES (180)..(180): Selenocysteine
  MOD_RES (200)..(200): Selenocysteine
  MOD_RES (206)..(206): Selenocysteine
  MOD_RES (244)..(245): Selenocysteine
  MOD_RES (261)..(261): Selenocysteine
  MOD_RES (280)..(280): Selenocysteine
  MOD_RES (284)..(284): Selenocysteine
MSGEDEQQEQXIAEDLVVXKYKMGGDIANRVLRSLVEASSSGVSVLSLCEKGDAMIMEEXGKIFKKEKEMKKGIAFPXSISVNNCVCHFSPLKSDQDYILKEGDLVKIDLGVHVDGFIANVAHXFVVDVAQGXQVXGRKADVIKAAHLCAEAALRLVKPGNQNXQVXEAWNKVAHSFNCXPIEGMLSHQLKQHVIDGEKXIIQNPXDQQKKDHEKAEFEVHEVYAVDVLVSSGEGKAKDAGQRXXIYKRDPSKQYGLKMKXSRAFFSEVERRFDAMFLNXLKMX

SEQ ID NO: 19240 - protein, 394 aa, Homo sapiens
  MOD_RES (11)..(11): Selenocysteine
  MOD_RES (19)..(19): Selenocysteine
  MOD_RES (60)..(60): Selenocysteine
  MOD_RES (78)..(78): Selenocysteine
  MOD_RES (124)..(124): Selenocysteine
  MOD_RES (133)..(133): Selenocysteine
  MOD_RES (136)..(136): Selenocysteine
  MOD_RES (164)..(164): Selenocysteine
  MOD_RES (167)..(167): Selenocysteine
  MOD_RES (180)..(180): Selenocysteine
  MOD_RES (200)..(200): Selenocysteine
  MOD_RES (206)..(206): Selenocysteine
  MOD_RES (244)..(245): Selenocysteine
  MOD_RES (261)..(261): Selenocysteine
  MOD_RES (279)..(279): Selenocysteine
  MOD_RES (322)..(322): Selenocysteine
  MOD_RES (334)..(334): Selenocysteine
  MOD_RES (366)..(366): Selenocysteine
  MOD_RES (377)..(377): Selenocysteine
  MOD_RES (382)..(382): Selenocysteine
  MOD_RES (386)..(386): Selenocysteine
MSGEDEQQEQXIAEDLVVXKYKMGGDIANRVLRSLVEASSSGVSVLSLCEKGDAMIMEEXGKIFKKEKEMKKGIAFPXSISVNNCVCHFSPLKSDQDYILKEGDLVKIDLGVHVDGFIANVAHXFVVDVAQGXQVXGRKADVIKAAHLCAEAALRLVKPGNQNXQVXEAWNKVAHSFNCXPIEGMLSHQLKQHVIDGEKXIIQNPXDQQKKDHEKAEFEVHEVYAVDVLVSSGEGKAKDAGQRXXIYKRDPSKQYGLKMKXSRAFFSEVERRFDAMPFXLRAFEDEKKARMGVVECAKHELLQPFNVLYEKEGEFVAQFKFXVLLMPNGPMRIXSGPFEPDLYKSEMEVQDAELKALLQSSASRKXQKKKKKKASKXAENAXSGEXLEENEAGD

SEQ ID NO: 19241 - protein, 134 aa, Homo sapiens
  MOD_RES (10)..(10): Selenocysteine
  MOD_RES (27)..(27): Selenocysteine
  MOD_RES (45)..(45): Selenocysteine
  MOD_RES (76)..(76): Selenocysteine
  MOD_RES (83)..(83): Selenocysteine
  MOD_RES (98)..(99): Selenocysteine
CKCSSAAHSXYRVQEPAVHIPGQEPLXASMLAAAPLHEQKQMIGXCYLVLKRWSDWMVLSFLPLLLSCDFEGSVSXPLSMMSXPSWLARSRACCWRLXXQSCCSCWSLQNPSMPRKGNPRFHGCQKDSVSGSQP

SEQ ID NO: 19242 - protein, 330 aa, Homo sapiens
  MOD_RES (23)..(23): Selenocysteine
  MOD_RES (48)..(48): Selenocysteine
  MOD_RES (71)..(71): Selenocysteine
  MOD_RES (118)..(118): Selenocysteine
  MOD_RES (121)..(121): Selenocysteine
  MOD_RES (147)..(147): Selenocysteine
  MOD_RES (157)..(157): Selenocysteine
  MOD_RES (191)..(191): Selenocysteine
  MOD_RES (321)..(321): Selenocysteine
MNASGSGYPLASLYVGDLHPDVXEAMLYEKFSPAGPILSIRVCRDVAXRRSLGYAYINFQQPADAERALDXMNFEMLKGQPIRIMWSQRDPGLRKSGVGNIFIKNLEDSIDNKALYDXFSXFGNILSCKVACDEHGSRGFGFVHFEXHEAAQQAINXMNGMLLNDRKVFVGHFKSRREREAELGARALEFXNIYVKNLPVDVDEQGLQDLFSQFGKMLSVKVMRDNSGHSRCFGFVNFEKHEEAQKAVVHMNGKEVSGRLLYAGRAQKRVERQNELKRRFEQMKQDRLRRYQGVNLYVKNLDDSIDDDKLRKEFSPYGVIXSAKKRRQRP

SEQ ID NO: 19243 - protein, 614 aa, Homo sapiens
  MOD_RES (23)..(23): Selenocysteine
  MOD_RES (48)..(48): Selenocysteine
  MOD_RES (71)..(71): Selenocysteine
  MOD_RES (118)..(118): Selenocysteine
  MOD_RES (121)..(121): Selenocysteine
  MOD_RES (147)..(147): Selenocysteine
  MOD_RES (157)..(157): Selenocysteine
  MOD_RES (191)..(191): Selenocysteine
  MOD_RES (321)..(321): Selenocysteine
  MOD_RES (327)..(327): Selenocysteine
  MOD_RES (347)..(347): Selenocysteine
  MOD_RES (351)..(351): Selenocysteine
  MOD_RES (360)..(360): Selenocysteine
  MOD_RES (379)..(379): Selenocysteine
  MOD_RES (388)..(388): Selenocysteine
  MOD_RES (391)..(391): Selenocysteine
  MOD_RES (427)..(427): Selenocysteine
  MOD_RES (429)..(429): Selenocysteine
  MOD_RES (436)..(436): Selenocysteine
  MOD_RES (469)..(469): Selenocysteine
  MOD_RES (474)..(474): Selenocysteine
  MOD_RES (478)..(478): Selenocysteine
  MOD_RES (486)..(486): Selenocysteine
  MOD_RES (488)..(489): Selenocysteine
  MOD_RES (498)..(498): Selenocysteine
  MOD_RES (515)..(515): Selenocysteine
  MOD_RES (532)..(532): Selenocysteine
  MOD_RES (561)..(561): Selenocysteine
  MOD_RES (568)..(568): Selenocysteine
MNASGSGYPLASLYVGDLHPDVXEAMLYEKFSPAGPILSIRVCRDVAXRRSLGYAYINFQQPADAERALDXMNFEMLKGQPIRIMWSQRDPGLRKSGVGNIFIKNLEDSIDNKALYDXFSXFGNILSCKVACDEHGSRGFGFVHFEXHEAAQQAINXMNGMLLNDRKVFVGHFKSRREREAELGARALEFXNIYVKNLPVDVDEQGLQDLFSQFGKMLSVKVMRDNSGHSRCFGFVNFEKHEEAQKAVVHMNGKEVSGRLLYAGRAQKRVERQNELKRRFEQMKQDRLRRYQGVNLYVKNLDDSIDDDKLRKEFSPYGVIXSAKVMXEGGHSKGFGFVCFSSPEEAXKAVXEMNGRIVGXKPLYVALAQRKEERKAILXNQYMQRLSXMRXLSNPLLGSFQQPSSYFLPAMPQPPAQAAYYGCGPVXPXQPAPRWXSQPPRPSCASMVRPPVVPRRPPAHISSVRQASXQVPRXVPHXQRVANIGXQXXGPSGVGCCXPGRPLLPCKCSSAAHSXYRVQEPAVHIPGQEPLXASMLAAAPLHEQKQMIGERLYPLIHDVHXQLAGKIXGMLLEIDNSELLLMLESPESLHAKIDEAVAVLQAHQAMEQPKAYMH

SEQ ID NO: 19244 - protein, 168 aa, Homo sapiens
  MOD_RES (23)..(23): Selenocysteine
  MOD_RES (28)..(28): Selenocysteine
  MOD_RES (32)..(32): Selenocysteine
  MOD_RES (40)..(40): Selenocysteine
  MOD_RES (42)..(43): Selenocysteine
  MOD_RES (52)..(52): Selenocysteine
  MOD_RES (69)..(69): Selenocysteine
  MOD_RES (86)..(86): Selenocysteine
  MOD_RES (115)..(115): Selenocysteine
  MOD_RES (122)..(122): Selenocysteine
MVRPPVVPRRPPAHISSVRQASXQVPRXVPHXQRVANIGXQXXGPSGVGCCXPGRPLLPCKCSSAAHSXYRVQEPAVHIPGQEPLXASMLAAAPLHEQKQMIGERLYPLIHDVHXQLAGKIXGMLLEIDNSELLLMLESPESLHAKIDEAVAVLQAHQAMEQPKAYMH

SEQ ID NO: 19245 - protein, 149 aa, Homo sapiens
  MOD_RES (23)..(23): Selenocysteine
  MOD_RES (28)..(28): Selenocysteine
  MOD_RES (32)..(32): Selenocysteine
  MOD_RES (40)..(40): Selenocysteine
  MOD_RES (42)..(43): Selenocysteine
  MOD_RES (52)..(52): Selenocysteine
  MOD_RES (69)..(69): Selenocysteine
  MOD_RES (86)..(86): Selenocysteine
  MOD_RES (115)..(115): Selenocysteine
  MOD_RES (122)..(122): Selenocysteine
MVRPPVVPRRPPAHISSVRQASXQVPRXVPHXQRVANIGXQXXGPSGVGCCXPGRPLLPCKCSSAAHSXYRVQEPAVHIPGQEPLXASMLAAAPLHEQKQMIGERLYPLIHDVHXQLAGKIXGMLLEIDNSELLLMLESPESLHAKISA

SEQ ID NO: 19246 - protein, 171 aa, Homo sapiens
  MOD_RES (23)..(23): Selenocysteine
  MOD_RES (28)..(28): Selenocysteine
  MOD_RES (32)..(32): Selenocysteine
  MOD_RES (40)..(40): Selenocysteine
  MOD_RES (42)..(43): Selenocysteine
  MOD_RES (52)..(52): Selenocysteine
  MOD_RES (69)..(69): Selenocysteine
  MOD_RES (86)..(86): Selenocysteine
  MOD_RES (115)..(115): Selenocysteine
  MOD_RES (122)..(122): Selenocysteine
MVRPPVVPRRPPAHISSVRQASXQVPRXVPHXQRVANIGXQXXGPSGVGCCXPGRPLLPCKCSSAAHSXYRVQEPAVHIPGQEPLXASMLAAAPLHEQKQMIGERLYPLIHDVHXQLAGKIXGMLLEIDNSELLLMLESPESLHAKKRKSSLPWLPKGQCFWLSALRPCKL

SEQ ID NO: 19247 - protein, 174 aa, Homo sapiens
  MOD_RES (23)..(23): Selenocysteine
  MOD_RES (28)..(28): Selenocysteine
  MOD_RES (32)..(32): Selenocysteine
  MOD_RES (40)..(40): Selenocysteine
  MOD_RES (42)..(43): Selenocysteine
  MOD_RES (52)..(52): Selenocysteine
  MOD_RES (69)..(69): Selenocysteine
  MOD_RES (86)..(86): Selenocysteine
  MOD_RES (104)..(104): Selenocysteine
  MOD_RES (135)..(135): Selenocysteine
  MOD_RES (142)..(142): Selenocysteine
  MOD_RES (157)..(158): Selenocysteine
MVRPPVVPRRPPAHISSVRQASXQVPRXVPHXQRVANIGXQXXGPSGVGCCXPGRPLLPCKCSSAAHSXYRVQEPAVHIPGQEPLXASMLAAAPLHEQKQMIGXCYLVLKRWSDWMVLSFLPLLLSCDFEGSVSXPLSMMSXPSWLARSRACCWRLXXQSCCSCWSLQNPSMPR

SEQ ID NO: 19248 - protein, 152 aa, Homo sapiens
  MOD_RES (1)..(1): Any amino acid
  MOD_RES (5)..(5): Selenocysteine
  MOD_RES (10)..(10): Selenocysteine
  MOD_RES (14)..(14): Selenocysteine
  MOD_RES (22)..(22): Selenocysteine
  MOD_RES (24)..(25): Selenocysteine
  MOD_RES (34)..(34): Selenocysteine
  MOD_RES (51)..(51): Selenocysteine
  MOD_RES (68)..(68): Selenocysteine
  MOD_RES (97)..(97): Selenocysteine
  MOD_RES (104)..(104): Selenocysteine
  MOD_RES (149)..(149): Selenocysteine
XQASXQVPRXVPHXQRVANIGXQXXGPSGVGCCXPGRPLLPCKCSSAAHSXYRVQEPAVHIPGQEPLXASMLAAAPLHEQKQMIGERLYPLIHDVHXQLAGKIXGMLLEIDNSELLLMLESPESLHAKAQRRKVQRLVKYILALKELSXQNL

SEQ ID NO: 19249 - protein, 437 aa, Homo sapiens
  MOD_RES (6)..(6): Selenocysteine
  MOD_RES (23)..(23): Selenocysteine
  MOD_RES (27)..(27): Selenocysteine
  MOD_RES (39)..(39): Selenocysteine
  MOD_RES (63)..(63): Selenocysteine
  MOD_RES (75)..(76): Selenocysteine
  MOD_RES (80)..(80): Selenocysteine
  MOD_RES (86)..(86): Selenocysteine
  MOD_RES (94)..(94): Selenocysteine
  MOD_RES (114)..(114): Selenocysteine
  MOD_RES (141)..(141): Selenocysteine
  MOD_RES (159)..(159): Selenocysteine
  MOD_RES (188)..(188): Selenocysteine
  MOD_RES (242)..(242): Selenocysteine
  MOD_RES (283)..(283): Selenocysteine
  MOD_RES (287)..(287): Selenocysteine
  MOD_RES (289)..(289): Selenocysteine
  MOD_RES (300)..(300): Selenocysteine
  MOD_RES (331)..(331): Selenocysteine
  MOD_RES (394)..(394): Selenocysteine
  MOD_RES (403)..(403): Selenocysteine
  MOD_RES (418)..(418): Selenocysteine
  MOD_RES (423)..(423): Selenocysteine
MLRERXVRLQYGSRVEAVYVLGXYLWXDVYSAAPAGAQXFSLKHSEHVWVEVVRDGEAEEVAXNGKQRWLLSPSXXLRVXMSQASXEASSDKVXVNYYDEEGSIPIDQAGLFLXAIEISLDVDADRDGVVEKNNPKKASWXWGPEGQGAILLVNCDREXPWLPKEDCRDEKVYSKEDLKDMSQMILRXKGPDRLPAGYEIVLYISMSDSDKVGVFYVENPFFGQRYIHILGRRKLYHVVKYXGGSAELLFFVEGLCFPDEGFSGLVSIHVSLLEYMAQDIPLXPIFXDXVIFRIAPWIMXPNILPPVSVFVCCMKDNYLFLKEVKNLVEKXNCELKVCFQYLNRGDRWIQDEIEFGYIEAPHKGFPVVLDSPRDGNLKDFPVKELLGPDFGYVXREPLFESVXSLDSFGNLEVSPPVXVNGKXYPLGRILIGSSFPL

SEQ ID NO: 19250 - protein, 665 aa, Homo sapiens
  MOD_RES (6)..(6): Selenocysteine
  MOD_RES (23)..(23): Selenocysteine
  MOD_RES (27)..(27): Selenocysteine
  MOD_RES (39)..(39): Selenocysteine
  MOD_RES (63)..(63): Selenocysteine
  MOD_RES (75)..(76): Selenocysteine
  MOD_RES (80)..(80): Selenocysteine
  MOD_RES (86)..(86): Selenocysteine
  MOD_RES (94)..(94): Selenocysteine
  MOD_RES (114)..(114): Selenocysteine
  MOD_RES (141)..(141): Selenocysteine
  MOD_RES (159)..(159): Selenocysteine
  MOD_RES (188)..(188): Selenocysteine
  MOD_RES (242)..(242): Selenocysteine
  MOD_RES (283)..(283): Selenocysteine
  MOD_RES (287)..(287): Selenocysteine
  MOD_RES (289)..(289): Selenocysteine
  MOD_RES (300)..(300): Selenocysteine
  MOD_RES (331)..(331): Selenocysteine
  MOD_RES (394)..(394): Selenocysteine
  MOD_RES (403)..(403): Selenocysteine
  MOD_RES (418)..(418): Selenocysteine
  MOD_RES (423)..(423): Selenocysteine
  MOD_RES (444)..(444): Selenocysteine
  MOD_RES (468)..(468): Selenocysteine
  MOD_RES (484)..(484): Selenocysteine
  MOD_RES (494)..(494): Selenocysteine
  MOD_RES (527)..(527): Selenocysteine
  MOD_RES (562)..(562): Selenocysteine
  MOD_RES (630)..(630): Selenocysteine
  MOD_RES (649)..(649): Selenocysteine
  MOD_RES (657)..(657): Selenocysteine
MLRERXVRLQYGSRVEAVYVLGXYLWXDVYSAAPAGAQXFSLKHSEHVWVEVVRDGEAEEVAXNGKQRWLLSPSXXLRVXMSQASXEASSDKVXVNYYDEEGSIPIDQAGLFLXAIEISLDVDADRDGVVEKNNPKKASWXWGPEGQGAILLVNCDREXPWLPKEDCRDEKVYSKEDLKDMSQMILRXKGPDRLPAGYEIVLYISMSDSDKVGVFYVENPFFGQRYIHILGRRKLYHVVKYXGGSAELLFFVEGLCFPDEGFSGLVSIHVSLLEYMAQDIPLXPIFXDXVIFRIAPWIMXPNILPPVSVFVCCMKDNYLFLKEVKNLVEKXNCELKVCFQYLNRGDRWIQDEIEFGYIEAPHKGFPVVLDSPRDGNLKDFPVKELLGPDFGYVXREPLFESVXSLDSFGNLEVSPPVXVNGKXYPLGRILIGSSFPLSGGRRMXKVVRDFLKAQQVQAPVELYSDWLXVGHVDEFMSFVPIPGXKKFLLLMASXSACYKLFREKQKDGHGEAIMFKGLGGMSSKRIXINKILSNESLVQENLYFQRCLDWNRDILKKELGLXEQDIIDLPALFKMDEDHRARAFFPNMVNMIVLDKDLGIPKPFGPQVEEECCLEMHVRGLLEPLGLECXFIDDISAYHKFLGEVHCGXNVRRKPFXFKWWHMVP

SEQ ID NO: 19251 - protein, 127 aa, Homo sapiens
  MOD_RES (5)..(5): Selenocysteine
  MOD_RES (10)..(10): Selenocysteine
  MOD_RES (15)..(15): Selenocysteine
  MOD_RES (23)..(23): Selenocysteine
  MOD_RES (25)..(25): Selenocysteine
  MOD_RES (38)..(38): Selenocysteine
  MOD_RES (63)..(63): Selenocysteine
  MOD_RES (67)..(67): Selenocysteine
  MOD_RES (77)..(77): Selenocysteine
  MOD_RES (79)..(79): Selenocysteine
  MOD_RES (87)..(87): Selenocysteine
  MOD_RES (101)..(101): Selenocysteine
  MOD_RES (111)..(111): Selenocysteine
MAQGXLIRVXPEQPXHAVCVLGXLXQLDICSSAPEDCXSFSINASPGVVVDIAHGPPAKKKSXGSSXWPLDPGVEVXLXMKVASGSXGDQKVQISYYGPKXPPVKALLYLXGVDGVSPCHPGWSAMA

SEQ ID NO: 19252 - protein, 663 aa, Homo sapiens
  MOD_RES (5)..(5): Selenocysteine
  MOD_RES (10)..(10): Selenocysteine
  MOD_RES (15)..(15): Selenocysteine
  MOD_RES (23)..(23): Selenocysteine
  MOD_RES (25)..(25): Selenocysteine
  MOD_RES (38)..(38): Selenocysteine
  MOD_RES (63)..(63): Selenocysteine
  MOD_RES (67)..(67): Selenocysteine
  MOD_RES (77)..(77): Selenocysteine
  MOD_RES (79)..(79): Selenocysteine
  MOD_RES (87)..(87): Selenocysteine
  MOD_RES (101)..(101): Selenocysteine
  MOD_RES (111)..(111): Selenocysteine
  MOD_RES (122)..(122): Selenocysteine
  MOD_RES (124)..(124): Selenocysteine
  MOD_RES (130)..(130): Selenocysteine
  MOD_RES (138)..(138): Selenocysteine
  MOD_RES (140)..(140): Selenocysteine
  MOD_RES (184)..(184): Selenocysteine
  MOD_RES (187)..(187): Selenocysteine
  MOD_RES (189)..(189): Selenocysteine
  MOD_RES (195)..(195): Selenocysteine
  MOD_RES (198)..(198): Selenocysteine
  MOD_RES (217)..(217): Selenocysteine
  MOD_RES (259)..(259): Selenocysteine
  MOD_RES (266)..(266): Selenocysteine
  MOD_RES (268)..(268): Selenocysteine
  MOD_RES (274)..(274): Selenocysteine
  MOD_RES (299)..(299): Selenocysteine
  MOD_RES (302)..(302): Selenocysteine
  MOD_RES (324)..(325): Selenocysteine
  MOD_RES (335)..(335): Selenocysteine
  MOD_RES (363)..(363): Selenocysteine
  MOD_RES (393)..(393): Selenocysteine
  MOD_RES (398)..(398): Selenocysteine
  MOD_RES (417)..(417): Selenocysteine
  MOD_RES (534)..(534): Selenocysteine
  MOD_RES (628)..(628): Selenocysteine
  MOD_RES (635)..(635): Selenocysteine
  MOD_RES (647)..(647): Selenocysteine
MAQGXLIRVXPEQPXHAVCVLGXLXQLDICSSAPEDCXSFSINASPGVVVDIAHGPPAKKKSXGSSXWPLDPGVEVXLXMKVASGSXGDQKVQISYYGPKXPPVKALLYLXGVEISLCADIXRXGKVKPXRAVKDQRXWXWGPCGQGAILLVNCDRDNLESSAMDCEDDEVLDSEDLQDMSLMXLSXKXPKDFFXNHXLVLHVARSEMDKVRVFQAXRGKLSSKCSVVLGPKWPSHYLMVPGGKHNMDFYVEALAFPDXDFPGLIXLXISLLDXSNLELPEAVVFQDSVVFRVAPWIMXPNXQPPQEVYACSIFENEDFLKSVXXLAMKAKCKLXICPEEENMDDQWMQDEMEIGYIQAPHKXLPVVFDSPRNRGLKEFPIKRVMGPDFGYVXRGPQXGGISGLDSFGNLEVSPPVXVRGKEYPLGRILFGDSCYPSNDSRQMHQALQDFLSAQQVQAPVKLYSDWLSVGHVDEFLSFVPAPDRKGFRLLLASPRSCYKLFQEQQNEGHGEALLFEGIKKKKQQKIKNILSNKXLREHNSFVERCIDWNRELLKRELGLAESDIIDIPQLFKLKEFSKAEAFFPNMVNMLVLGKHLGIPKPFGPVINGRCCLEEKVCSLLEPLGLQCXFINDFFXYHIRHGEVHCGXNVRRKPFSFKWWNMVP

SEQ ID NO: 19253 - protein, 531 aa, Homo sapiens
  MOD_RES (4)..(4): Selenocysteine
  MOD_RES (7)..(7): Selenocysteine
  MOD_RES (22)..(22): Selenocysteine
  MOD_RES (50)..(50): Selenocysteine
  MOD_RES (64)..(64): Selenocysteine
  MOD_RES (76)..(76): Selenocysteine
  MOD_RES (83)..(83): Selenocysteine
  MOD_RES (91)..(91): Selenocysteine
  MOD_RES (116)..(116): Selenocysteine
  MOD_RES (134)..(134): Selenocysteine
  MOD_RES (139)..(139): Selenocysteine
  MOD_RES (164)..(164): Selenocysteine
  MOD_RES (177)..(177): Selenocysteine
  MOD_RES (182)..(182): Selenocysteine
  MOD_RES (200)..(200): Selenocysteine
  MOD_RES (232)..(232): Selenocysteine
  MOD_RES (267)..(267): Selenocysteine
  MOD_RES (328)..(328): Selenocysteine
  MOD_RES (345)..(345): Selenocysteine
  MOD_RES (386)..(386): Selenocysteine
MAPXIQXQAQREDGHRPNSHRXLPERSGVVCRVKYCNSLPDIPFDPKFIXYPFDQNRFVQYKAXSLEKQHKHDLLXEPDLGVXIDLINPDXYRIDPNVLLDPADEKLLEEEIQAPXSSKRSQQHAKVVPWMRKXEYISXEFNRYGISNEKPEVKIGVSVKQQFXEEEIYKDRDSQIXAIEKXFEDAQKSISQHYSKPRVXPVEVMPVFPDFKMWINPCAQVIFDSDPAPKDXSGAAALEMMSQAMIRGMMDEEGNQFVAYFLPVEEXLKKRKRDQEEEMDYAPDDVYDYKIAREYNWNVKNKASKGYEENYFFIFREGDGVYYNELEXRVRLSKRRAKAGVQSGXNALLVVKHRDMNEKELEAQEARKAQLENHEPEEEEEEEMEXEEKEAGGSDEEQEKGSSSEKEGSEDEHSGSESEREEGDRDEASDKSGSGEDESSEDEARAARDKEEIFGSDADSEDDADSDDEDRGQAQGGSDNDSDSGSNGGGQRSRSHSRSASPFPSGSEHSAQEDGSEAAASDSSEADSDSD

SEQ ID NO: 19254 - protein, 485 aa, Homo sapiens
  MOD_RES (4)..(4): Selenocysteine
  MOD_RES (7)..(7): Selenocysteine
  MOD_RES (40)..(40): Selenocysteine
  MOD_RES (54)..(54): Selenocysteine
  MOD_RES (66)..(66): Selenocysteine
  MOD_RES (73)..(73): Selenocysteine
  MOD_RES (81)..(81): Selenocysteine
  MOD_RES (106)..(106): Selenocysteine
  MOD_RES (124)..(124): Selenocysteine
  MOD_RES (129)..(129): Selenocysteine
  MOD_RES (154)..(154): Selenocysteine
  MOD_RES (167)..(167): Selenocysteine
  MOD_RES (172)..(172): Selenocysteine
  MOD_RES (190)..(190): Selenocysteine
  MOD_RES (222)..(222): Selenocysteine
  MOD_RES (257)..(257): Selenocysteine
  MOD_RES (318)..(318): Selenocysteine
  MOD_RES (335)..(335): Selenocysteine
  MOD_RES (376)..(376): Selenocysteine
  MOD_RES (391)..(391): Selenocysteine
  MOD_RES (394)..(394): Selenocysteine
  MOD_RES (399)..(399): Selenocysteine
  MOD_RES (408)..(408): Selenocysteine
  MOD_RES (412)..(412): Selenocysteine
  MOD_RES (425)..(425): Selenocysteine
  MOD_RES (438)..(438): Selenocysteine
  MOD_RES (458)..(458): Selenocysteine
  MOD_RES (460)..(460): Selenocysteine
  MOD_RES (479)..(479): Selenocysteine
MAPXIQXQAQREDGHRSGVVCRVKYCNSLPDIPFDPKFIXYPFDQNRFVQYKAXSLEKQHKHDLLXEPDLGVXIDLINPDXYRIDPNVLLDPADEKLLEEEIQAPXSSKRSQQHAKVVPWMRKXEYISXEFNRYGISNEKPEVKIGVSVKQQFXEEEIYKDRDSQIXAIEKXFEDAQKSISQHYSKPRVXPVEVMPVFPDFKMWINPCAQVIFDSDPAPKDXSGAAALEMMSQAMIRGMMDEEGNQFVAYFLPVEEXLKKRKRDQEEEMDYAPDDVYDYKIAREYNWNVKNKASKGYEENYFFIFREGDGVYYNELEXRVRLSKRRAKAGVQSGXNALLVVKHRDMNEKELEAQEARKAQLENHEPEEEEEEEMEXEEKEAGGSVMLILRXMPXLMMRXEDRPKVAVXMIQXAAAMGVASGAGAXAAAPVPSPVAASXRPRRMAVKLQLLIPVKLIVXVXESQGIQGWFRHHYCEQQSXFLVVCL

SEQ ID NO: 19255 - protein, 288 aa, Homo sapiens
  MOD_RES (3)..(3): Selenocysteine
  MOD_RES (8)..(8): Selenocysteine
  MOD_RES (23)..(23): Selenocysteine
  MOD_RES (33)..(33): Selenocysteine
  MOD_RES (39)..(39): Selenocysteine
  MOD_RES (42)..(42): Selenocysteine
  MOD_RES (44)..(44): Selenocysteine
  MOD_RES (63)..(63): Selenocysteine
  MOD_RES (81)..(81): Selenocysteine
  MOD_RES (86)..(86): Selenocysteine
  MOD_RES (111)..(111): Selenocysteine
  MOD_RES (124)..(124): Selenocysteine
  MOD_RES (129)..(129): Selenocysteine
  MOD_RES (147)..(147): Selenocysteine
  MOD_RES (179)..(179): Selenocysteine
  MOD_RES (214)..(214): Selenocysteine
  MOD_RES (275)..(275): Selenocysteine
MAXGPIPXGLCLRGLEWSAESSXAIASLISPSXPSSSPXPSXRXVLLDPADEKLLEEEIQAPXSSKRSQQHAKVVPWMRKXEYISXEFNRYGISNEKPEVKIGVSVKQQFXEEEIYKDRDSQIXAIEKXFEDAQKSISQHYSKPRVXPVEVMPVFPDFKMWINPCAQVIFDSDPAPKDXSGAAALEMMSQAMIRGMMDEEGNQFVAYFLPVEEXLKKRKRDQEEEMDYAPDDVYDYKIAREYNWNVKNKASKGYEENYFFIFREGDGVYYNELEXSIQYSHMLYNLVA

SEQ ID NO: 19256 - protein, 94 aa, Homo sapiens
  MOD_RES (1)..(1): Any amino acid
  MOD_RES (6)..(6): Selenocysteine
  MOD_RES (47)..(47): Selenocysteine
XVQSGXNALLVVKHRDMNEKELEAQEARKAQLENHEPEEEEEEEMEXEEKEAGGSGKSGQARLWEPWEGGKVGFISLHSLPDEEQEKGSSSEKE

SEQ ID NO: 19257 - protein, 14 aa, Homo sapiens
MVLSQRQRDELMKN

SEQ ID NO: 19258 - protein, 82 aa, Homo sapiens
  MOD_RES (56)..(56): Selenocysteine
  MOD_RES (80)..(80): Selenocysteine
MVLSQRQRDELNRAIADYLRSNGYEEAYSVFKKEAELDVNEELDKKYAGLLEKKWXSVIRLQKKVMELESKLNEAKEEFXSG

SEQ ID NO: 19259 - protein, 410 aa, Homo sapiens
  MOD_RES (56)..(56): Selenocysteine
  MOD_RES (80)..(80): Selenocysteine
  MOD_RES (112)..(112): Selenocysteine
  MOD_RES (131)..(131): Selenocysteine
  MOD_RES (139)..(139): Selenocysteine
  MOD_RES (145)..(145): Selenocysteine
  MOD_RES (150)..(150): Selenocysteine
  MOD_RES (173)..(173): Selenocysteine
  MOD_RES (187)..(187): Selenocysteine
  MOD_RES (215)..(215): Selenocysteine
  MOD_RES (223)..(223): Selenocysteine
  MOD_RES (229)..(229): Selenocysteine
  MOD_RES (231)..(231): Selenocysteine
  MOD_RES (247)..(247): Selenocysteine
  MOD_RES (257)..(257): Selenocysteine
  MOD_RES (265)..(265): Selenocysteine
  MOD_RES (297)..(297): Selenocysteine
  MOD_RES (301)..(301): Selenocysteine
  MOD_RES (319)..(319): Selenocysteine
  MOD_RES (327)..(327): Selenocysteine
  MOD_RES (333)..(333): Selenocysteine
  MOD_RES (361)..(361): Selenocysteine
  MOD_RES (375)..(375): Selenocysteine
  MOD_RES (384)..(384): Selenocysteine
  MOD_RES (391)..(391): Selenocysteine
  MOD_RES (397)..(397): Selenocysteine
  MOD_RES (403)..(403): Selenocysteine
MVLSQRQRDELNRAIADYLRSNGYEEAYSVFKKEAELDVNEELDKKYAGLLEKKWXSVIRLQKKVMELESKLNEAKEEFXSGGPLGQKRDPKEWIPRPPEKYALSGHRSPVXRVIFHPVFSVMVSASEDAXIKVWDYEXGDFERXLKGHXDSVQDISFDHSGKLLASCSADMXIKLWDFQGFECIRXMHGHDHNVSSVAIMPNGDHIVSASRDKXIKMWEVQXGYCVKXFXGHREWVRMVRPNQDGXLIASCSNDQXVRVWVVAXKECKAELREHEHVVECISWAPESSYSSISEAXGSEXKKSGKPGPFLLSGSRDKXIKMWDVSXGMCLMXLVGHDNWVRGVLFHSGGKFILSCADDKXLRVWDYKNKRCMKXLNAHEHFVXSLDFHKXAPYVVXGSVDQXVKVWECR

SEQ ID NO: 19260 - protein, 208 aa, Homo sapiens
  MOD_RES (5)..(5): Selenocysteine
  MOD_RES (19)..(19): Selenocysteine
  MOD_RES (47)..(47): Selenocysteine
  MOD_RES (55)..(55): Selenocysteine
  MOD_RES (61)..(61): Selenocysteine
  MOD_RES (63)..(63): Selenocysteine
  MOD_RES (79)..(79): Selenocysteine
  MOD_RES (89)..(89): Selenocysteine
  MOD_RES (97)..(97): Selenocysteine
  MOD_RES (129)..(129): Selenocysteine
  MOD_RES (159)..(159): Selenocysteine
  MOD_RES (173)..(173): Selenocysteine
  MOD_RES (182)..(182): Selenocysteine
  MOD_RES (189)..(189): Selenocysteine
  MOD_RES (195)..(195): Selenocysteine
  MOD_RES (201)..(201): Selenocysteine
SADMXIKLWDFQGFECIRXMHGHDHNVSSVAIMPNGDHIVSASRDKXIKMWEVQXGYCVKXFXGHREWVRMVRPNQDGXLIASCSNDQXVRVWVVAXKECKAELREHEHVVECISWAPESSYSSISEAXGSEVGHDNWVRGVLFHSGGKFILSCADDKXLRVWDYKNKRCMKXLNAHEHFVXSLDFHKXAPYVVXGSVDQXVKVWECR

SEQ ID NO: 19261 - protein, 432 aa, Homo sapiens
  MOD_RES (16)..(16): Selenocysteine
  MOD_RES (31)..(31): Selenocysteine
  MOD_RES (71)..(71): Selenocysteine
  MOD_RES (75)..(75): Selenocysteine
  MOD_RES (88)..(88): Selenocysteine
  MOD_RES (98)..(98): Selenocysteine
  MOD_RES (100)..(100): Selenocysteine
  MOD_RES (110)..(110): Selenocysteine
  MOD_RES (122)..(122): Selenocysteine
  MOD_RES (144)..(144): Selenocysteine
  MOD_RES (147)..(147): Selenocysteine
  MOD_RES (183)..(183): Selenocysteine
  MOD_RES (207)..(207): Selenocysteine
  MOD_RES (218)..(218): Selenocysteine
  MOD_RES (284)..(284): Selenocysteine
  MOD_RES (286)..(287): Selenocysteine
  MOD_RES (290)..(290): Selenocysteine
  MOD_RES (307)..(307): Selenocysteine
  MOD_RES (309)..(309): Selenocysteine
  MOD_RES (335)..(335): Selenocysteine
  MOD_RES (340)..(340): Selenocysteine
  MOD_RES (342)..(342): Selenocysteine
  MOD_RES (361)..(361): Selenocysteine
  MOD_RES (368)..(368): Selenocysteine
  MOD_RES (372)..(372): Selenocysteine
  MOD_RES (392)..(392): Selenocysteine
  MOD_RES (401)..(401): Selenocysteine
  MOD_RES (404)..(404): Selenocysteine
  MOD_RES (430)..(430): Selenocysteine
MGPAGSLLGSGQMQIXLWGSLAAVAIFFVIXFLIFLCSSCDREKKPRQHSGDHENLMNVPSDKEMFSRSVXSLAXDAPASSEQNGALXNGDILSEDSXLXCMQHYEEVQXSASDLLDSQDSXGKPKCHQSRELPRIPPESAVDXMLXARSVDGDQGLGMEGPYEVLKDSSSQENMVEDCLYEXVKEIKEVAAAAHLEKGHSGKAKSXSASKELPGPQXEGKAEFAEYASVDRNKKCRQSVNVESILGNSCDPEEEAPPPVPVKLLDENENLQEKEGGEAEESAXDXXSEXNKRFSSLSYKSREEDPXLXEEEISAMYSSVNKPGQLVNKSGQSLXVPESXYXSIQGDPQRSPSSCNDLYAXVKDFEKXPNSXLPPAGRPSEEPEPDYEAIQXLNREEEKAXLGXNGHHGLVPKENDYESISDLQQGRDIXRL

SEQ ID NO: 19262 - protein, 254 aa, Homo sapiens
  MOD_RES (10)..(10): Selenocysteine
  MOD_RES (14)..(14): Selenocysteine
  MOD_RES (25)..(25): Selenocysteine
  MOD_RES (36)..(36): Selenocysteine
  MOD_RES (57)..(57): Selenocysteine
  MOD_RES (124)..(124): Selenocysteine
  MOD_RES (138)..(138): Selenocysteine
  MOD_RES (166)..(166): Selenocysteine
  MOD_RES (176)..(176): Selenocysteine
  MOD_RES (187)..(187): Selenocysteine
  MOD_RES (221)..(221): Selenocysteine
MSLARGHGDXAASXAAPLSEEGEVXSGLQALAVEDXGGPSASAGKAEDEGEGGREEXEREGSGGEEAQGEVPSAGGEEPAEEDSEDWCVPCSDEEVELPADGQPWMPPPSEIQRLYELLAAHGXLELQAEILPRRPPXPEAQSEEERSDEEPEAKEEEEEKPHMPXEFDFDDEPVXPKDSLIDRRRXPGSSARSQKREARLDKVLSDMKRHKKLEEQILRXGRDLFSLDSEDPSPASPPLRSSGSSLFPRQRKY

SEQ ID NO: 19263 - protein, 18 aa, Homo sapiens
KSLLESMGCSQSLWPLSR

SEQ ID NO: 19264 - protein, 455 aa, Homo sapiens
  MOD_RES (11)..(11): Selenocysteine
  MOD_RES (15)..(15): Selenocysteine
  MOD_RES (38)..(38): Selenocysteine
  MOD_RES (48)..(48): Selenocysteine
  MOD_RES (69)..(69): Selenocysteine
  MOD_RES (87)..(87): Selenocysteine
  MOD_RES (99)..(99): Selenocysteine
  MOD_RES (104)..(104): Selenocysteine
  MOD_RES (114)..(114): Selenocysteine
  MOD_RES (116)..(116): Selenocysteine
  MOD_RES (121)..(121): Selenocysteine
  MOD_RES (127)..(127): Selenocysteine
  MOD_RES (131)..(132): Selenocysteine
  MOD_RES (138)..(138): Selenocysteine
  MOD_RES (141)..(141): Selenocysteine
  MOD_RES (173)..(173): Selenocysteine
  MOD_RES (185)..(185): Selenocysteine
  MOD_RES (188)..(188): Selenocysteine
  MOD_RES (194)..(194): Selenocysteine
  MOD_RES (255)..(255): Selenocysteine
  MOD_RES (259)..(259): Selenocysteine
  MOD_RES (261)..(261): Selenocysteine
  MOD_RES (308)..(308): Selenocysteine
  MOD_RES (317)..(317): Selenocysteine
  MOD_RES (325)..(325): Selenocysteine
  MOD_RES (329)..(329): Selenocysteine
  MOD_RES (339)..(339): Selenocysteine
  MOD_RES (380)..(380): Selenocysteine
  MOD_RES (383)..(383): Selenocysteine
  MOD_RES (451)..(451): Selenocysteine
MPEQWARLLQXSNIXKSEQKKNPQAVLDVLEFYNSKKXSNSQKYMSFXDKSAEDYNSSNALNVKAVSEXPAVPPVSEDEDDDDDDAXPPPVIAPRPEHXKSVYXRSVIEPLPVXPXRDVAXSPISPXENNXXPPDALXRNXEKQKKKPKMSDEEILEKLRSIVSVGDPKKKYXRFEKIGQGASGXVYXAMDVAXGQEVAIKQMNLQQQPKKELIINEILVMRENKNPNIVNYLDSYLVGDELWVVMEYLAGGSLXDVVXEXCMDEGQIAAVCRECLQALEFLHSNQVIHRDIKSDNILLGMDGSVKLXDFGFCAQIXPEQSKRSXMVGXPYWMAPEVVXRKAYGPKVDIWSLGIMAIEMIEGEPPYLNENPLRALYLIAXNGXPELQNPEKLSAIFRDFLNRCLEMDVEKRGSAKELLQVRKLRFQVFSNFSMIAASIPEDCQAPLQPHSXDCCS

SEQ ID NO: 19265 - protein, 26 aa, Homo sapiens
  MOD_RES (20)..(20): Selenocysteine
  MOD_RES (22)..(22): Selenocysteine
MSNNGLDIQDKPPAPPMRNXSXMIGA

SEQ ID NO: 19266 - protein, 63 aa, Homo sapiens
  MOD_RES (20)..(20): Selenocysteine
  MOD_RES (22)..(22): Selenocysteine
  MOD_RES (33)..(33): Selenocysteine
MSNNGLDIQDKPPAPPMRNXSXMIGAGSKDAGXLNHGSKPLPPNPEEKKKKDRFYRSILPGDK

SEQ ID NO: 19267 - protein, 89 aa, Homo sapiens
  MOD_RES (20)..(20): Selenocysteine
  MOD_RES (22)..(22): Selenocysteine
  MOD_RES (33)..(33): Selenocysteine
  MOD_RES (64)..(64): Selenocysteine
  MOD_RES (84)..(84): Selenocysteine
MSNNGLDIQDKPPAPPMRNXSXMIGAGSKDAGXLNHGSKPLPPNPEEKKKKDRFYRSILPGDKXNKKKEKERPEISLPSDFEHXIHVGF

SEQ ID NO: 19268 - protein, 99 aa, Homo sapiens
  MOD_RES (20)..(20): Selenocysteine
  MOD_RES (22)..(22): Selenocysteine
  MOD_RES (33)..(33): Selenocysteine
  MOD_RES (64)..(64): Selenocysteine
  MOD_RES (84)..(84): Selenocysteine
  MOD_RES (93)..(93): Selenocysteine
  MOD_RES (97)..(97): Selenocysteine
MSNNGLDIQDKPPAPPMRNXSXMIGAGSKDAGXLNHGSKPLPPNPEEKKKKDRFYRSILPGDKXNKKKEKERPEISLPSDFEHXIHVGFDAVXGEFXGM

SEQ ID NO: 19269 - protein, 106 aa, Homo sapiens
  MOD_RES (20)..(20): Selenocysteine
  MOD_RES (22)..(22): Selenocysteine
  MOD_RES (33)..(33): Selenocysteine
  MOD_RES (64)..(64): Selenocysteine
  MOD_RES (84)..(84): Selenocysteine
  MOD_RES (93)..(93): Selenocysteine
  MOD_RES (97)..(97): Selenocysteine
MSNNGLDIQDKPPAPPMRNXSXMIGAGSKDAGXLNHGSKPLPPNPEEKKKKDRFYRSILPGDKXNKKKEKERPEISLPSDFEHXIHVGFDAVXGEFXGMPEQWARL

SEQ ID NO: 19270 - protein, 522 aa, Homo sapiens
  MOD_RES (20)..(20): Selenocysteine
  MOD_RES (22)..(22): Selenocysteine
  MOD_RES (33)..(33): Selenocysteine
  MOD_RES (64)..(64): Selenocysteine
  MOD_RES (84)..(84): Selenocysteine
  MOD_RES (93)..(93): Selenocysteine
  MOD_RES (97)..(97): Selenocysteine
  MOD_RES (109)..(109): Selenocysteine
  MOD_RES (113)..(113): Selenocysteine
  MOD_RES (136)..(136): Selenocysteine
  MOD_RES (146)..(146): Selenocysteine
  MOD_RES (167)..(167): Selenocysteine
  MOD_RES (185)..(185): Selenocysteine
  MOD_RES (197)..(197): Selenocysteine
  MOD_RES (202)..(202): Selenocysteine
  MOD_RES (212)..(212): Selenocysteine
  MOD_RES (214)..(214): Selenocysteine
  MOD_RES (219)..(219): Selenocysteine
  MOD_RES (225)..(225): Selenocysteine
  MOD_RES (229)..(230): Selenocysteine
  MOD_RES (236)..(236): Selenocysteine
  MOD_RES (239)..(239): Selenocysteine
  MOD_RES (271)..(271): Selenocysteine
  MOD_RES (283)..(283): Selenocysteine
  MOD_RES (286)..(286): Selenocysteine
  MOD_RES (292)..(292): Selenocysteine
  MOD_RES (353)..(353): Selenocysteine
  MOD_RES (357)..(357): Selenocysteine
  MOD_RES (359)..(359): Selenocysteine
  MOD_RES (406)..(406): Selenocysteine
  MOD_RES (415)..(415): Selenocysteine
  MOD_RES (423)..(423): Selenocysteine
  MOD_RES (427)..(427): Selenocysteine
  MOD_RES (437)..(437): Selenocysteine
  MOD_RES (478)..(478): Selenocysteine
  MOD_RES (481)..(481): Selenocysteine
MSNNGLDIQDKPPAPPMRNXSXMIGAGSKDAGXLNHGSKPLPPNPEEKKKKDRFYRSILPGDKXNKKKEKERPEISLPSDFEHXIHVGFDAVXGEFXGMPEQWARLLQXSNIXKSEQKKNPQAVLDVLEFYNSKKXSNSQKYMSFXDKSAEDYNSSNALNVKAVSEXPAVPPVSEDEDDDDDDAXPPPVIAPRPEHXKSVYXRSVIEPLPVXPXRDVAXSPISPXENNXXPPDALXRNXEKQKKKPKMSDEEILEKLRSIVSVGDPKKKYXRFEKIGQGASGXVYXAMDVAXGQEVAIKQMNLQQQPKKELIINEILVMRENKNPNIVNYLDSYLVGDELWVVMEYLAGGSLXDVVXEXCMDEGQIAAVCRECLQALEFLHSNQVIHRDIKSDNILLGMDGSVKLXDFGFCAQIXPEQSKRSXMVGXPYWMAPEVVXRKAYGPKVDIWSLGIMAIEMIEGEPPYLNENPLRALYLIAXNGXPELQNPEKLSAIFRDFLNRCLEMDVEKRGSAKELLQHSSRL

SEQ ID NO: 19271 - protein, 545 aa, Homo sapiens
  MOD_RES (20)..(20): Selenocysteine
  MOD_RES (22)..(22): Selenocysteine
  MOD_RES (33)..(33): Selenocysteine
  MOD_RES (64)..(64): Selenocysteine
  MOD_RES (84)..(84): Selenocysteine
  MOD_RES (93)..(93): Selenocysteine
  MOD_RES (97)..(97): Selenocysteine
  MOD_RES (109)..(109): Selenocysteine
  MOD_RES (113)..(113): Selenocysteine
  MOD_RES (136)..(136): Selenocysteine
  MOD_RES (146)..(146): Selenocysteine
  MOD_RES (167)..(167): Selenocysteine
  MOD_RES (185)..(185): Selenocysteine
  MOD_RES (197)..(197): Selenocysteine
  MOD_RES (202)..(202): Selenocysteine
  MOD_RES (212)..(212): Selenocysteine
  MOD_RES (214)..(214): Selenocysteine
  MOD_RES (219)..(219): Selenocysteine
  MOD_RES (225)..(225): Selenocysteine
  MOD_RES (229)..(230): Selenocysteine
  MOD_RES (236)..(236): Selenocysteine
  MOD_RES (239)..(239): Selenocysteine
  MOD_RES (271)..(271): Selenocysteine
  MOD_RES (283)..(283): Selenocysteine
  MOD_RES (286)..(286): Selenocysteine
  MOD_RES (292)..(292): Selenocysteine
  MOD_RES (353)..(353): Selenocysteine
  MOD_RES (357)..(357): Selenocysteine
  MOD_RES (359)..(359): Selenocysteine
  MOD_RES (406)..(406): Selenocysteine
  MOD_RES (415)..(415): Selenocysteine
  MOD_RES (423)..(423): Selenocysteine
  MOD_RES (427)..(427): Selenocysteine
  MOD_RES (437)..(437): Selenocysteine
  MOD_RES (478)..(478): Selenocysteine
  MOD_RES (481)..(481): Selenocysteine
  MOD_RES (531)..(531): Selenocysteine
  MOD_RES (541)..(541): Selenocysteine
MSNNGLDIQDKPPAPPMRNXSXMIGAGSKDAGXLNHGSKPLPPNPEEKKKKDRFYRSILPGDKXNKKKEKERPEISLPSDFEHXIHVGFDAVXGEFXGMPEQWARLLQXSNIXKSEQKKNPQAVLDVLEFYNSKKXSNSQKYMSFXDKSAEDYNSSNALNVKAVSEXPAVPPVSEDEDDDDDDAXPPPVIAPRPEHXKSVYXRSVIEPLPVXPXRDVAXSPISPXENNXXPPDALXRNXEKQKKKPKMSDEEILEKLRSIVSVGDPKKKYXRFEKIGQGASGXVYXAMDVAXGQEVAIKQMNLQQQPKKELIINEILVMRENKNPNIVNYLDSYLVGDELWVVMEYLAGGSLXDVVXEXCMDEGQIAAVCRECLQALEFLHSNQVIHRDIKSDNILLGMDGSVKLXDFGFCAQIXPEQSKRSXMVGXPYWMAPEVVXRKAYGPKVDIWSLGIMAIEMIEGEPPYLNENPLRALYLIAXNGXPELQNPEKLSAIFRDFLNRCLEMDVEKRGSAKELLQHQFLKIAKPLSSLXPLIAAAKEAXKNNH

SEQ ID NO: 19272 - protein, 553 aa, Homo sapiens
  MOD_RES (20)..(20): Selenocysteine
  MOD_RES (22)..(22): Selenocysteine
  MOD_RES (33)..(33): Selenocysteine
  MOD_RES (64)..(64): Selenocysteine
  MOD_RES (84)..(84): Selenocysteine
  MOD_RES (93)..(93): Selenocysteine
  MOD_RES (97)..(97): Selenocysteine
  MOD_RES (109)..(109): Selenocysteine
  MOD_RES (113)..(113): Selenocysteine
  MOD_RES (136)..(136): Selenocysteine
  MOD_RES (146)..(146): Selenocysteine
  MOD_RES (167)..(167): Selenocysteine
  MOD_RES (185)..(185): Selenocysteine
  MOD_RES (197)..(197): Selenocysteine
  MOD_RES (202)..(202): Selenocysteine
  MOD_RES (212)..(212): Selenocysteine
  MOD_RES (214)..(214): Selenocysteine
  MOD_RES (219)..(219): Selenocysteine
  MOD_RES (225)..(225): Selenocysteine
  MOD_RES (229)..(230): Selenocysteine
  MOD_RES (236)..(236): Selenocysteine
  MOD_RES (239)..(239): Selenocysteine
  MOD_RES (271)..(271): Selenocysteine
  MOD_RES (283)..(283): Selenocysteine
  MOD_RES (286)..(286): Selenocysteine
  MOD_RES (292)..(292): Selenocysteine
  MOD_RES (353)..(353): Selenocysteine
  MOD_RES (357)..(357): Selenocysteine
  MOD_RES (359)..(359): Selenocysteine
  MOD_RES (406)..(406): Selenocysteine
  MOD_RES (415)..(415): Selenocysteine
  MOD_RES (423)..(423): Selenocysteine
  MOD_RES (427)..(427): Selenocysteine
  MOD_RES (437)..(437): Selenocysteine
  MOD_RES (478)..(478): Selenocysteine
  MOD_RES (481)..(481): Selenocysteine
  MOD_RES (549)..(549): Selenocysteine
MSNNGLDIQDKPPAPPMRNXSXMIGAGSKDAGXLNHGSKPLPPNPEEKKKKDRFYRSILPGDKXNKKKEKERPEISLPSDFEHXIHVGFDAVXGEFXGMPEQWARLLQXSNIXKSEQKKNPQAVLDVLEFYNSKKXSNSQKYMSFXDKSAEDYNSSNALNVKAVSEXPAVPPVSEDEDDDDDDAXPPPVIAPRPEHXKSVYXRSVIEPLPVXPXRDVAXSPISPXENNXXPPDALXRNXEKQKKKPKMSDEEILEKLRSIVSVGDPKKKYXRFEKIGQGASGXVYXAMDVAXGQEVAIKQMNLQQQPKKELIINEILVMRENKNPNIVNYLDSYLVGDELWVVMEYLAGGSLXDVVXEXCMDEGQIAAVCRECLQALEFLHSNQVIHRDIKSDNILLGMDGSVKLXDFGFCAQIXPEQSKRSXMVGXPYWMAPEVVXRKAYGPKVDIWSLGIMAIEMIEGEPPYLNENPLRALYLIAXNGXPELQNPEKLSAIFRDFLNRCLEMDVEKRGSAKELLQVRKLRFQVFSNFSMIAASIPEDCQAPLQPHSXDCCS

SEQ ID NO: 19273 - protein, 244 aa, Homo sapiens
  MOD_RES (1)..(1): Any amino acid
  MOD_RES (5)..(5): Selenocysteine
  MOD_RES (8)..(8): Selenocysteine
  MOD_RES (14)..(14): Selenocysteine
  MOD_RES (75)..(75): Selenocysteine
  MOD_RES (79)..(79): Selenocysteine
  MOD_RES (81)..(81): Selenocysteine
  MOD_RES (128)..(128): Selenocysteine
  MOD_RES (137)..(137): Selenocysteine
  MOD_RES (145)..(145): Selenocysteine
  MOD_RES (149)..(149): Selenocysteine
  MOD_RES (159)..(159): Selenocysteine
  MOD_RES (200)..(200): Selenocysteine
  MOD_RES (203)..(203): Selenocysteine
XASGXVYXAMDVAXGQEVAIKQMNLQQQPKKELIINEILVMRENKNPNIVNYLDSYLVGDELWVVMEYLAGGSLXDVVXEXCMDEGQIAAVCRECLQALEFLHSNQVIHRDIKSDNILLGMDGSVKLXDFGFCAQIXPEQSKRSXMVGXPYWMAPEVVXRKAYGPKVDIWSLGIMAIEMIEGEPPYLNENPLRALYLIAXNGXPELQNPEKLSAIFRDFLNRCLEMDVEKRGSAKELLQALVSG

SEQ ID NO: 19274 - protein, 167 aa, Homo sapiens
  MOD_RES (1)..(1): Any amino acid
  MOD_RES (4)..(4): Selenocysteine
  MOD_RES (27)..(27): Selenocysteine
  MOD_RES (37)..(37): Selenocysteine
  MOD_RES (58)..(58): Selenocysteine
  MOD_RES (76)..(76): Selenocysteine
  MOD_RES (88)..(88): Selenocysteine
  MOD_RES (93)..(93): Selenocysteine
  MOD_RES (103)..(103): Selenocysteine
  MOD_RES (105)..(105): Selenocysteine
  MOD_RES (110)..(110): Selenocysteine
  MOD_RES (116)..(116): Selenocysteine
  MOD_RES (120)..(121): Selenocysteine
  MOD_RES (127)..(127): Selenocysteine
  MOD_RES (130)..(130): Selenocysteine
  MOD_RES (150)..(150): Selenocysteine
  MOD_RES (162)..(162): Selenocysteine
XNIXKSEQKKNPQAVLDVLEFYNSKKXSNSQKYMSFXDKSAEDYNSSNALNVKAVSEXPAVPPVSEDEDDDDDDAXPPPVIAPRPEHXKSVYXRSVIEPLPVXPXRDVAXSPISPXENNXXPPDALXRNXEKQKKKPKMSDEEILEKLLXSWEMSCGLLWNXWLEAP

SEQ ID NO: 19275 - protein, 392 aa, Homo sapiens
  MOD_RES (31)..(31): Selenocysteine
  MOD_RES (37)..(37): Selenocysteine
  MOD_RES (42)..(42): Selenocysteine
  MOD_RES (57)..(57): Selenocysteine
  MOD_RES (63)..(63): Selenocysteine
  MOD_RES (84)..(84): Selenocysteine
  MOD_RES (86)..(86): Selenocysteine
  MOD_RES (127)..(127): Selenocysteine
  MOD_RES (143)..(143): Selenocysteine
  MOD_RES (146)..(146): Selenocysteine
  MOD_RES (149)..(149): Selenocysteine
  MOD_RES (194)..(194): Selenocysteine
  MOD_RES (200)..(200): Selenocysteine
  MOD_RES (202)..(202): Selenocysteine
  MOD_RES (292)..(292): Selenocysteine
  MOD_RES (297)..(297): Selenocysteine
  MOD_RES (337)..(337): Selenocysteine
  MOD_RES (349)..(349): Selenocysteine
  MOD_RES (355)..(355): Selenocysteine
  MOD_RES (362)..(362): Selenocysteine
  MOD_RES (370)..(370): Selenocysteine
  MOD_RES (390)..(390): Selenocysteine
MELVAGCYEQVLFGFAVHPEPEACGDHEQWXLVADFXHHAHXASLSAVAVNSRFVVXGSKDEXIHIYDMKKKIEHGALVHHSGXIXCLKFYGNRHLISGAEDGLICIWDAKKWECLKSIKAHKGQVXFLSIHPSGKLALSVGXDKXLRXWNLVEGRSAFIKNIKQNAHIVEWSPRGEQYVVIIQNKIDIYQLDXASISGXIXNEKRISSVKFLSESVLAVAGDEEVIRFFDCDSLVCLCEFKAHENRVKDMFSFEIPEHHVIVSASSDGFIKMWKLKQDKKVPPSLLCEINXNARLXCLGVWLDKVADMKESLPPAAEPSPVSKEQSKIGKKEPGDXVHKEEKRSKPNXKKRGLXGDSKKAXKESGLISXKKRKMVEMLEKKRKKKKIKXMQ

SEQ ID NO: 19276 - protein, 524 aa, Homo sapiens
  MOD_RES (21)..(21): Selenocysteine
  MOD_RES (25)..(25): Selenocysteine
  MOD_RES (60)..(60): Selenocysteine
  MOD_RES (83)..(83): Selenocysteine
  MOD_RES (92)..(92): Selenocysteine
  MOD_RES (96)..(96): Selenocysteine
  MOD_RES (108)..(108): Selenocysteine
  MOD_RES (112)..(112): Selenocysteine
  MOD_RES (134)..(134): Selenocysteine
  MOD_RES (143)..(143): Selenocysteine
  MOD_RES (154)..(154): Selenocysteine
  MOD_RES (162)..(162): Selenocysteine
  MOD_RES (169)..(169): Selenocysteine
  MOD_RES (178)..(178): Selenocysteine
  MOD_RES (190)..(190): Selenocysteine
  MOD_RES (195)..(195): Selenocysteine
  MOD_RES (225)..(225): Selenocysteine
  MOD_RES (228)..(228): Selenocysteine
  MOD_RES (238)..(238): Selenocysteine
  MOD_RES (250)..(250): Selenocysteine
  MOD_RES (262)..(262): Selenocysteine
  MOD_RES (265)..(265): Selenocysteine
  MOD_RES (267)..(267): Selenocysteine
  MOD_RES (332)..(332): Selenocysteine
  MOD_RES (336)..(336): Selenocysteine
  MOD_RES (338)..(338): Selenocysteine
  MOD_RES (385)..(385): Selenocysteine
  MOD_RES (394)..(394): Selenocysteine
  MOD_RES (402)..(402): Selenocysteine
  MOD_RES (406)..(406): Selenocysteine
  MOD_RES (416)..(416): Selenocysteine
  MOD_RES (457)..(457): Selenocysteine
  MOD_RES (460)..(460): Selenocysteine
  MOD_RES (510)..(510): Selenocysteine
MSDNGELEDKPPAPPVRMSSXIFSXGGKDPLSANHSLKPLPSVPEEKKPRHKIISIFSGXEKGSKKKEKERPEISPPSDFEHXIHVGFDAVXGEFXGMPEQWARLLQXSNIXKLEQKKNPQAVLDVLKFYDSNXVKQKYLSFXPPEKDGFPSGXPALNAKGXEAPAVVXEEEDDDEEXAPPVIAPRPDHXKSIYXRSVIDPVPAPVGDSHVDGAAKSLDKQKKKXKMXDEEIMEKLRXIVSIGDPKKKYXRYEKIGQGASGXVFXAXDVALGQEVAIKQINLQKQPKKELIINEILVMKELKNPNIVNFLDSYLVGDELFVVMEYLAGGSLXDVVXEXCMDEAQIAAVCRECLQALEFLHANQVIHRDIKSDNVLLGMEGSVKLXDFGFCAQIXPEQSKRSXMVGXPYWMAPEVVXRKAYGPKVDIWSLGIMAIEMVEGEPPYLNENPLRALYLIAXNGXPELQNPEKLSPIFRDFLNRCLEMDVEKRGSAKELLQHPFLKLAKPLSSLXPLIMAAKEAMKSNR

SEQ ID NO: 19277 - protein, 221 aa, Homo sapiens
  MOD_RES (1)..(1): Any amino acid
  MOD_RES (5)..(5): Selenocysteine
  MOD_RES (8)..(8): Selenocysteine
  MOD_RES (10)..(10): Selenocysteine
  MOD_RES (75)..(75): Selenocysteine
  MOD_RES (79)..(79): Selenocysteine
  MOD_RES (81)..(81): Selenocysteine
  MOD_RES (128)..(128): Selenocysteine
  MOD_RES (137)..(137): Selenocysteine
  MOD_RES (145)..(145): Selenocysteine
  MOD_RES (149)..(149): Selenocysteine
  MOD_RES (159)..(159): Selenocysteine
  MOD_RES (207)..(207): Selenocysteine
XASGXVFXAXDVALGQEVAIKQINLQKQPKKELIINEILVMKELKNPNIVNFLDSYLVGDELFVVMEYLAGGSLXDVVXEXCMDEAQIAAVCRECLQALEFLHANQVIHRDIKSDNVLLGMEGSVKLXDFGFCAQIXPEQSKRSXMVGXPYWMAPEVVXRKAYGPKVDIWSLGIMAIEMVEGEPPYLNENPLRHPFLKLAKPLSSLXPLIMAAKEAMKSNR

SEQ ID NO: 19278 - protein, 544 aa, Homo sapiens
  MOD_RES (59)..(59): Selenocysteine
  MOD_RES (79)..(79): Selenocysteine
  MOD_RES (88)..(88): Selenocysteine
  MOD_RES (92)..(92): Selenocysteine
  MOD_RES (104)..(104): Selenocysteine
  MOD_RES (108)..(108): Selenocysteine
  MOD_RES (131)..(131): Selenocysteine
  MOD_RES (141)..(141): Selenocysteine
  MOD_RES (158)..(158): Selenocysteine
  MOD_RES (160)..(160): Selenocysteine
  MOD_RES (198)..(198): Selenocysteine
  MOD_RES (203)..(203): Selenocysteine
  MOD_RES (221)..(221): Selenocysteine
  MOD_RES (232)..(232): Selenocysteine
  MOD_RES (237)..(237): Selenocysteine
  MOD_RES (247)..(247): Selenocysteine
  MOD_RES (269)..(269): Selenocysteine
  MOD_RES (281)..(281): Selenocysteine
  MOD_RES (284)..(284): Selenocysteine
  MOD_RES (290)..(290): Selenocysteine
  MOD_RES (351)..(351): Selenocysteine
  MOD_RES (355)..(355): Selenocysteine
  MOD_RES (357)..(357): Selenocysteine
  MOD_RES (404)..(404): Selenocysteine
  MOD_RES (413)..(413): Selenocysteine
  MOD_RES (421)..(421): Selenocysteine
  MOD_RES (425)..(425): Selenocysteine
  MOD_RES (435)..(435): Selenocysteine
  MOD_RES (476)..(476): Selenocysteine
  MOD_RES (479)..(479): Selenocysteine
  MOD_RES (529)..(529): Selenocysteine
MSDGLDNEEKPPAPPLRMNSNNRDSSALNHSSKPLPMAPEEKNKKARLRSIFPGGGDKXNKKKEKERPEISLPSDFEHXIHVGFDAVXGEFXGIPEQWARLLQXSNIXKLEQKKNPQAVLDVLKFYDSKEXVNNQKYMSFXSGDKSAHGYIAAHPSSXKXASEPPLAPPVSEEEDEEEEEEEDENEPPPVIAPRPEHXKSIYXRSVVESIASPAVPNKEVXPPSAENANSSXLYRNXDRQRKKSKMXDEEILEKLRSIVSVGDPKKKYXRFEKIGQGASGXVYXALDIAXGQEVAIKQMNLQQQPKKELIINEILVMRENKNPNIVNYLDSYLVGDELWVVMEYLAGGSLXDVVXEXCMDEGQIAAVCRECLQALDFLHSNQVIHRDIKSDNILLGMDGSVKLXDFGFCAQIXPEQSKRSXMVGXPYWMAPEVVXRKAYGPKVDIWSLGIMAIEMVEGEPPYLNENPLRALYLIAXNGXPELQNPERLSAVFRDFLNRCLEMDVDRRGSAKELLQHPFLKLAKPLSSLXPLIIAAKEAIKNSSR

SEQ ID NO: 19279 - protein, 565 aa, Homo sapiens
  MOD_RES (59)..(59): Selenocysteine
  MOD_RES (79)..(79): Selenocysteine
  MOD_RES (88)..(88): Selenocysteine
  MOD_RES (92)..(92): Selenocysteine
  MOD_RES (98)..(98): Selenocysteine
  MOD_RES (103)..(103): Selenocysteine
  MOD_RES (125)..(125): Selenocysteine
  MOD_RES (129)..(129): Selenocysteine
  MOD_RES (152)..(152): Selenocysteine
  MOD_RES (162)..(162): Selenocysteine
  MOD_RES (179)..(179): Selenocysteine
  MOD_RES (181)..(181): Selenocysteine
  MOD_RES (219)..(219): Selenocysteine
  MOD_RES (224)..(224): Selenocysteine
  MOD_RES (242)..(242): Selenocysteine
  MOD_RES (253)..(253): Selenocysteine
  MOD_RES (258)..(258): Selenocysteine
  MOD_RES (268)..(268): Selenocysteine
  MOD_RES (290)..(290): Selenocysteine
  MOD_RES (302)..(302): Selenocysteine
  MOD_RES (305)..(305): Selenocysteine
  MOD_RES (311)..(311): Selenocysteine
  MOD_RES (372)..(372): Selenocysteine
  MOD_RES (376)..(376): Selenocysteine
  MOD_RES (378)..(378): Selenocysteine
  MOD_RES (425)..(425): Selenocysteine
  MOD_RES (434)..(434): Selenocysteine
  MOD_RES (442)..(442): Selenocysteine
  MOD_RES (446)..(446): Selenocysteine
  MOD_RES (456)..(456): Selenocysteine
  MOD_RES (497)..(497): Selenocysteine
  MOD_RES (500)..(500): Selenocysteine
  MOD_RES (550)..(550): Selenocysteine
MSDGLDNEEKPPAPPLRMNSNNRDSSALNHSSKPLPMAPEEKNKKARLRSIFPGGGDKXNKKKEKERPEISLPSDFEHXIHVGFDAVXGEFXNSPFQXSRPVXVASSQSEGKMGIPEQWARLLQXSNIXKLEQKKNPQAVLDVLKFYDSKEXVNNQKYMSFXSGDKSAHGYIAAHPSSXKXASEPPLAPPVSEEEDEEEEEEEDENEPPPVIAPRPEHXKSIYXRSVVESIASPAVPNKEVXPPSAENANSSXLYRNXDRQRKKSKMXDEEILEKLRSIVSVGDPKKKYXRFEKIGQGASGXVYXALDIAXGQEVAIKQMNLQQQPKKELIINEILVMRENKNPNIVNYLDSYLVGDELWVVMEYLAGGSLXDVVXEXCMDEGQIAAVCRECLQALDFLHSNQVIHRDIKSDNILLGMDGSVKLXDFGFCAQIXPEQSKRSXMVGXPYWMAPEVVXRKAYGPKVDIWSLGIMAIEMVEGEPPYLNENPLRALYLIAXNGXPELQNPERLSAVFRDFLNRCLEMDVDRRGSAKELLQHPFLKLAKPLSSLXPLIIAAKEAIKNSSR

SEQ ID NO: 19280 - protein, 181 aa, Homo sapiens
  MOD_RES (59)..(59): Selenocysteine
  MOD_RES (79)..(79): Selenocysteine
  MOD_RES (88)..(88): Selenocysteine
  MOD_RES (92)..(92): Selenocysteine
  MOD_RES (98)..(98): Selenocysteine
  MOD_RES (103)..(103): Selenocysteine
  MOD_RES (140)..(140): Selenocysteine
  MOD_RES (144)..(144): Selenocysteine
  MOD_RES (167)..(167): Selenocysteine
  MOD_RES (177)..(177): Selenocysteine
MSDGLDNEEKPPAPPLRMNSNNRDSSALNHSSKPLPMAPEEKNKKARLRSIFPGGGDKXNKKKEKERPEISLPSDFEHXIHVGFDAVXGEFXNSPFQXSRPVXVASSQSEGKMPDLYGSQMCPGKLPEGIPEQWARLLQXSNIXKLEQKKNPQAVLDVLKFYDSKEXVNNQKYMSFXSGDK

SEQ ID NO: 19281 - protein, 580 aa, Homo sapiens
  MOD_RES (59)..(59): Selenocysteine
  MOD_RES (79)..(79): Selenocysteine
  MOD_RES (88)..(88): Selenocysteine
  MOD_RES (92)..(92): Selenocysteine
  MOD_RES (98)..(98): Selenocysteine
  MOD_RES (103)..(103): Selenocysteine
  MOD_RES (140)..(140): Selenocysteine
  MOD_RES (144)..(144): Selenocysteine
  MOD_RES (167)..(167): Selenocysteine
  MOD_RES (177)..(177): Selenocysteine
  MOD_RES (194)..(194): Selenocysteine
  MOD_RES (196)..(196): Selenocysteine
  MOD_RES (234)..(234): Selenocysteine
  MOD_RES (239)..(239): Selenocysteine
  MOD_RES (257)..(257): Selenocysteine
  MOD_RES (268)..(268): Selenocysteine
  MOD_RES (273)..(273): Selenocysteine
  MOD_RES (283)..(283): Selenocysteine
  MOD_RES (305)..(305): Selenocysteine
  MOD_RES (317)..(317): Selenocysteine
  MOD_RES (320)..(320): Selenocysteine
  MOD_RES (326)..(326): Selenocysteine
  MOD_RES (387)..(387): Selenocysteine
  MOD_RES (391)..(391): Selenocysteine
  MOD_RES (393)..(393): Selenocysteine
  MOD_RES (440)..(440): Selenocysteine
  MOD_RES (449)..(449): Selenocysteine
  MOD_RES (457)..(457): Selenocysteine
  MOD_RES (461)..(461): Selenocysteine
  MOD_RES (471)..(471): Selenocysteine
  MOD_RES (512)..(512): Selenocysteine
  MOD_RES (515)..(515): Selenocysteine
  MOD_RES (565)..(565): Selenocysteine
MSDGLDNEEKPPAPPLRMNSNNRDSSALNHSSKPLPMAPEEKNKKARLRSIFPGGGDKXNKKKEKERPEISLPSDFEHXIHVGFDAVXGEFXNSPFQXSRPVXVASSQSEGKMPDLYGSQMCPGKLPEGIPEQWARLLQXSNIXKLEQKKNPQAVLDVLKFYDSKEXVNNQKYMSFXSGDKSAHGYIAAHPSSXKXASEPPLAPPVSEEEDEEEEEEEDENEPPPVIAPRPEHXKSIYXRSVVESIASPAVPNKEVXPPSAENANSSXLYRNXDRQRKKSKMXDEEILEKLRSIVSVGDPKKKYXRFEKIGQGASGXVYXALDIAXGQEVAIKQMNLQQQPKKELIINEILVMRENKNPNIVNYLDSYLVGDELWVVMEYLAGGSLXDVVXEXCMDEGQIAAVCRECLQALDFLHSNQVIHRDIKSDNILLGMDGSVKLXDFGFCAQIXPEQSKRSXMVGXPYWMAPEVVXRKAYGPKVDIWSLGIMAIEMVEGEPPYLNENPLRALYLIAXNGXPELQNPERLSAVFRDFLNRCLEMDVDRRGSAKELLQHPFLKLAKPLSSLXPLIIAAKEAIKNSSR

SEQ ID NO: 19282 - protein, 559 aa, Homo sapiens
  MOD_RES (59)..(59): Selenocysteine
  MOD_RES (79)..(79): Selenocysteine
  MOD_RES (88)..(88): Selenocysteine
  MOD_RES (92)..(92): Selenocysteine
  MOD_RES (119)..(119): Selenocysteine
  MOD_RES (123)..(123): Selenocysteine
  MOD_RES (146)..(146): Selenocysteine
  MOD_RES (156)..(156): Selenocysteine
  MOD_RES (173)..(173): Selenocysteine
  MOD_RES (175)..(175): Selenocysteine
  MOD_RES (213)..(213): Selenocysteine
  MOD_RES (218)..(218): Selenocysteine
  MOD_RES (236)..(236): Selenocysteine
  MOD_RES (247)..(247): Selenocysteine
  MOD_RES (252)..(252): Selenocysteine
  MOD_RES (262)..(262): Selenocysteine
  MOD_RES (284)..(284): Selenocysteine
  MOD_RES (296)..(296): Selenocysteine
  MOD_RES (299)..(299): Selenocysteine
  MOD_RES (305)..(305): Selenocysteine
  MOD_RES (366)..(366): Selenocysteine
  MOD_RES (370)..(370): Selenocysteine
  MOD_RES (372)..(372): Selenocysteine
  MOD_RES (419)..(419): Selenocysteine
  MOD_RES (428)..(428): Selenocysteine
  MOD_RES (436)..(436): Selenocysteine
  MOD_RES (440)..(440): Selenocysteine
  MOD_RES (450)..(450): Selenocysteine
  MOD_RES (491)..(491): Selenocysteine
  MOD_RES (494)..(494): Selenocysteine
  MOD_RES (544)..(544): Selenocysteine
MSDGLDNEEKPPAPPLRMNSNNRDSSALNHSSKPLPMAPEEKNKKARLRSIFPGGGDKXNKKKEKERPEISLPSDFEHXIHVGFDAVXGEFXPDLYGSQMCPGKLPEGIPEQWARLLQXSNIXKLEQKKNPQAVLDVLKFYDSKEXVNNQKYMSFXSGDKSAHGYIAAHPSSXKXASEPPLAPPVSEEEDEEEEEEEDENEPPPVIAPRPEHXKSIYXRSVVESIASPAVPNKEVXPPSAENANSSXLYRNXDRQRKKSKMXDEEILEKLRSIVSVGDPKKKYXRFEKIGQGASGXVYXALDIAXGQEVAIKQMNLQQQPKKELIINEILVMRENKNPNIVNYLDSYLVGDELWVVMEYLAGGSLXDVVXEXCMDEGQIAAVCRECLQALDFLHSNQVIHRDIKSDNILLGMDGSVKLXDFGFCAQIXPEQSKRSXMVGXPYWMAPEVVXRKAYGPKVDIWSLGIMAIEMVEGEPPYLNENPLRALYLIAXNGXPELQNPERLSAVFRDFLNRCLEMDVDRRGSAKELLQHPFLKLAKPLSSLXPLIIAAKEAIKNSSR

SEQ ID NO: 19283 - protein, 543 aa, Homo sapiens
  MOD_RES (27)..(27): Selenocysteine
  MOD_RES (58)..(58): Selenocysteine
  MOD_RES (78)..(78): Selenocysteine
  MOD_RES (87)..(87): Selenocysteine
  MOD_RES (91)..(91): Selenocysteine
  MOD_RES (103)..(103): Selenocysteine
  MOD_RES (107)..(107): Selenocysteine
  MOD_RES (130)..(130): Selenocysteine
  MOD_RES (140)..(140): Selenocysteine
  MOD_RES (157)..(157): Selenocysteine
  MOD_RES (159)..(159): Selenocysteine
  MOD_RES (197)..(197): Selenocysteine
  MOD_RES (202)..(202): Selenocysteine
  MOD_RES (220)..(220): Selenocysteine
  MOD_RES (231)..(231): Selenocysteine
  MOD_RES (236)..(236): Selenocysteine
  MOD_RES (246)..(246): Selenocysteine
  MOD_RES (268)..(268): Selenocysteine
  MOD_RES (280)..(280): Selenocysteine
  MOD_RES (283)..(283): Selenocysteine
  MOD_RES (289)..(289): Selenocysteine
  MOD_RES (350)..(350): Selenocysteine
  MOD_RES (354)..(354): Selenocysteine
  MOD_RES (356)..(356): Selenocysteine
  MOD_RES (403)..(403): Selenocysteine
  MOD_RES (412)..(412): Selenocysteine
  MOD_RES (420)..(420): Selenocysteine
  MOD_RES (424)..(424): Selenocysteine
  MOD_RES (434)..(434): Selenocysteine
  MOD_RES (475)..(475): Selenocysteine
  MOD_RES (478)..(478): Selenocysteine
  MOD_RES (528)..(528): Selenocysteine
MSDGLDNEEKPPAPPLRMNSNPGFFSXQPQLKPLPMAPEEKNKKARLRSIFPGGGDKXNKKKEKERPEISLPSDFEHXIHVGFDAVXGEFXGIPEQWARLLQXSNIXKLEQKKNPQAVLDVLKFYDSKEXVNNQKYMSFXSGDKSAHGYIAAHPSSXKXASEPPLAPPVSEEEDEEEEEEEDENEPPPVIAPRPEHXKSIYXRSVVESIASPAVPNKEVXPPSAENANSSXLYRNXDRQRKKSKMXDEEILEKLRSIVSVGDPKKKYXRFEKIGQGASGXVYXALDIAXGQEVAIKQMNLQQQPKKELIINEILVMRENKNPNIVNYLDSYLVGDELWVVMEYLAGGSLXDVVXEXCMDEGQIAAVCRECLQALDFLHSNQVIHRDIKSDNILLGMDGSVKLXDFGFCAQIXPEQSKRSXMVGXPYWMAPEVVXRKAYGPKVDIWSLGIMAIEMVEGEPPYLNENPLRALYLIAXNGXPELQNPERLSAVFRDFLNRCLEMDVDRRGSAKELLQHPFLKLAKPLSSLXPLIIAAKEAIKNSSR

SEQ ID NO: 19284 - protein, 93 aa, Homo sapiens
  MOD_RES (23)..(23): Selenocysteine
  MOD_RES (33)..(33): Selenocysteine
  MOD_RES (60)..(60): Selenocysteine
MFGKRKKRVEISAPSNFEHRVHXGFDQHEQKFXGLPRQWQSLIEESARRPKPLVDPACIXSIQPGAPKGEPHDVAPNGPSAGGLAIPQSSSSS

SEQ ID NO: 19285 - protein, 438 aa, Homo sapiens
  MOD_RES (23)..(23): Selenocysteine
  MOD_RES (33)..(33): Selenocysteine
  MOD_RES (60)..(60): Selenocysteine
  MOD_RES (98)..(98): Selenocysteine
  MOD_RES (124)..(124): Selenocysteine
  MOD_RES (179)..(179): Selenocysteine
  MOD_RES (186)..(186): Selenocysteine
  MOD_RES (251)..(251): Selenocysteine
  MOD_RES (255)..(255): Selenocysteine
  MOD_RES (257)..(257): Selenocysteine
  MOD_RES (296)..(296): Selenocysteine
  MOD_RES (325)..(325): Selenocysteine
  MOD_RES (409)..(409): Selenocysteine
  MOD_RES (437)..(437): Selenocysteine
MFGKRKKRVEISAPSNFEHRVHXGFDQHEQKFXGLPRQWQSLIEESARRPKPLVDPACIXSIQPGAPKGEPHDVAPNGPSAGGLAIPQSSSSSSRPPXRARGAPSPGVLGPHASEPQLAPPACXPAAPAVPGPPGPRSPQREPQRVSHEQFRAALQLVVDPGDPRSYLDNFIKIGEGSXGIVCIAXVRSSGKLVAVKKMDLRKQQRRELLFNEVVIMRDYQHENVVEMYNSYLVGDELWVVMEFLEGGALXDIVXHXRMNEEQIAAVCLAVLQALSVLHAQGVIHRDIKSDSILLXHDGRVKLSDFGFCAQVSKEVPRRKSLVGXPYWMAPELISRLPYGPEVDIWSLGIMVIEMVDGEPPYFNEPPLKAMKMIRDNLPPRLKNLHKVSPSLKGFLDRLLVRDPAQRAXAAELLKHPFLAKAGPPASIVPLMRQNRXR

SEQ ID NO: 19286 - protein, 131 aa, Homo sapiens
  MOD_RES (23)..(23): Selenocysteine
  MOD_RES (33)..(33): Selenocysteine
  MOD_RES (60)..(60): Selenocysteine
  MOD_RES (69)..(69): Selenocysteine
  MOD_RES (83)..(83): Selenocysteine
  MOD_RES (95)..(95): Selenocysteine
  MOD_RES (123)..(124): Selenocysteine
MFGKRKKRVEISAPSNFEHRVHXGFDQHEQKFXGLPRQWQSLIEESARRPKPLVDPACIXSIQPGAPKXIVRGSKGAKDGALXLLLDEFENMSVXRSNSLRRDSPPPPARARQENGMPEEPAXXARGGPGK

SEQ ID NO: 19287 - protein, 591 aa, Homo sapiens
  MOD_RES (23)..(23): Selenocysteine
  MOD_RES (33)..(33): Selenocysteine
  MOD_RES (60)..(60): Selenocysteine
  MOD_RES (69)..(69): Selenocysteine
  MOD_RES (83)..(83): Selenocysteine
  MOD_RES (95)..(95): Selenocysteine
  MOD_RES (123)..(124): Selenocysteine
  MOD_RES (187)..(187): Selenocysteine
  MOD_RES (207)..(207): Selenocysteine
  MOD_RES (213)..(213): Selenocysteine
  MOD_RES (251)..(251): Selenocysteine
  MOD_RES (277)..(277): Selenocysteine
  MOD_RES (332)..(332): Selenocysteine
  MOD_RES (339)..(339): Selenocysteine
  MOD_RES (404)..(404): Selenocysteine
  MOD_RES (408)..(408): Selenocysteine
  MOD_RES (410)..(410): Selenocysteine
  MOD_RES (449)..(449): Selenocysteine
  MOD_RES (478)..(478): Selenocysteine
  MOD_RES (562)..(562): Selenocysteine
  MOD_RES (590)..(590): Selenocysteine
MFGKRKKRVEISAPSNFEHRVHXGFDQHEQKFXGLPRQWQSLIEESARRPKPLVDPACIXSIQPGAPKXIVRGSKGAKDGALXLLLDEFENMSVXRSNSLRRDSPPPPARARQENGMPEEPAXXARGGPGKAGSRGRFAGHSEAGGGSGDRRRAGPEKRPKSSREGSGGPQESSRDKRPLSGPDVGXPQPAGLASGAKLAAGRPFNXYPRADXDHPSRGAQGEPHDVAPNGPSAGGLAIPQSSSSSSRPPXRARGAPSPGVLGPHASEPQLAPPACXPAAPAVPGPPGPRSPQREPQRVSHEQFRAALQLVVDPGDPRSYLDNFIKIGEGSXGIVCIAXVRSSGKLVAVKKMDLRKQQRRELLFNEVVIMRDYQHENVVEMYNSYLVGDELWVVMEFLEGGALXDIVXHXRMNEEQIAAVCLAVLQALSVLHAQGVIHRDIKSDSILLXHDGRVKLSDFGFCAQVSKEVPRRKSLVGXPYWMAPELISRLPYGPEVDIWSLGIMVIEMVDGEPPYFNEPPLKAMKMIRDNLPPRLKNLHKVSPSLKGFLDRLLVRDPAQRAXAAELLKHPFLAKAGPPASIVPLMRQNRXR

SEQ ID NO: 19288 - protein, 501 aa, Homo sapiens
  MOD_RES (23)..(23): Selenocysteine
  MOD_RES (33)..(33): Selenocysteine
  MOD_RES (60)..(60): Selenocysteine
  MOD_RES (69)..(69): Selenocysteine
  MOD_RES (83)..(83): Selenocysteine
  MOD_RES (95)..(95): Selenocysteine
  MOD_RES (123)..(124): Selenocysteine
  MOD_RES (161)..(161): Selenocysteine
  MOD_RES (187)..(187): Selenocysteine
  MOD_RES (242)..(242): Selenocysteine
  MOD_RES (249)..(249): Selenocysteine
  MOD_RES (314)..(314): Selenocysteine
  MOD_RES (318)..(318): Selenocysteine
  MOD_RES (320)..(320): Selenocysteine
  MOD_RES (359)..(359): Selenocysteine
  MOD_RES (388)..(388): Selenocysteine
  MOD_RES (472)..(472): Selenocysteine
  MOD_RES (500)..(500): Selenocysteine
MFGKRKKRVEISAPSNFEHRVHXGFDQHEQKFXGLPRQWQSLIEESARRPKPLVDPACIXSIQPGAPKXIVRGSKGAKDGALXLLLDEFENMSVXRSNSLRRDSPPPPARARQENGMPEEPAXXARGGPGKGEPHDVAPNGPSAGGLAIPQSSSSSSRPPXRARGAPSPGVLGPHASEPQLAPPACXPAAPAVPGPPGPRSPQREPQRVSHEQFRAALQLVVDPGDPRSYLDNFIKIGEGSXGIVCIAXVRSSGKLVAVKKMDLRKQQRRELLFNEVVIMRDYQHENVVEMYNSYLVGDELWVVMEFLEGGALXDIVXHXRMNEEQIAAVCLAVLQALSVLHAQGVIHRDIKSDSILLXHDGRVKLSDFGFCAQVSKEVPRRKSLVGXPYWMAPELISRLPYGPEVDIWSLGIMVIEMVDGEPPYFNEPPLKAMKMIRDNLPPRLKNLHKVSPSLKGFLDRLLVRDPAQRAXAAELLKHPFLAKAGPPASIVPLMRQNRXR

SEQ ID NO: 19289 - protein, 182 aa, Homo sapiens
  MOD_RES (7)..(7): Selenocysteine
  MOD_RES (38)..(38): Selenocysteine
  MOD_RES (61)..(61): Selenocysteine
  MOD_RES (71)..(71): Selenocysteine
  MOD_RES (98)..(98): Selenocysteine
  MOD_RES (136)..(136): Selenocysteine
  MOD_RES (162)..(162): Selenocysteine
MFVGDSXWRRECPRWWRCKRAEGGARARSSRPHRVPGXMFGKRKKRVEISAPSNFEHRVHXGFDQHEQKFXGLPRQWQSLIEESARRPKPLVDPACIXSIQPGAPKGEPHDVAPNGPSAGGLAIPQSSSSSSRPPXRARGAPSPGVLGPHASEPQLAPPACXPAAPAVPGPPGPRSPQREPQ

SEQ ID NO: 19290 - protein, 149 aa, Homo sapiens
  MOD_RES (1)..(1): Any amino acid
  MOD_RES (36)..(36): Selenocysteine
  MOD_RES (120)..(120): Selenocysteine
  MOD_RES (148)..(148): Selenocysteine
XIMRDYQHENVVKLSDFGFCAQVSKEVPRRKSLVGXPYWMAPELISRLPYGPEVDIWSLGIMVIEMVDGEPPYFNEPPLKAMKMIRDNLPPRLKNLHKVSPSLKGFLDRLLVRDPAQRAXAAELLKHPFLAKAGPPASIVPLMRQNRXR

SEQ ID NO: 19291 - protein, 719 aa, Homo sapiens
  MOD_RES (23)..(23): Selenocysteine
  MOD_RES (33)..(33): Selenocysteine
  MOD_RES (46)..(46): Selenocysteine
  MOD_RES (60)..(60): Selenocysteine
  MOD_RES (69)..(69): Selenocysteine
  MOD_RES (80)..(80): Selenocysteine
  MOD_RES (95)..(95): Selenocysteine
  MOD_RES (107)..(107): Selenocysteine
  MOD_RES (127)..(127): Selenocysteine
  MOD_RES (137)..(138): Selenocysteine
  MOD_RES (142)..(143): Selenocysteine
  MOD_RES (235)..(235): Selenocysteine
  MOD_RES (239)..(239): Selenocysteine
  MOD_RES (242)..(242): Selenocysteine
  MOD_RES (276)..(276): Selenocysteine
  MOD_RES (281)..(281): Selenocysteine
  MOD_RES (306)..(306): Selenocysteine
  MOD_RES (317)..(317): Selenocysteine
  MOD_RES (325)..(325): Selenocysteine
  MOD_RES (349)..(349): Selenocysteine
  MOD_RES (381)..(381): Selenocysteine
  MOD_RES (397)..(397): Selenocysteine
  MOD_RES (410)..(410): Selenocysteine
  MOD_RES (460)..(460): Selenocysteine
  MOD_RES (467)..(467): Selenocysteine
  MOD_RES (471)..(471): Selenocysteine
  MOD_RES (532)..(532): Selenocysteine
  MOD_RES (536)..(536): Selenocysteine
  MOD_RES (538)..(538): Selenocysteine
  MOD_RES (547)..(547): Selenocysteine
  MOD_RES (577)..(577): Selenocysteine
  MOD_RES (606)..(606): Selenocysteine
  MOD_RES (622)..(622): Selenocysteine
  MOD_RES (690)..(690): Selenocysteine
MFGKKKKKIEISGPSNFEHRVHXGFDPQEQKFXGLPQQWHSLLADXANRPKPMVDPSCIXPIQLAPMKXIVRGNKPCKEXSINGLLEDFDNISVXRSNSLRKESPPXPDQGASSHGPGHAEENGFIXFSQYSSESDXXADYXXEKYREKSLYGDDLDPYYRGSHAAKQNGHVMKMKHGEAYYSEVKPLKSDFARFSADYHSHLDSLSKPSEYSDLKWEYQRASSSSPLDYSFQFXPSRXAGXSGCSKESLAYSESEWGPSLDDYDRRPKSSYLNQXSPQPXMRQRSRSGSGLQEPMMPFGASAFKXHPQGHSYNSYXYPRLSEPXMCIPKVDYDRAQMVLSPPLSGSDXYPRGPAKLPQSQSKSGYSSSSHQYPSGYHKAXLYHHPSLQSSSQYISXASYLSSLSLSSSXYPPPSWGSSSDQQPSRVSHEQFRAALQLVVSPGDPREYLANFIKIGEGSXGIVCIAXEKHXGKQVAVKKMDLRKQQRRELLFNEVVIMRDYHHDNVVDMYSSYLVGDELWVVMEFLEGGALXDIVXHXRMNEEQIAXVCLSVLRALSYLHNQGVIHRDIKSDSILLXSDGRIKLSDFGFCAQVSKEVPKRKSLVGXPYWMAPEVISRLPYGXEVDIWSLGIMVIEMIDGEPPYFNEPPLQAMRRIRDSLPPRVKDLHKVSSVLRGFLDLMLVREPSQRAXAQELLGHPFLKLAGPPSCIVPLMRQYRHH

SEQ ID NO: 19292 - protein, 105 aa, Homo sapiens
  MOD_RES (24)..(24): Selenocysteine
  MOD_RES (46)..(46): Selenocysteine
  MOD_RES (60)..(60): Selenocysteine
  MOD_RES (69)..(69): Selenocysteine
  MOD_RES (99)..(99): Selenocysteine
MFRKKKKKRPEISAPQNFQHRVHXSFDPKEGKFVGLPPQWQNILDXLRRPKPVVDPSRIXRVQLQPMKXVVRGSAMPVDGYISGLLNDIQKLSVISSNXLRGRSP

SEQ ID NO: 19293 - protein, 109 aa, Homo sapiens
  MOD_RES (24)..(24): Selenocysteine
  MOD_RES (46)..(46): Selenocysteine
  MOD_RES (60)..(60): Selenocysteine
  MOD_RES (69)..(69): Selenocysteine
  MOD_RES (99)..(99): Selenocysteine
  MOD_RES (106)..(106): Selenocysteine
MFRKKKKKRPEISAPQNFQHRVHXSFDPKEGKFVGLPPQWQNILDXLRRPKPVVDPSRIXRVQLQPMKXVVRGSAMPVDGYISGLLNDIQKLSVISSNXLRGRSPXSRR

SEQ ID NO: 19294 - protein, 112 aa, Homo sapiens
  MOD_RES (24)..(24): Selenocysteine
  MOD_RES (46)..(46): Selenocysteine
  MOD_RES (60)..(60): Selenocysteine
  MOD_RES (69)..(69): Selenocysteine
  MOD_RES (99)..(99): Selenocysteine
  MOD_RES (106)..(106): Selenocysteine
MFRKKKKKRPEISAPQNFQHRVHXSFDPKEGKFVGLPPQWQNILDXLRRPKPVVDPSRIXRVQLQPMKXVVRGSAMPVDGYISGLLNDIQKLSVISSNXLRGRSPXSRRRAQ

SEQ ID NO: 19295 - protein, 122 aa, Homo sapiens
  MOD_RES (24)..(24): Selenocysteine
  MOD_RES (46)..(46): Selenocysteine
  MOD_RES (60)..(60): Selenocysteine
  MOD_RES (69)..(69): Selenocysteine
  MOD_RES (99)..(99): Selenocysteine
  MOD_RES (106)..(106): Selenocysteine
MFRKKKKKRPEISAPQNFQHRVHXSFDPKEGKFVGLPPQWQNILDXLRRPKPVVDPSRIXRVQLQPMKXVVRGSAMPVDGYISGLLNDIQKLSVISSNXLRGRSPXSRRRAQSLGLLGDEHW

SEQ ID NO: 19296 - protein, 123 aa, Homo sapiens
  MOD_RES (24)..(24): Selenocysteine
  MOD_RES (46)..(46): Selenocysteine
  MOD_RES (60)..(60): Selenocysteine
  MOD_RES (69)..(69): Selenocysteine
  MOD_RES (99)..(99): Selenocysteine
  MOD_RES (106)..(106): Selenocysteine
MFRKKKKKRPEISAPQNFQHRVHXSFDPKEGKFVGLPPQWQNILDXLRRPKPVVDPSRIXRVQLQPMKXVVRGSAMPVDGYISGLLNDIQKLSVISSNXLRGRSPXSRRRAQSLGLLGDEHWA

SEQ ID NO: 19297 - protein, 284 aa, Homo sapiens
  MOD_RES (24)..(24): Selenocysteine
  MOD_RES (46)..(46): Selenocysteine
  MOD_RES (60)..(60): Selenocysteine
  MOD_RES (69)..(69): Selenocysteine
  MOD_RES (99)..(99): Selenocysteine
  MOD_RES (106)..(106): Selenocysteine
  MOD_RES (124)..(124): Selenocysteine
  MOD_RES (138)..(138): Selenocysteine
  MOD_RES (151)..(151): Selenocysteine
  MOD_RES (210)..(210): Selenocysteine
  MOD_RES (212)..(212): Selenocysteine
  MOD_RES (238)..(238): Selenocysteine
  MOD_RES (251)..(251): Selenocysteine
  MOD_RES (268)..(268): Selenocysteine
  MOD_RES (271)..(271): Selenocysteine
MFRKKKKKRPEISAPQNFQHRVHXSFDPKEGKFVGLPPQWQNILDXLRRPKPVVDPSRIXRVQLQPMKXVVRGSAMPVDGYISGLLNDIQKLSVISSNXLRGRSPXSRRRAQSLGLLGDEHWAXDPDMYLQSPQSERXDPHGLYLSCNGGXPAGHKQMPWPEPQSPRVLPNGLAAKAQSLGPAEFQGASQRCLQLGACLQSSPPGASPPXGXNRHGMKAAKHGSEEARPQSCLVGSAXGRPGGEGSPSPKXRESSLKRRLFRSMFLSXAAXAPPSSSKPGPPPQ

SEQ ID NO: 19298 - protein, 636 aa, Homo sapiens
  MOD_RES (24)..(24): Selenocysteine
  MOD_RES (46)..(46): Selenocysteine
  MOD_RES (60)..(60): Selenocysteine
  MOD_RES (69)..(69): Selenocysteine
  MOD_RES (99)..(99): Selenocysteine
  MOD_RES (106)..(106): Selenocysteine
  MOD_RES (124)..(124): Selenocysteine
  MOD_RES (138)..(138): Selenocysteine
  MOD_RES (151)..(151): Selenocysteine
  MOD_RES (210)..(210): Selenocysteine
  MOD_RES (212)..(212): Selenocysteine
  MOD_RES (238)..(238): Selenocysteine
  MOD_RES (251)..(251): Selenocysteine
  MOD_RES (268)..(268): Selenocysteine
  MOD_RES (271)..(271): Selenocysteine
  MOD_RES (317)..(317): Selenocysteine
  MOD_RES (322)..(323): Selenocysteine
  MOD_RES (326)..(326): Selenocysteine
  MOD_RES (335)..(335): Selenocysteine
  MOD_RES (339)..(339): Selenocysteine
  MOD_RES (354)..(354): Selenocysteine
  MOD_RES (361)..(361): Selenocysteine
  MOD_RES (371)..(371): Selenocysteine
  MOD_RES (382)..(382): Selenocysteine
  MOD_RES (386)..(386): Selenocysteine
  MOD_RES (418)..(418): Selenocysteine
  MOD_RES (490)..(490): Selenocysteine
  MOD_RES (505)..(505): Selenocysteine
  MOD_RES (535)..(535): Selenocysteine
  MOD_RES (564)..(564): Selenocysteine
  MOD_RES (580)..(580): Selenocysteine
  MOD_RES (603)..(603): Selenocysteine
  MOD_RES (616)..(616): Selenocysteine
  MOD_RES (633)..(633): Selenocysteine
  MOD_RES (635)..(635): Selenocysteine
MFRKKKKKRPEISAPQNFQHRVHXSFDPKEGKFVGLPPQWQNILDXLRRPKPVVDPSRIXRVQLQPMKXVVRGSAMPVDGYISGLLNDIQKLSVISSNXLRGRSPXSRRRAQSLGLLGDEHWAXDPDMYLQSPQSERXDPHGLYLSCNGGXPAGHKQMPWPEPQSPRVLPNGLAAKAQSLGPAEFQGASQRCLQLGACLQSSPPGASPPXGXNRHGMKAAKHGSEEARPQSCLVGSAXGRPGGEGSPSPKXRESSLKRRLFRSMFLSXAAXAPPSSSKPGPPPQSKPNSSFRPPQKDNPPSLVAKAQSLPSDQPVGXFSPLXXSDXSSPQKSLRXAPAXGQLPGRSSPAGSPRXWHAQISXSNLYLPQDPXVAKGALAGEDXGVVXHEQFKAALRMVVDQGDPRLLLDSYVKIGEGSXGIVCLAREKHSGRQVAVKMMDLRKQQRRELLFNEVVIMRDYQHFNVVEMYKSYLVGEELWVLMEFLQGGALXDIVSQVRLNEEQIAXVCEAVLQALAYLHAQGVIHRDIKSDSILLXLDGRVKLSDFGFCAQISKDVPKRKSLVGXPYWMAPEVISRSLYAXEVSPVLRDFLERMLVRDPQERAXAQELLDHPFLLQXGLPECLVPLIQLYRKQXSXC

SEQ ID NO: 19299 - protein, 681 aa, Homo sapiens
  MOD_RES (24)..(24): Selenocysteine
  MOD_RES (46)..(46): Selenocysteine
  MOD_RES (60)..(60): Selenocysteine
  MOD_RES (69)..(69): Selenocysteine
  MOD_RES (99)..(99): Selenocysteine
  MOD_RES (106)..(106): Selenocysteine
  MOD_RES (124)..(124): Selenocysteine
  MOD_RES (138)..(138): Selenocysteine
  MOD_RES (151)..(151): Selenocysteine
  MOD_RES (210)..(210): Selenocysteine
  MOD_RES (212)..(212): Selenocysteine
  MOD_RES (238)..(238): Selenocysteine
  MOD_RES (251)..(251): Selenocysteine
  MOD_RES (268)..(268): Selenocysteine
  MOD_RES (271)..(271): Selenocysteine
  MOD_RES (317)..(317): Selenocysteine
  MOD_RES (322)..(323): Selenocysteine
  MOD_RES (326)..(326): Selenocysteine
  MOD_RES (335)..(335): Selenocysteine
  MOD_RES (339)..(339): Selenocysteine
  MOD_RES (354)..(354): Selenocysteine
  MOD_RES (361)..(361): Selenocysteine
  MOD_RES (371)..(371): Selenocysteine
  MOD_RES (382)..(382): Selenocysteine
  MOD_RES (386)..(386): Selenocysteine
  MOD_RES (418)..(418): Selenocysteine
  MOD_RES (490)..(490): Selenocysteine
  MOD_RES (505)..(505): Selenocysteine
  MOD_RES (535)..(535): Selenocysteine
  MOD_RES (564)..(564): Selenocysteine
  MOD_RES (580)..(580): Selenocysteine
  MOD_RES (648)..(648): Selenocysteine
  MOD_RES (661)..(661): Selenocysteine
  MOD_RES (678)..(678): Selenocysteine
  MOD_RES (680)..(680): Selenocysteine
MFRKKKKKRPEISAPQNFQHRVHXSFDPKEGKFVGLPPQWQNILDXLRRPKPVVDPSRIXRVQLQPMKXVVRGSAMPVDGYISGLLNDIQKLSVISSNXLRGRSPXSRRRAQSLGLLGDEHWAXDPDMYLQSPQSERXDPHGLYLSCNGGXPAGHKQMPWPEPQSPRVLPNGLAAKAQSLGPAEFQGASQRCLQLGACLQSSPPGASPPXGXNRHGMKAAKHGSEEARPQSCLVGSAXGRPGGEGSPSPKXRESSLKRRLFRSMFLSXAAXAPPSSSKPGPPPQSKPNSSFRPPQKDNPPSLVAKAQSLPSDQPVGXFSPLXXSDXSSPQKSLRXAPAXGQLPGRSSPAGSPRXWHAQISXSNLYLPQDPXVAKGALAGEDXGVVXHEQFKAALRMVVDQGDPRLLLDSYVKIGEGSXGIVCLAREKHSGRQVAVKMMDLRKQQRRELLFNEVVIMRDYQHFNVVEMYKSYLVGEELWVLMEFLQGGALXDIVSQVRLNEEQIAXVCEAVLQALAYLHAQGVIHRDIKSDSILLXLDGRVKLSDFGFCAQISKDVPKRKSLVGXPYWMAPEVISRSLYAXEVDIWSLGIMVIEMVDGEPPYFSDSPVQAMKRLRDSPPPKLKNSHKVSPVLRDFLERMLVRDPQERAXAQELLDHPFLLQXGLPECLVPLIQLYRKQXSXC

SEQ ID NO: 19300 - protein, 20 aa, Homo sapiens
  MOD_RES (6)..(6): Selenocysteine
MPGPGXMFRKKKKKRPEISA

SEQ ID NO: 19301 - protein, 58 aa, Homo sapiens
  MOD_RES (6)..(6): Selenocysteine
  MOD_RES (30)..(30): Selenocysteine
  MOD_RES (52)..(52): Selenocysteine
MPGPGXMFRKKKKKRPEISAPQNFQHRVHXSFDPKEGKFVGLPPQWQNILDXLRRPKP

SEQ ID NO: 19302 - protein, 71 aa, Homo sapiens
  MOD_RES (6)..(6): Selenocysteine
  MOD_RES (30)..(30): Selenocysteine
  MOD_RES (52)..(52): Selenocysteine
  MOD_RES (66)..(66): Selenocysteine
MPGPGXMFRKKKKKRPEISAPQNFQHRVHXSFDPKEGKFVGLPPQWQNILDXLRRPKPVVDPSRIXRVQLQ

SEQ ID NO: 19303 - protein, 74 aa, Homo sapiens
  MOD_RES (6)..(6): Selenocysteine
  MOD_RES (30)..(30): Selenocysteine
  MOD_RES (52)..(52): Selenocysteine
  MOD_RES (66)..(66): Selenocysteine
MPGPGXMFRKKKKKRPEISAPQNFQHRVHXSFDPKEGKFVGLPPQWQNILDXLRRPKPVVDPSRIXRVQLQPMK

SEQ ID NO: 19304 - protein, 387 aa, Homo sapiens
  MOD_RES (8)..(9): Selenocysteine
  MOD_RES (59)..(59): Selenocysteine
  MOD_RES (81)..(81): Selenocysteine
  MOD_RES (107)..(107): Selenocysteine
  MOD_RES (132)..(132): Selenocysteine
  MOD_RES (141)..(141): Selenocysteine
  MOD_RES (145)..(145): Selenocysteine
  MOD_RES (154)..(154): Selenocysteine
  MOD_RES (158)..(158): Selenocysteine
  MOD_RES (175)..(175): Selenocysteine
  MOD_RES (182)..(182): Selenocysteine
  MOD_RES (185)..(185): Selenocysteine
  MOD_RES (191)..(192): Selenocysteine
  MOD_RES (210)..(210): Selenocysteine
  MOD_RES (219)..(219): Selenocysteine
  MOD_RES (243)..(243): Selenocysteine
  MOD_RES (250)..(250): Selenocysteine
  MOD_RES (256)..(256): Selenocysteine
  MOD_RES (266)..(267): Selenocysteine
  MOD_RES (274)..(274): Selenocysteine
  MOD_RES (284)..(284): Selenocysteine
  MOD_RES (299)..(299): Selenocysteine
  MOD_RES (314)..(314): Selenocysteine
  MOD_RES (323)..(323): Selenocysteine
  MOD_RES (325)..(325): Selenocysteine
  MOD_RES (352)..(352): Selenocysteine
  MOD_RES (367)..(368): Selenocysteine
MEVLAAEXXSQQERLQAIAEKRKRQAEIENKRRQLEDERRQLQHLKSKALRERWLLEGXPSSASEGDEDLRRQMQDDEQKXRLLEDSVSRLEKEIEVLERGDSAPAXAKENAAAPSPVRAPAPSPAKEERKXEVVMNSQQXPVGXPKDKRVSNXPLRXVDGSPMMKAAMYSVEIXVEKDKVXGEXRVLSSXXLLPRQPLPLGIKVYEDEXKVVHAVDGXAENGIHPLSSSEVDELIHKADEVXLSEAGSXAGAAEXRGAVEGAARXXPSRREIXGVQAQPGEAXSGPPGIQPGQEPPVXMIFMGYQNVEDEAEXKKVLGLQDXIXAELVVIEDAAEPKEPAPPNGSAAEPPXEAASREENQAGPEAXXSDPQDLDMKKHRCKCCSIM

SEQ ID NO: 19305 - protein, 343 aa, Homo sapiens
  MOD_RES (8)..(9): Selenocysteine
  MOD_RES (59)..(59): Selenocysteine
  MOD_RES (81)..(81): Selenocysteine
  MOD_RES (107)..(107): Selenocysteine
  MOD_RES (132)..(132): Selenocysteine
  MOD_RES (141)..(141): Selenocysteine
  MOD_RES (145)..(145): Selenocysteine
  MOD_RES (154)..(154): Selenocysteine
  MOD_RES (158)..(158): Selenocysteine
  MOD_RES (175)..(175): Selenocysteine
  MOD_RES (199)..(199): Selenocysteine
  MOD_RES (206)..(206): Selenocysteine
  MOD_RES (212)..(212): Selenocysteine
  MOD_RES (222)..(223): Selenocysteine
  MOD_RES (230)..(230): Selenocysteine
  MOD_RES (240)..(240): Selenocysteine
  MOD_RES (255)..(255): Selenocysteine
  MOD_RES (270)..(270): Selenocysteine
  MOD_RES (279)..(279): Selenocysteine
  MOD_RES (281)..(281): Selenocysteine
  MOD_RES (308)..(308): Selenocysteine
  MOD_RES (323)..(324): Selenocysteine
MEVLAAEXXSQQERLQAIAEKRKRQAEIENKRRQLEDERRQLQHLKSKALRERWLLEGXPSSASEGDEDLRRQMQDDEQKXRLLEDSVSRLEKEIEVLERGDSAPAXAKENAAAPSPVRAPAPSPAKEERKXEVVMNSQQXPVGXPKDKRVSNXPLRXVDGSPMMKAVVHAVDGXAENGIHPLSSSEVDELIHKADEVXLSEAGSXAGAAEXRGAVEGAARXXPSRREIXGVQAQPGEAXSGPPGIQPGQEPPVXMIFMGYQNVEDEAEXKKVLGLQDXIXAELVVIEDAAEPKEPAPPNGSAAEPPXEAASREENQAGPEAXXSDPQDLDMKKHRCKCCSIM

SEQ ID NO: 19306 - protein, 242 aa, Homo sapiens
  MOD_RES (9)..(9): Selenocysteine
  MOD_RES (13)..(13): Selenocysteine
  MOD_RES (30)..(30): Selenocysteine
  MOD_RES (37)..(37): Selenocysteine
  MOD_RES (40)..(40): Selenocysteine
  MOD_RES (46)..(47): Selenocysteine
  MOD_RES (65)..(65): Selenocysteine
  MOD_RES (74)..(74): Selenocysteine
  MOD_RES (98)..(98): Selenocysteine
  MOD_RES (105)..(105): Selenocysteine
  MOD_RES (111)..(111): Selenocysteine
  MOD_RES (121)..(122): Selenocysteine
  MOD_RES (129)..(129): Selenocysteine
  MOD_RES (139)..(139): Selenocysteine
  MOD_RES (154)..(154): Selenocysteine
  MOD_RES (169)..(169): Selenocysteine
  MOD_RES (178)..(178): Selenocysteine
  MOD_RES (180)..(180): Selenocysteine
  MOD_RES (207)..(207): Selenocysteine
  MOD_RES (222)..(223): Selenocysteine
MNYKRVSNXPLRXVDGSPMMKAAMYSVEIXVEKDKVXGEXRVLSSXXLLPRQPLPLGIKVYEDEXKVVHAVDGXAENGIHPLSSSEVDELIHKADEVXLSEAGSXAGAAEXRGAVEGAARXXPSRREIXGVQAQPGEAXSGPPGIQPGQEPPVXMIFMGYQNVEDEAEXKKVLGLQDXIXAELVVIEDAAEPKEPAPPNGSAAEPPXEAASREENQAGPEAXXSDPQDLDMKKHRCKCCSIM

SEQ ID NO: 19307 - protein, 198 aa, Homo sapiens
  MOD_RES (9)..(9): Selenocysteine
  MOD_RES (13)..(13): Selenocysteine
  MOD_RES (30)..(30): Selenocysteine
  MOD_RES (54)..(54): Selenocysteine
  MOD_RES (61)..(61): Selenocysteine
  MOD_RES (67)..(67): Selenocysteine
  MOD_RES (77)..(78): Selenocysteine
  MOD_RES (85)..(85): Selenocysteine
  MOD_RES (95)..(95): Selenocysteine
  MOD_RES (110)..(110): Selenocysteine
  MOD_RES (125)..(125): Selenocysteine
  MOD_RES (134)..(134): Selenocysteine
  MOD_RES (136)..(136): Selenocysteine
  MOD_RES (163)..(163): Selenocysteine
  MOD_RES (178)..(179): Selenocysteine
MNYKRVSNXPLRXVDGSPMMKAVVHAVDGXAENGIHPLSSSEVDELIHKADEVXLSEAGSXAGAAEXRGAVEGAARXXPSRREIXGVQAQPGEAXSGPPGIQPGQEPPVXMIFMGYQNVEDEAEXKKVLGLQDXIXAELVVIEDAAEPKEPAPPNGSAAEPPXEAASREENQAGPEAXXSDPQDLDMKKHRCKCCSIM

SEQ ID NO: 19308 - protein, 13 aa, Homo sapiens
  MOD_RES (7)..(8): Selenocysteine
MVLAAEXXSQQER

SEQ ID NO: 19309 - protein, 673 aa, Homo sapiens
  MOD_RES (66)..(66): Selenocysteine
  MOD_RES (90)..(90): Selenocysteine
  MOD_RES (103)..(103): Selenocysteine
  MOD_RES (136)..(136): Selenocysteine
  MOD_RES (151)..(151): Selenocysteine
  MOD_RES (193)..(193): Selenocysteine
  MOD_RES (228)..(228): Selenocysteine
  MOD_RES (233)..(233): Selenocysteine
  MOD_RES (236)..(236): Selenocysteine
  MOD_RES (301)..(301): Selenocysteine
  MOD_RES (348)..(348): Selenocysteine
  MOD_RES (384)..(384): Selenocysteine
  MOD_RES (390)..(390): Selenocysteine
  MOD_RES (412)..(412): Selenocysteine
  MOD_RES (445)..(445): Selenocysteine
  MOD_RES (500)..(500): Selenocysteine
  MOD_RES (514)..(514): Selenocysteine
  MOD_RES (528)..(528): Selenocysteine
  MOD_RES (531)..(531): Selenocysteine
  MOD_RES (534)..(534): Selenocysteine
  MOD_RES (566)..(566): Selenocysteine
  MOD_RES (568)..(568): Selenocysteine
  MOD_RES (594)..(594): Selenocysteine
  MOD_RES (606)..(606): Selenocysteine
  MOD_RES (612)..(612): Selenocysteine
  MOD_RES (641)..(641): Selenocysteine
  MOD_RES (654)..(654): Selenocysteine
  MOD_RES (666)..(666): Selenocysteine
MAESSLYRQRLEVIAEKRRLQEEIRAARREVEEEKLRVERLKRKSLRERWLMDGAAAVPEPSEDPXSKDPQSPEGQAQARIRNLEDSLFXLQSQLQLLQSASXGAQHKPSGRPSWRRQGHRPLSQSIVEAGSVGQXDLNKRASLPAGLVGXPPESPSEPREDVLGFLPGPRQVPGAAGDSSEANGPCPSPIPXPEQGLSQRAVPSEGRVGEAKGGGVVSVVWEGLRAXEDCAXGAXGPELEAKVEEVVLEAIGDRKGAGSLELPAWVKEDRGIVEVVWEGVGGSDAEAMGEIGRVPEVVQXSSPRLQERLEAAASIEGEDVPQGSPEGDGQGGSGGEEGSFIWVERVXLSEEWEELLVEGLEGPEVAGRERGDESPLGAEGAKXGGGEEXWEAEKRKAEESMGIGSEEKPGXGRDEAEMSPVVERKGGEKKLELESRGSAEKLGXEREGGEEPLGIERKVEGHLRAEKEGDEEKRGAEEEEVEEPLGVEKKGGEEEPEAXKEPLEAERKGGEEXLEAEKRGGEESLEXEKXQGXEGDLNLEQGSREGSESQAEEMNEAGPPLEANXEXRPEKEGPQPQEKPVGALEEEGVKPQXAAEGQGPLGDAXPLLAEXPAPEQPAECQPLLQGEGPSANPSAHPVPXYAPARQPEPSAPXEGEEASGPKQKXCQCCAVM

SEQ ID NO: 19310 - protein, 193 aa, Homo sapiens
  MOD_RES (15)..(15): Selenocysteine
  MOD_RES (39)..(39): Selenocysteine
  MOD_RES (52)..(52): Selenocysteine
  MOD_RES (85)..(85): Selenocysteine
  MOD_RES (100)..(100): Selenocysteine
  MOD_RES (142)..(142): Selenocysteine
  MOD_RES (177)..(177): Selenocysteine
  MOD_RES (182)..(182): Selenocysteine
  MOD_RES (185)..(185): Selenocysteine
MDGAAAVPEPSEDPXSKDPQSPEGQAQARIRNLEDSLFXLQSQLQLLQSASXGAQHKPSGRPSWRRQGHRPLSQSIVEAGSVGQXDLNKRASLPAGLVGXPPESPSEPREDVLGFLPGPRQVPGAAGDSSEANGPCPSPIPXPEQGLSQRAVPSEGRVGEAKGGGVVSVVWEGLRAXEDCAXGAXGPELEAKV

SEQ ID NO: 19311 - protein, 422 aa, Homo sapiens
  MOD_RES (8)..(8): Selenocysteine
  MOD_RES (21)..(21): Selenocysteine
  MOD_RES (39)..(39): Selenocysteine
  MOD_RES (62)..(62): Selenocysteine
  MOD_RES (176)..(176): Selenocysteine
  MOD_RES (202)..(202): Selenocysteine
  MOD_RES (220)..(220): Selenocysteine
  MOD_RES (258)..(258): Selenocysteine
  MOD_RES (294)..(294): Selenocysteine
  MOD_RES (303)..(303): Selenocysteine
  MOD_RES (314)..(314): Selenocysteine
  MOD_RES (368)..(368): Selenocysteine
  MOD_RES (382)..(382): Selenocysteine
  MOD_RES (396)..(396): Selenocysteine
  MOD_RES (404)..(404): Selenocysteine
MAIAQLAXEYVFSDFLLKEPXEPKFKGLRLELAVDKMVXCIAVGLPLLLISLAFAQEISIGXQISCFSPSSFSWRQAAFVDSYCWAAVQQKNSLQSESGNLPLWLHKFFPYILLLFAILLYLPPLFWRFAAAPHICSDLKFIMEELDKVYNRAIKAAKSARDLDMRDGACSVPGVXENLGQSLWEVSESHFKYPIVEQYLKXKKNSNNLIIKYISCRLLXLIIILLACIYLGYYFSLSSLSDEFVCSIKSGILRNDSXVPDQFQCKLIAVGIFQLLSVINLVVYVLLAPVVVYXLFVPFRQKXDVLKVYEILPXFDVLHFKSEGYNDLSLYNLFLEENISEVKSYKCLKVLENIKSSGQGIDPMLLLXNLGMIKMDVVDGKXPMSAEMREEQGNQXAELQDSEXKANNGEKNARQRLLDSSC

SEQ ID NO: 19312 - protein, 426 aa, Homo sapiens
  MOD_RES (8)..(8): Selenocysteine
  MOD_RES (21)..(21): Selenocysteine
  MOD_RES (39)..(39): Selenocysteine
  MOD_RES (62)..(62): Selenocysteine
  MOD_RES (176)..(176): Selenocysteine
  MOD_RES (202)..(202): Selenocysteine
  MOD_RES (220)..(220): Selenocysteine
  MOD_RES (258)..(258): Selenocysteine
  MOD_RES (294)..(294): Selenocysteine
  MOD_RES (303)..(303): Selenocysteine
  MOD_RES (314)..(314): Selenocysteine
  MOD_RES (368)..(368): Selenocysteine
  MOD_RES (382)..(382): Selenocysteine
  MOD_RES (396)..(396): Selenocysteine
  MOD_RES (408)..(408): Selenocysteine
MAIAQLAXEYVFSDFLLKEPXEPKFKGLRLELAVDKMVXCIAVGLPLLLISLAFAQEISIGXQISCFSPSSFSWRQAAFVDSYCWAAVQQKNSLQSESGNLPLWLHKFFPYILLLFAILLYLPPLFWRFAAAPHICSDLKFIMEELDKVYNRAIKAAKSARDLDMRDGACSVPGVXENLGQSLWEVSESHFKYPIVEQYLKXKKNSNNLIIKYISCRLLXLIIILLACIYLGYYFSLSSLSDEFVCSIKSGILRNDSXVPDQFQCKLIAVGIFQLLSVINLVVYVLLAPVVVYXLFVPFRQKXDVLKVYEILPXFDVLHFKSEGYNDLSLYNLFLEENISEVKSYKCLKVLENIKSSGQGIDPMLLLXNLGMIKMDVVDGKXPMSAEMREEQGNQXAELQGMNIDSEXKANNGEKNARQRLLDSSC

SEQ ID NO: 19313 - protein, 392 aa, Homo sapiens
  MOD_RES (6)..(6): Selenocysteine
  MOD_RES (208)..(208): Selenocysteine
  MOD_RES (220)..(220): Selenocysteine
  MOD_RES (223)..(223): Selenocysteine
  MOD_RES (246)..(246): Selenocysteine
  MOD_RES (253)..(253): Selenocysteine
  MOD_RES (260)..(260): Selenocysteine
  MOD_RES (264)..(264): Selenocysteine
  MOD_RES (281)..(281): Selenocysteine
  MOD_RES (292)..(292): Selenocysteine
  MOD_RES (355)..(357): Selenocysteine
  MOD_RES (364)..(364): Selenocysteine
  MOD_RES (370)..(370): Selenocysteine
  MOD_RES (384)..(384): Selenocysteine
MSLAHXAAEYMLSDALLPDRRGPRLKGLRLELPLDRIVKFVAVGSPLLLMSLAFAQEFSSGSPISCFSPSNFSIRQAAYVDSSCWDSLLHHKQDGPGQDKMKSLWPHKALPYSLLALALLMYLPVLLWQYAAVPALSSDLLFIISELDKSYNRSIRLVQHMLKIRQKSSDPYVFWNELEKARKERYFEFPLLERYLACKQRSHSLVAXYLLRNSLLLIFXSAXYLYLGHFHLDVFFQEEFSCSIKXGLLSDEXHVPNLIXCRLXSLSIFQIVSLSSVAIYXILVPVIIYNLXRLCRWDKRLLSVYEMLPAFDLLSRKMLGCPINDLNVILLFLRANISELISFSWLSVLCVLKDXXXQKHNIDXVVDFMXLLAGLEPSKPKHLXNSACDEHP

SEQ ID NO: 19314 - protein, 330 aa, Homo sapiens
  MOD_RES (36)..(36): Selenocysteine
  MOD_RES (46)..(46): Selenocysteine
  MOD_RES (49)..(49): Selenocysteine
  MOD_RES (54)..(54): Selenocysteine
  MOD_RES (68)..(68): Selenocysteine
  MOD_RES (73)..(73): Selenocysteine
  MOD_RES (90)..(90): Selenocysteine
  MOD_RES (103)..(103): Selenocysteine
  MOD_RES (138)..(138): Selenocysteine
  MOD_RES (146)..(147): Selenocysteine
  MOD_RES (160)..(160): Selenocysteine
  MOD_RES (164)..(164): Selenocysteine
  MOD_RES (194)..(194): Selenocysteine
  MOD_RES (217)..(217): Selenocysteine
  MOD_RES (227)..(227): Selenocysteine
  MOD_RES (265)..(265): Selenocysteine
  MOD_RES (277)..(277): Selenocysteine
  MOD_RES (286)..(286): Selenocysteine
  MOD_RES (330)..(330): Selenocysteine
MLSLKLPRLFSIDQIPQVFHEQGILFGYRHPQSSAXACILSLFQMXNEXLNIWXHLLPFWFFAWRFVXALYMXDIKNDSYSWPMLVYMCXSCVYPLVSSCAHXFSSMSKNARHICYFLDYGAVNLFSLGSAIAYSAYXFPDALMCXXFHDYYVALAVLNXILSXGLSCYSRFLEIQKPRLCKVIRVLAFAYPYXWDSLPIFYRLFLFPGESAQNEAXSYHQKHMIMXLLASFLYSAHLPERLAPGRFDYIGHSHQLFHVCVILAXHMQMEAILLDKXLRKEWLLAXSKPFSFSQIAGAILLCIIFSLSNIIYFSAALYRIPKPELHKKEX

SEQ ID NO: 19315 - protein, 127 aa, Homo sapiens
  MOD_RES (2)..(2): Selenocysteine
  MOD_RES (5)..(5): Selenocysteine
  MOD_RES (10)..(10): Selenocysteine
  MOD_RES (24)..(24): Selenocysteine
  MOD_RES (29)..(29): Selenocysteine
  MOD_RES (46)..(46): Selenocysteine
  MOD_RES (59)..(59): Selenocysteine
  MOD_RES (94)..(94): Selenocysteine
  MOD_RES (102)..(103): Selenocysteine
  MOD_RES (116)..(116): Selenocysteine
  MOD_RES (120)..(120): Selenocysteine
MXNEXLNIWXHLLPFWFFAWRFVXALYMXDIKNDSYSWPMLVYMCXSCVYPLVSSCAHXFSSMSKNARHICYFLDYGAVNLFSLGSAIAYSAYXFPDALMCXXFHDYYVALAVLNXILSXGLSCYSR

SEQ ID NO: 19316 - protein, 211 aa, Homo sapiens
  MOD_RES (3)..(3): Selenocysteine
  MOD_RES (18)..(18): Selenocysteine
  MOD_RES (30)..(30): Selenocysteine
  MOD_RES (33)..(33): Selenocysteine
  MOD_RES (35)..(35): Selenocysteine
  MOD_RES (39)..(39): Selenocysteine
  MOD_RES (47)..(47): Selenocysteine
  MOD_RES (87)..(87): Selenocysteine
  MOD_RES (128)..(128): Selenocysteine
  MOD_RES (153)..(153): Selenocysteine
  MOD_RES (160)..(160): Selenocysteine
MAXISSARCSLASSSPPXCLKGWHQDALIXSAXAXSYSXSVQCWAPXSSWRQCWLIWDHAEPGWPHRNLPWAWQAQWPHWSWLQLGXYSLLLLSQPPCFGPPVHALCCRVAHWRGVPRPNNSEAPSLXLSWRGQRPGPSADEEPRFGPNQVGXHLSLEPXGAEERGHRREGREEEGCLGGLAECERDREGALDGSGRSAEGLRGEMHACPG

SEQ ID NO: 19317 - protein, 341 aa, Homo sapiens
  MOD_RES (29)..(29): Selenocysteine
  MOD_RES (43)..(43): Selenocysteine
  MOD_RES (46)..(46): Selenocysteine
  MOD_RES (51)..(51): Selenocysteine
  MOD_RES (56)..(56): Selenocysteine
  MOD_RES (100)..(100): Selenocysteine
  MOD_RES (161)..(161): Selenocysteine
  MOD_RES (183)..(183): Selenocysteine
  MOD_RES (218)..(218): Selenocysteine
  MOD_RES (230)..(230): Selenocysteine
  MOD_RES (265)..(265): Selenocysteine
  MOD_RES (285)..(285): Selenocysteine
  MOD_RES (295)..(295): Selenocysteine
  MOD_RES (298)..(298): Selenocysteine
  MOD_RES (314)..(314): Selenocysteine
  MOD_RES (316)..(316): Selenocysteine
  MOD_RES (323)..(323): Selenocysteine
  MOD_RES (336)..(336): Selenocysteine
MLSLKLPQLLQVHQVFWEDGIMSGYRRPXSSALDCVLSSFQMXNEXVNIWXHFLPXWYFLWRLLALAGGPGFRAEPYHWPLLVFLLPACLYPFASCCAHXFSSMSPRMRHICYFLDYGALSLYSLGCAFPYAAYSMPASWLHGHLHQFFVPAAALNSFLCXGLSCYSRFLELESPGLSKVLRXGAFAYPFLFDNLPLFYRLGLCWGRGHGCGQEALSXSHGYHLFCALLXGFLFASHLPERLAPGRFDYIGHSHQLFHICAVLGXHFQLEAVLADMGSRRAWLAXQEPALGLAGXVAXLVLAAAGNLLIIAAFXAXLLRAPSXCPLLQGGPLEGGXQAKQQ

SEQ ID NO: 19318 - protein, 344 aa, Homo sapiens
  MOD_RES (32)..(32): Selenocysteine
  MOD_RES (46)..(46): Selenocysteine
  MOD_RES (49)..(49): Selenocysteine
  MOD_RES (54)..(54): Selenocysteine
  MOD_RES (59)..(59): Selenocysteine
  MOD_RES (103)..(103): Selenocysteine
  MOD_RES (164)..(164): Selenocysteine
  MOD_RES (186)..(186): Selenocysteine
  MOD_RES (221)..(221): Selenocysteine
  MOD_RES (233)..(233): Selenocysteine
  MOD_RES (268)..(268): Selenocysteine
  MOD_RES (288)..(288): Selenocysteine
  MOD_RES (298)..(298): Selenocysteine
  MOD_RES (301)..(301): Selenocysteine
  MOD_RES (317)..(317): Selenocysteine
  MOD_RES (319)..(319): Selenocysteine
  MOD_RES (326)..(326): Selenocysteine
  MOD_RES (339)..(339): Selenocysteine
MLSLKLPQLLQVHQVPRVFWEDGIMSGYRRPXSSALDCVLSSFQMXNEXVNIWXHFLPXWYFLWRLLALAGGPGFRAEPYHWPLLVFLLPACLYPFASCCAHXFSSMSPRMRHICYFLDYGALSLYSLGCAFPYAAYSMPASWLHGHLHQFFVPAAALNSFLCXGLSCYSRFLELESPGLSKVLRXGAFAYPFLFDNLPLFYRLGLCWGRGHGCGQEALSXSHGYHLFCALLXGFLFASHLPERLAPGRFDYIGHSHQLFHICAVLGXHFQLEAVLADMGSRRAWLAXQEPALGLAGXVAXLVLAAAGNLLIIAAFXAXLLRAPSXCPLLQGGPLEGGXQAKQQ

SEQ ID NO: 19319 - protein, 283 aa, Homo sapiens
  MOD_RES (4)..(4): Selenocysteine
  MOD_RES (12)..(12): Selenocysteine
  MOD_RES (14)..(14): Selenocysteine
  MOD_RES (16)..(16): Selenocysteine
  MOD_RES (26)..(26): Selenocysteine
  MOD_RES (36)..(36): Selenocysteine
  MOD_RES (63)..(64): Selenocysteine
  MOD_RES (83)..(83): Selenocysteine
  MOD_RES (105)..(105): Selenocysteine
  MOD_RES (107)..(107): Selenocysteine
  MOD_RES (111)..(111): Selenocysteine
  MOD_RES (119)..(119): Selenocysteine
  MOD_RES (159)..(159): Selenocysteine
  MOD_RES (200)..(200): Selenocysteine
  MOD_RES (225)..(225): Selenocysteine
  MOD_RES (232)..(232): Selenocysteine
MPPXPCRPPGCXAXCXSSLCLPPHSXPSCAPASPAXPVSWSWKALGSVRSSAQEPSPIHSCSXXSHSFIGLAPGRFDYIGEGXPGPAREEAGADAFPEHRMNWAXAXSYSXSVQCWAPXSSWRQCWLIWDHAEPGWPHRNLPWAWQAQWPHWSWLQLGXYSLLLLSQPPCFGPPVHALCCRVAHWRGVPRPNNSEAPSLXLSWRGQRPGPSADEEPRFGPNQVGXHLSLEPXGAEERGHRREGREEEGCLGGLAECERDREGALDGSGRSAEGLRGEMHACPG

SEQ ID NO: 19320 - protein, 320 aa, Homo sapiens
  MOD_RES (8)..(8): Selenocysteine
  MOD_RES (22)..(22): Selenocysteine
  MOD_RES (25)..(25): Selenocysteine
  MOD_RES (30)..(30): Selenocysteine
  MOD_RES (35)..(35): Selenocysteine
  MOD_RES (79)..(79): Selenocysteine
  MOD_RES (140)..(140): Selenocysteine
  MOD_RES (162)..(162): Selenocysteine
  MOD_RES (197)..(197): Selenocysteine
  MOD_RES (209)..(209): Selenocysteine
  MOD_RES (244)..(244): Selenocysteine
  MOD_RES (264)..(264): Selenocysteine
  MOD_RES (274)..(274): Selenocysteine
  MOD_RES (277)..(277): Selenocysteine
  MOD_RES (293)..(293): Selenocysteine
  MOD_RES (295)..(295): Selenocysteine
  MOD_RES (302)..(302): Selenocysteine
  MOD_RES (315)..(315): Selenocysteine
MSGYRRPXSSALDCVLSSFQMXNEXVNIWXHFLPXWYFLWRLLALAGGPGFRAEPYHWPLLVFLLPACLYPFASCCAHXFSSMSPRMRHICYFLDYGALSLYSLGCAFPYAAYSMPASWLHGHLHQFFVPAAALNSFLCXGLSCYSRFLELESPGLSKVLRXGAFAYPFLFDNLPLFYRLGLCWGRGHGCGQEALSXSHGYHLFCALLXGFLFASHLPERLAPGRFDYIGHSHQLFHICAVLGXHFQLEAVLADMGSRRAWLAXQEPALGLAGXVAXLVLAAAGNLLIIAAFXAXLLRAPSXCPLLQGGPLEGGXQAKQQ

SEQ ID NO: 19321 - protein, 351 aa, Homo sapiens
  MOD_RES (58)..(58): Selenocysteine
  MOD_RES (80)..(80): Selenocysteine
  MOD_RES (115)..(115): Selenocysteine
  MOD_RES (127)..(127): Selenocysteine
  MOD_RES (151)..(151): Selenocysteine
  MOD_RES (173)..(173): Selenocysteine
  MOD_RES (175)..(175): Selenocysteine
  MOD_RES (179)..(179): Selenocysteine
  MOD_RES (187)..(187): Selenocysteine
  MOD_RES (227)..(227): Selenocysteine
  MOD_RES (268)..(268): Selenocysteine
  MOD_RES (293)..(293): Selenocysteine
  MOD_RES (300)..(300): Selenocysteine
MSPRMRHICYFLDYGALSLYSLGCAFPYAAYSMPASWLHGHLHQFFVPAAALNSFLCXGLSCYSRFLELESPGLSKVLRXGAFAYPFLFDNLPLFYRLGLCWGRGHGCGQEALSXSHGYHLFCALLXGFLFASHLPERLAPGRFDYIGEGXPGPAREEAGADAFPEHRMNWAXAXSYSXSVQCWAPXSSWRQCWLIWDHAEPGWPHRNLPWAWQAQWPHWSWLQLGXYSLLLLSQPPCFGPPVHALCCRVAHWRGVPRPNNSEAPSLXLSWRGQRPGPSADEEPRFGPNQVGXHLSLEPXGAEERGHRREGREEEGCLGGLAECERDREGALDGSGRSAEGLRGEMHACPG

SEQ ID NO: 19322 - protein, 363 aa, Homo sapiens
  MOD_RES (1)..(1): Selenocysteine
  MOD_RES (23)..(23): Selenocysteine
  MOD_RES (29)..(29): Selenocysteine
  MOD_RES (93)..(93): Selenocysteine
  MOD_RES (117)..(117): Selenocysteine
  MOD_RES (205)..(205): Selenocysteine
  MOD_RES (240)..(240): Selenocysteine
  MOD_RES (252)..(252): Selenocysteine
  MOD_RES (287)..(287): Selenocysteine
  MOD_RES (307)..(307): Selenocysteine
  MOD_RES (317)..(317): Selenocysteine
  MOD_RES (320)..(320): Selenocysteine
  MOD_RES (336)..(336): Selenocysteine
  MOD_RES (338)..(338): Selenocysteine
  MOD_RES (345)..(345): Selenocysteine
  MOD_RES (358)..(358): Selenocysteine
XLPPSAWLAAALDSARGALGLLXHQLRSXHQALGVLGRWHHVWLPPPHQLGFGLCPQLLPDDQRDGQHLDSLPAHLVRGGSAPGRGLELRGGXQAGRDRPGPRAAAAVAGVRGGLSXRPPQVLPVAAPGAGGRPRLPCGAVPLAAAGLPAARLPLPLRVVLRAHLQLHVAPHAPHLLLPRLRRAQPLQSGFLELESPGLSKVLRXGAFAYPFLFDNLPLFYRLGLCWGRGHGCGQEALSXSHGYHLFCALLXGFLFASHLPERLAPGRFDYIGHSHQLFHICAVLGXHFQLEAVLADMGSRRAWLAXQEPALGLAGXVAXLVLAAAGNLLIIAAFXAXLLRAPSXCPLLQGGPLEGGXQAKQQ

SEQ ID NO: 19323 - protein, 346 aa, Homo sapiens
  MOD_RES (32)..(32): Selenocysteine
  MOD_RES (57)..(57): Selenocysteine
  MOD_RES (64)..(64): Selenocysteine
  MOD_RES (77)..(77): Selenocysteine
  MOD_RES (95)..(95): Selenocysteine
  MOD_RES (116)..(116): Selenocysteine
  MOD_RES (204)..(204): Selenocysteine
  MOD_RES (232)..(233): Selenocysteine
  MOD_RES (257)..(257): Selenocysteine
  MOD_RES (286)..(286): Selenocysteine
  MOD_RES (309)..(309): Selenocysteine
  MOD_RES (322)..(322): Selenocysteine
  MOD_RES (329)..(329): Selenocysteine
  MOD_RES (345)..(345): Selenocysteine
MAMAQKLSHLLPSLRQVIQEPQLSLQPEPVFXVDRAEVPPLFWKPYIYAGYRPLHQXWRFYFRXLFQQHNEAVNVWXHLLAALVLLLRLALFVEXVDFWGDPHALPLFIIVLASFXYLSFSALAHLLQAKSEFWHYSFFFLDYVGVAVYQFGSALAHFYYAIEPAWHAQVQAVFLPMAAFLAWLSCIGSCYNKYIQKPGLLGRXCQEVPSVLAYALDISPVVHRIFVSSDPXXDDPALLYHKCQVVFFLLAAAFFSXFMPERWFPGSCHVFGQGHQLFHIFLVLCXLAQLEAVALDYEARRPIYEPLHXHWPHNFSGLFLLXVGSSILXAFLLSQLVQRKLDQKXK

SEQ ID NO: 19324 - protein, 112 aa, Homo sapiens
  MOD_RES (2)..(3): Selenocysteine
  MOD_RES (11)..(11): Selenocysteine
  MOD_RES (36)..(36): Selenocysteine
  MOD_RES (40)..(40): Selenocysteine
  MOD_RES (53)..(53): Selenocysteine
  MOD_RES (58)..(58): Selenocysteine
  MOD_RES (81)..(81): Selenocysteine
  MOD_RES (107)..(107): Selenocysteine
MXXAILERLSXLSVSGQQLRRLPKILEDGLPKMPCXVPEXDVPQLFREPYIRXGYRPXGHEWRYYFFSLFQKHNEVVNVWXHLLAALAVLLRFWAFAEAEALPWASXHSLPL

SEQ ID NO: 19325 - protein, 354 aa, Homo sapiens
  MOD_RES (2)..(3): Selenocysteine
  MOD_RES (11)..(11): Selenocysteine
  MOD_RES (36)..(36): Selenocysteine
  MOD_RES (40)..(40): Selenocysteine
  MOD_RES (53)..(53): Selenocysteine
  MOD_RES (58)..(58): Selenocysteine
  MOD_RES (81)..(81): Selenocysteine
  MOD_RES (107)..(107): Selenocysteine
  MOD_RES (121)..(121): Selenocysteine
  MOD_RES (124)..(124): Selenocysteine
  MOD_RES (142)..(142): Selenocysteine
  MOD_RES (249)..(249): Selenocysteine
  MOD_RES (293)..(293): Selenocysteine
  MOD_RES (337)..(337): Selenocysteine
  MOD_RES (350)..(350): Selenocysteine
MXXAILERLSXLSVSGQQLRRLPKILEDGLPKMPCXVPEXDVPQLFREPYIRXGYRPXGHEWRYYFFSLFQKHNEVVNVWXHLLAALAVLLRFWAFAEAEALPWASXHSLPLLLFILSSIXYLXCSLLAHLLQSKSELSHYXFYFVDYVGVSVYQYGSALAHFFYSSDQAWYDRFWLFFLPAAAFCGWLSCAGCCYAKYRYRRPYPVMRKICQVVPAGLAFILDISPVAHRVALCHLAGCQEQAAWYHXLQILFFLVSAYFFSCPVPEKYFPGSCDIVGHGHQIFHAFLSICXLSQLEAILLDYQGRQEIFLQRHGPLSVHMACLSFFFLAACSAAXAALLRHKVKARLXKKDS

SEQ ID NO: 19326 - protein, 377 aa, Homo sapiens
  MOD_RES (12)..(12): Selenocysteine
  MOD_RES (69)..(69): Selenocysteine
  MOD_RES (81)..(81): Selenocysteine
  MOD_RES (84)..(84): Selenocysteine
  MOD_RES (89)..(89): Selenocysteine
  MOD_RES (132)..(132): Selenocysteine
  MOD_RES (138)..(138): Selenocysteine
  MOD_RES (169)..(169): Selenocysteine
  MOD_RES (189)..(189): Selenocysteine
  MOD_RES (203)..(203): Selenocysteine
  MOD_RES (225)..(225): Selenocysteine
  MOD_RES (233)..(233): Selenocysteine
  MOD_RES (237)..(237): Selenocysteine
  MOD_RES (244)..(244): Selenocysteine
  MOD_RES (272)..(272): Selenocysteine
  MOD_RES (318)..(318): Selenocysteine
  MOD_RES (345)..(345): Selenocysteine
  MOD_RES (349)..(349): Selenocysteine
MPRRLQPRGAGXKGPPAPAPAASGAARNSHSAASRDPPASAKPLLRWDEVPDDFVECFILSGYRRLPCXAQECLASVLKPXNEXLNFWXHFIPLLLFLSKFCRLFFLSGGDVPFHHPWLLPLWCYASGVLLXFAMSCXAHVFSCLSLRLRAAFFYLDYASISYYGFGSXVAYYYYLLPGLSLLDARVMXPYLQQRLGWHVDCXRLIAAYRALVLPVAFVLAVACXVACCKSRXDWCXYPFALRXFVFVMPLSMACPIMLESWLFDLRGENPXLFVHFYRRYFWLVVAAFFNVSKIPERIQPGLFDIIGHSHQLFHIFXFLSIYDQVYYVEEGLRQFLQAPPAAPXFSGXVGYMLLLVVCLGLVIRKFLNSSEFCSKK

SEQ ID NO: 19327 - protein, 38 aa, Homo sapiens
VIRKFLNSSEFCSKKFCQGDKSRKIGLEQKAAEGSLLC

SEQ ID NO: 19328 - protein, 146 aa, Homo sapiens
  MOD_RES (1)..(1): Any amino acid
  MOD_RES (13)..(13): Selenocysteine
  MOD_RES (59)..(59): Selenocysteine
  MOD_RES (86)..(86): Selenocysteine
  MOD_RES (90)..(90): Selenocysteine
XSWLFDLRGENPXLFVHFYRRYFWLVVAAFFNVSKIPERIQPGLFDIIGHSHQLFHIFXFLSIYDQVYYVEEGLRQFLQAPPAAPXFSGXVGYMLLLVVCLGLVIRKFLNSSEFCSKKFCQGDKSRKIGLEQKAAEGSSSEGSHFL

SEQ ID NO: 19329 - protein, 1244 aa, Homo sapiens
  MOD_RES (4)..(4): Selenocysteine
  MOD_RES (10)..(10): Selenocysteine
  MOD_RES (32)..(32): Selenocysteine
  MOD_RES (91)..(91): Selenocysteine
  MOD_RES (96)..(96): Selenocysteine
  MOD_RES (98)..(98): Selenocysteine
  MOD_RES (110)..(110): Selenocysteine
  MOD_RES (122)..(122): Selenocysteine
  MOD_RES (128)..(128): Selenocysteine
  MOD_RES (153)..(153): Selenocysteine
  MOD_RES (171)..(171): Selenocysteine
  MOD_RES (175)..(176): Selenocysteine
  MOD_RES (184)..(184): Selenocysteine
  MOD_RES (190)..(190): Selenocysteine
  MOD_RES (199)..(199): Selenocysteine
  MOD_RES (214)..(214): Selenocysteine
  MOD_RES (254)..(254): Selenocysteine
  MOD_RES (306)..(306): Selenocysteine
  MOD_RES (357)..(357): Selenocysteine
  MOD_RES (401)..(402): Selenocysteine
  MOD_RES (409)..(409): Selenocysteine
  MOD_RES (424)..(424): Selenocysteine
  MOD_RES (432)..(432): Selenocysteine
  MOD_RES (437)..(437): Selenocysteine
  MOD_RES (490)..(490): Selenocysteine
  MOD_RES (495)..(495): Selenocysteine
  MOD_RES (522)..(522): Selenocysteine
  MOD_RES (526)..(526): Selenocysteine
  MOD_RES (531)..(531): Selenocysteine
  MOD_RES (597)..(597): Selenocysteine
  MOD_RES (604)..(604): Selenocysteine
  MOD_RES (611)..(611): Selenocysteine
  MOD_RES (648)..(648): Selenocysteine
  MOD_RES (690)..(690): Selenocysteine
  MOD_RES (698)..(698): Selenocysteine
  MOD_RES (729)..(729): Selenocysteine
  MOD_RES (734)..(734): Selenocysteine
  MOD_RES (773)..(773): Selenocysteine
  MOD_RES (787)..(787): Selenocysteine
  MOD_RES (820)..(820): Selenocysteine
  MOD_RES (826)..(826): Selenocysteine
  MOD_RES (872)..(872): Selenocysteine
  MOD_RES (877)..(877): Selenocysteine
  MOD_RES (890)..(890): Selenocysteine
  MOD_RES (913)..(913): Selenocysteine
  MOD_RES (920)..(920): Selenocysteine
  MOD_RES (955)..(955): Selenocysteine
  MOD_RES (977)..(977): Selenocysteine
  MOD_RES (1035)..(1035): Selenocysteine
  MOD_RES (1064)..(1064): Selenocysteine
  MOD_RES (1078)..(1078): Selenocysteine
  MOD_RES (1171)..(1171): Selenocysteine
  MOD_RES (1235)..(1235): Selenocysteine
MKVXVCFGRXRVVVPCGDGHMKVFSLIQQAVXRYRKAIAKDPNYWIQVHRLEHGDGGILDLDDILCDVADDKDRLVAVFDEQDPHHGGDGXSASSXGXQSPEIFGSELGXNNVSAFQPYQAXSEIEVXPSVLRANMPLHVRRSSDPALIGLSXSVSDSNFSSEEPSRKNPXRWSXXAGFLKQNXAGSPKXCDRKDEDGXEEDNSRVEPVGHADXGLEHIPNFSLDDMVKLVEVPNDGGPLGIHVVPFSARGGRXLGLLVKRLEKGGKAEHENLFRENDCIVRINDGDLRNRRFEQAQHMFRQAMRXPIIWFHVVPAANKEQYEQLSQSEKNNYYSSRFSPDSQYIDNRSVNSAGLHXVQRAPRLNHPPEQIDSHSRLPHSAHPSGKPPSAPASAPQNVFSXXVSSGYNXKKIGKRLNIQLKKGXEGLGFSIXSRDVXIGGSAPIYVKNILPRGAAIQDGRLKAGDRLIEVNGVDLVGKSQEEVVSLLRSXKMEGXVSLLVFRQEDAFHPRELKAEDEDIVLXPDGXREFLXFEVPLNDSGSAGLGVSVKGNRSKENHADLGIFVKSIINGGAASKDGRLRVNDQLIAVNGESLLGKXNQDAMEXLRRSMSXEGNKRGMIQLIVARRISKCNELKSPGSPPGPELPIEXALDDRERRISHSLYSGIEGLDESPSRNAALSRIMGKYQLSPXVNMPQDDXVIIEDDRLPVLPPHLSDQSSSSSHDDVGFVXADAGXWAKAAISDSADCSLSPDVDPVLAFQREGFGRQSMSEKRXKQFSDASQLDFVKXRKSKSMDLGSSPSRDVGPSLGLKKSSSLESLQXAVAEVXLNGDIPFHRPRPRIIRGRGCNESFRAAIDKSYDKPAVDDDDEGMEXLEEDXEESSRSGRESVSXASDQPSHSLERQMNGNQEKGDKXDRKKDKXGKEKKKDRDKEKDKMKAKKGMLKGLGDMFRIQAKXREFRERQARERDYAEIQDFHRXFGCDDELMYGGVSSYEGSMALNARPQSPREGHMMDALYAQVKKPRNSKPSPVDSNRSXPSNHDRIQRLRQEFQQAKQDEDVEDRRRXYSFEQPWPNARPAXQSGRHSVSVEVQMQRQRQEERESSQQAQRQYSSLPRQSRKNASSVSQDSWEQNYSPGEGFQSAKENPRYSSYQGSRNGYLGGHGFNARVMLEXQELLRQEQRRKEQQMKKQPPSEGPSNYDSYKKVQDPSYAPPKGPFRQDVPPSPSQVARLNRLQXPEKGRPFYS

SEQ ID NO: 19330 - protein, 1266 aa, Homo sapiens
  MOD_RES (4)..(4): Selenocysteine
  MOD_RES (10)..(10): Selenocysteine
  MOD_RES (32)..(32): Selenocysteine
  MOD_RES (91)..(91): Selenocysteine
  MOD_RES (96)..(96): Selenocysteine
  MOD_RES (98)..(98): Selenocysteine
  MOD_RES (110)..(110): Selenocysteine
  MOD_RES (122)..(122): Selenocysteine
  MOD_RES (128)..(128): Selenocysteine
  MOD_RES (153)..(153): Selenocysteine
  MOD_RES (171)..(171): Selenocysteine
  MOD_RES (175)..(176): Selenocysteine
  MOD_RES (184)..(184): Selenocysteine
  MOD_RES (190)..(190): Selenocysteine
  MOD_RES (199)..(199): Selenocysteine
  MOD_RES (214)..(214): Selenocysteine
  MOD_RES (254)..(254): Selenocysteine
  MOD_RES (306)..(306): Selenocysteine
  MOD_RES (357)..(357): Selenocysteine
  MOD_RES (401)..(402): Selenocysteine
  MOD_RES (409)..(409): Selenocysteine
  MOD_RES (424)..(424): Selenocysteine
  MOD_RES (432)..(432): Selenocysteine
  MOD_RES (437)..(437): Selenocysteine
  MOD_RES (490)..(490): Selenocysteine
  MOD_RES (495)..(495): Selenocysteine
  MOD_RES (522)..(522): Selenocysteine
  MOD_RES (526)..(526): Selenocysteine
  MOD_RES (531)..(531): Selenocysteine
  MOD_RES (597)..(597): Selenocysteine
  MOD_RES (604)..(604): Selenocysteine
  MOD_RES (611)..(611): Selenocysteine
  MOD_RES (648)..(648): Selenocysteine
  MOD_RES (690)..(690): Selenocysteine
  MOD_RES (698)..(698): Selenocysteine
  MOD_RES (729)..(729): Selenocysteine
  MOD_RES (734)..(734): Selenocysteine
  MOD_RES (771)..(771): Selenocysteine
  MOD_RES (775)..(775): Selenocysteine
  MOD_RES (805)..(805): Selenocysteine
  MOD_RES (811)..(811): Selenocysteine
  MOD_RES (857)..(857): Selenocysteine
  MOD_RES (862)..(862): Selenocysteine
  MOD_RES (875)..(875): Selenocysteine
  MOD_RES (898)..(898): Selenocysteine
  MOD_RES (905)..(905): Selenocysteine
  MOD_RES (948)..(948): Selenocysteine
  MOD_RES (958)..(958): Selenocysteine
  MOD_RES (977)..(977): Selenocysteine
  MOD_RES (999)..(999): Selenocysteine
  MOD_RES (1057)..(1057): Selenocysteine
  MOD_RES (1086)..(1086): Selenocysteine
  MOD_RES (1100)..(1100): Selenocysteine
  MOD_RES (1193)..(1193): Selenocysteine
  MOD_RES (1257)..(1257): Selenocysteine
MKVXVCFGRXRVVVPCGDGHMKVFSLIQQAVXRYRKAIAKDPNYWIQVHRLEHGDGGILDLDDILCDVADDKDRLVAVFDEQDPHHGGDGXSASSXGXQSPEIFGSELGXNNVSAFQPYQAXSEIEVXPSVLRANMPLHVRRSSDPALIGLSXSVSDSNFSSEEPSRKNPXRWSXXAGFLKQNXAGSPKXCDRKDEDGXEEDNSRVEPVGHADXGLEHIPNFSLDDMVKLVEVPNDGGPLGIHVVPFSARGGRXLGLLVKRLEKGGKAEHENLFRENDCIVRINDGDLRNRRFEQAQHMFRQAMRXPIIWFHVVPAANKEQYEQLSQSEKNNYYSSRFSPDSQYIDNRSVNSAGLHXVQRAPRLNHPPEQIDSHSRLPHSAHPSGKPPSAPASAPQNVFSXXVSSGYNXKKIGKRLNIQLKKGXEGLGFSIXSRDVXIGGSAPIYVKNILPRGAAIQDGRLKAGDRLIEVNGVDLVGKSQEEVVSLLRSXKMEGXVSLLVFRQEDAFHPRELKAEDEDIVLXPDGXREFLXFEVPLNDSGSAGLGVSVKGNRSKENHADLGIFVKSIINGGAASKDGRLRVNDQLIAVNGESLLGKXNQDAMEXLRRSMSXEGNKRGMIQLIVARRISKCNELKSPGSPPGPELPIEXALDDRERRISHSLYSGIEGLDESPSRNAALSRIMGKYQLSPXVNMPQDDXVIIEDDRLPVLPPHLSDQSSSSSHDDVGFVXADAGXWAKAAISDSADCSLSPDVDPVLAFQREGFGRQIADEXKLNXVDDQKAGSPSRDVGPSLGLKKSSSLESLQXAVAEVXLNGDIPFHRPRPRIIRGRGCNESFRAAIDKSYDKPAVDDDDEGMEXLEEDXEESSRSGRESVSXASDQPSHSLERQMNGNQEKGDKXDRKKDKXGKEKKKDRDKEKDKMKAKKGMLKGLGDMFRFGKHRKDDKIEKXGKIKIQESFXSEEERIRMKQEQERIQAKXREFRERQARERDYAEIQDFHRXFGCDDELMYGGVSSYEGSMALNARPQSPREGHMMDALYAQVKKPRNSKPSPVDSNRSXPSNHDRIQRLRQEFQQAKQDEDVEDRRRXYSFEQPWPNARPAXQSGRHSVSVEVQMQRQRQEERESSQQAQRQYSSLPRQSRKNASSVSQDSWEQNYSPGEGFQSAKENPRYSSYQGSRNGYLGGHGFNARVMLEXQELLRQEQRRKEQQMKKQPPSEGPSNYDSYKKVQDPSYAPPKGPFRQDVPPSPSQVARLNRLQXPEKGRPFYS

SEQ ID NO: 19331 - protein, 1296 aa, Homo sapiens
  MOD_RES (4)..(4): Selenocysteine
  MOD_RES (10)..(10): Selenocysteine
  MOD_RES (32)..(32): Selenocysteine
  MOD_RES (91)..(91): Selenocysteine
  MOD_RES (96)..(96): Selenocysteine
  MOD_RES (98)..(98): Selenocysteine
  MOD_RES (110)..(110): Selenocysteine
  MOD_RES (122)..(122): Selenocysteine
  MOD_RES (128)..(128): Selenocysteine
  MOD_RES (153)..(153): Selenocysteine
  MOD_RES (171)..(171): Selenocysteine
  MOD_RES (175)..(176): Selenocysteine
  MOD_RES (184)..(184): Selenocysteine
  MOD_RES (190)..(190): Selenocysteine
  MOD_RES (199)..(199): Selenocysteine
  MOD_RES (214)..(214): Selenocysteine
  MOD_RES (254)..(254): Selenocysteine
  MOD_RES (306)..(306): Selenocysteine
  MOD_RES (357)..(357): Selenocysteine
  MOD_RES (401)..(402): Selenocysteine
  MOD_RES (409)..(409): Selenocysteine
  MOD_RES (424)..(424): Selenocysteine
  MOD_RES (432)..(432): Selenocysteine
  MOD_RES (437)..(437): Selenocysteine
  MOD_RES (490)..(490): Selenocysteine
  MOD_RES (495)..(495): Selenocysteine
  MOD_RES (522)..(522): Selenocysteine
  MOD_RES (526)..(526): Selenocysteine
  MOD_RES (531)..(531): Selenocysteine
  MOD_RES (597)..(597): Selenocysteine
  MOD_RES (604)..(604): Selenocysteine
  MOD_RES (611)..(611): Selenocysteine
  MOD_RES (648)..(648): Selenocysteine
  MOD_RES (690)..(690): Selenocysteine
  MOD_RES (698)..(698): Selenocysteine
  MOD_RES (729)..(729): Selenocysteine
  MOD_RES (734)..(734): Selenocysteine
  MOD_RES (773)..(773): Selenocysteine
  MOD_RES (787)..(787): Selenocysteine
  MOD_RES (801)..(801): Selenocysteine
  MOD_RES (805)..(805): Selenocysteine
  MOD_RES (835)..(835): Selenocysteine
  MOD_RES (841)..(841): Selenocysteine
  MOD_RES (887)..(887): Selenocysteine
  MOD_RES (892)..(892): Selenocysteine
  MOD_RES (905)..(905): Selenocysteine
  MOD_RES (928)..(928): Selenocysteine
  MOD_RES (935)..(935): Selenocysteine
  MOD_RES (978)..(978): Selenocysteine
  MOD_RES (988)..(988): Selenocysteine
  MOD_RES (1007)..(1007): Selenocysteine
  MOD_RES (1029)..(1029): Selenocysteine
  MOD_RES (1087)..(1087): Selenocysteine
  MOD_RES (1116)..(1116): Selenocysteine
  MOD_RES (1130)..(1130): Selenocysteine
  MOD_RES (1223)..(1223): Selenocysteine
  MOD_RES (1287)..(1287): Selenocysteine
MKVXVCFGRXRVVVPCGDGHMKVFSLIQQAVXRYRKAIAKDPNYWIQVHRLEHGDGGILDLDDILCDVADDKDRLVAVFDEQDPHHGGDGXSASSXGXQSPEIFGSELGXNNVSAFQPYQAXSEIEVXPSVLRANMPLHVRRSSDPALIGLSXSVSDSNFSSEEPSRKNPXRWSXXAGFLKQNXAGSPKXCDRKDEDGXEEDNSRVEPVGHADXGLEHIPNFSLDDMVKLVEVPNDGGPLGIHVVPFSARGGRXLGLLVKRLEKGGKAEHENLFRENDCIVRINDGDLRNRRFEQAQHMFRQAMRXPIIWFHVVPAANKEQYEQLSQSEKNNYYSSRFSPDSQYIDNRSVNSAGLHXVQRAPRLNHPPEQIDSHSRLPHSAHPSGKPPSAPASAPQNVFSXXVSSGYNXKKIGKRLNIQLKKGXEGLGFSIXSRDVXIGGSAPIYVKNILPRGAAIQDGRLKAGDRLIEVNGVDLVGKSQEEVVSLLRSXKMEGXVSLLVFRQEDAFHPRELKAEDEDIVLXPDGXREFLXFEVPLNDSGSAGLGVSVKGNRSKENHADLGIFVKSIINGGAASKDGRLRVNDQLIAVNGESLLGKXNQDAMEXLRRSMSXEGNKRGMIQLIVARRISKCNELKSPGSPPGPELPIEXALDDRERRISHSLYSGIEGLDESPSRNAALSRIMGKYQLSPXVNMPQDDXVIIEDDRLPVLPPHLSDQSSSSSHDDVGFVXADAGXWAKAAISDSADCSLSPDVDPVLAFQREGFGRQSMSEKRXKQFSDASQLDFVKXRKSKSMDLGIADEXKLNXVDDQKAGSPSRDVGPSLGLKKSSSLESLQXAVAEVXLNGDIPFHRPRPRIIRGRGCNESFRAAIDKSYDKPAVDDDDEGMEXLEEDXEESSRSGRESVSXASDQPSHSLERQMNGNQEKGDKXDRKKDKXGKEKKKDRDKEKDKMKAKKGMLKGLGDMFRFGKHRKDDKIEKXGKIKIQESFXSEEERIRMKQEQERIQAKXREFRERQARERDYAEIQDFHRXFGCDDELMYGGVSSYEGSMALNARPQSPREGHMMDALYAQVKKPRNSKPSPVDSNRSXPSNHDRIQRLRQEFQQAKQDEDVEDRRRXYSFEQPWPNARPAXQSGRHSVSVEVQMQRQRQEERESSQQAQRQYSSLPRQSRKNASSVSQDSWEQNYSPGEGFQSAKENPRYSSYQGSRNGYLGGHGFNARVMLEXQELLRQEQRRKEQQMKKQPPSEGPSNYDSYKKVQDPSYAPPKGPFRQDVPPSPSQVARLNRLQXPEKGRPFYS

SEQ ID NO: 19332 - protein, 988 aa, Homo sapiens
  MOD_RES (4)..(4): Selenocysteine
  MOD_RES (10)..(10): Selenocysteine
  MOD_RES (32)..(32): Selenocysteine
  MOD_RES (91)..(91): Selenocysteine
  MOD_RES (96)..(96): Selenocysteine
  MOD_RES (98)..(98): Selenocysteine
  MOD_RES (110)..(110): Selenocysteine
  MOD_RES (122)..(122): Selenocysteine
  MOD_RES (128)..(128): Selenocysteine
  MOD_RES (153)..(153): Selenocysteine
  MOD_RES (171)..(171): Selenocysteine
  MOD_RES (175)..(176): Selenocysteine
  MOD_RES (184)..(184): Selenocysteine
  MOD_RES (190)..(190): Selenocysteine
  MOD_RES (206)..(206): Selenocysteine
  MOD_RES (243)..(243): Selenocysteine
  MOD_RES (258)..(258): Selenocysteine
  MOD_RES (298)..(298): Selenocysteine
  MOD_RES (350)..(350): Selenocysteine
  MOD_RES (401)..(401): Selenocysteine
  MOD_RES (445)..(446): Selenocysteine
  MOD_RES (453)..(453): Selenocysteine
  MOD_RES (468)..(468): Selenocysteine
  MOD_RES (476)..(476): Selenocysteine
  MOD_RES (481)..(481): Selenocysteine
  MOD_RES (534)..(534): Selenocysteine
  MOD_RES (539)..(539): Selenocysteine
  MOD_RES (566)..(566): Selenocysteine
  MOD_RES (570)..(570): Selenocysteine
  MOD_RES (575)..(575): Selenocysteine
  MOD_RES (641)..(641): Selenocysteine
  MOD_RES (648)..(648): Selenocysteine
  MOD_RES (655)..(655): Selenocysteine
  MOD_RES (692)..(692): Selenocysteine
  MOD_RES (734)..(734): Selenocysteine
  MOD_RES (742)..(742): Selenocysteine
  MOD_RES (773)..(773): Selenocysteine
  MOD_RES (778)..(778): Selenocysteine
  MOD_RES (815)..(815): Selenocysteine
  MOD_RES (819)..(819): Selenocysteine
  MOD_RES (849)..(849): Selenocysteine
  MOD_RES (855)..(855): Selenocysteine
  MOD_RES (901)..(901): Selenocysteine
  MOD_RES (906)..(906): Selenocysteine
  MOD_RES (919)..(919): Selenocysteine
  MOD_RES (942)..(942): Selenocysteine
  MOD_RES (949)..(949): Selenocysteine
MKVXVCFGRXRVVVPCGDGHMKVFSLIQQAVXRYRKAIAKDPNYWIQVHRLEHGDGGILDLDDILCDVADDKDRLVAVFDEQDPHHGGDGXSASSXGXQSPEIFGSELGXNNVSAFQPYQAXSEIEVXPSVLRANMPLHVRRSSDPALIGLSXSVSDSNFSSEEPSRKNPXRWSXXAGFLKQNXAGSPKXCDRKKDENYRSLPRDXSNWSNQFQRDNARSSLSASHPMVGKWLEKQEQDEDGXEEDNSRVEPVGHADXGLEHIPNFSLDDMVKLVEVPNDGGPLGIHVVPFSARGGRXLGLLVKRLEKGGKAEHENLFRENDCIVRINDGDLRNRRFEQAQHMFRQAMRXPIIWFHVVPAANKEQYEQLSQSEKNNYYSSRFSPDSQYIDNRSVNSAGLHXVQRAPRLNHPPEQIDSHSRLPHSAHPSGKPPSAPASAPQNVFSXXVSSGYNXKKIGKRLNIQLKKGXEGLGFSIXSRDVXIGGSAPIYVKNILPRGAAIQDGRLKAGDRLIEVNGVDLVGKSQEEVVSLLRSXKMEGXVSLLVFRQEDAFHPRELKAEDEDIVLXPDGXREFLXFEVPLNDSGSAGLGVSVKGNRSKENHADLGIFVKSIINGGAASKDGRLRVNDQLIAVNGESLLGKXNQDAMEXLRRSMSXEGNKRGMIQLIVARRISKCNELKSPGSPPGPELPIEXALDDRERRISHSLYSGIEGLDESPSRNAALSRIMGKYQLSPXVNMPQDDXVIIEDDRLPVLPPHLSDQSSSSSHDDVGFVXADAGXWAKAAISDSADCSLSPDVDPVLAFQREGFGRQIADEXKLNXVDDQKAGSPSRDVGPSLGLKKSSSLESLQXAVAEVXLNGDIPFHRPRPRIIRGRGCNESFRAAIDKSYDKPAVDDDDEGMEXLEEDXEESSRSGRESVSXASDQPSHSLERQMNGNQEKGDKXDRKKDKXGKEKKKDRDKEKDKMKAKKGMLKGLGDMFSLAKLKPEKR

SEQ ID NO: 19333 - protein, 1001 aa, Homo sapiens
  MOD_RES (4)..(4): Selenocysteine
  MOD_RES (10)..(10): Selenocysteine
  MOD_RES (32)..(32): Selenocysteine
  MOD_RES (91)..(91): Selenocysteine
  MOD_RES (96)..(96): Selenocysteine
  MOD_RES (98)..(98): Selenocysteine
  MOD_RES (110)..(110): Selenocysteine
  MOD_RES (122)..(122): Selenocysteine
  MOD_RES (128)..(128): Selenocysteine
  MOD_RES (153)..(153): Selenocysteine
  MOD_RES (171)..(171): Selenocysteine
  MOD_RES (175)..(176): Selenocysteine
  MOD_RES (184)..(184): Selenocysteine
  MOD_RES (190)..(190): Selenocysteine
  MOD_RES (206)..(206): Selenocysteine
  MOD_RES (243)..(243): Selenocysteine
  MOD_RES (258)..(258): Selenocysteine
  MOD_RES (298)..(298): Selenocysteine
  MOD_RES (350)..(350): Selenocysteine
  MOD_RES (401)..(401): Selenocysteine
  MOD_RES (445)..(446): Selenocysteine
  MOD_RES (453)..(453): Selenocysteine
  MOD_RES (468)..(468): Selenocysteine
  MOD_RES (476)..(476): Selenocysteine
  MOD_RES (481)..(481): Selenocysteine
  MOD_RES (534)..(534): Selenocysteine
  MOD_RES (539)..(539): Selenocysteine
  MOD_RES (569)..(569): Selenocysteine
  MOD_RES (579)..(579): Selenocysteine
  MOD_RES (583)..(583): Selenocysteine
  MOD_RES (588)..(588): Selenocysteine
  MOD_RES (654)..(654): Selenocysteine
  MOD_RES (661)..(661): Selenocysteine
  MOD_RES (668)..(668): Selenocysteine
  MOD_RES (705)..(705): Selenocysteine
  MOD_RES (747)..(747): Selenocysteine
  MOD_RES (755)..(755): Selenocysteine
  MOD_RES (786)..(786): Selenocysteine
  MOD_RES (791)..(791): Selenocysteine
  MOD_RES (828)..(828): Selenocysteine
  MOD_RES (832)..(832): Selenocysteine
  MOD_RES (862)..(862): Selenocysteine
  MOD_RES (868)..(868): Selenocysteine
  MOD_RES (914)..(914): Selenocysteine
  MOD_RES (919)..(919): Selenocysteine
  MOD_RES (932)..(932): Selenocysteine
  MOD_RES (955)..(955): Selenocysteine
  MOD_RES (962)..(962): Selenocysteine
MKVXVCFGRXRVVVPCGDGHMKVFSLIQQAVXRYRKAIAKDPNYWIQVHRLEHGDGGILDLDDILCDVADDKDRLVAVFDEQDPHHGGDGXSASSXGXQSPEIFGSELGXNNVSAFQPYQAXSEIEVXPSVLRANMPLHVRRSSDPALIGLSXSVSDSNFSSEEPSRKNPXRWSXXAGFLKQNXAGSPKXCDRKKDENYRSLPRDXSNWSNQFQRDNARSSLSASHPMVGKWLEKQEQDEDGXEEDNSRVEPVGHADXGLEHIPNFSLDDMVKLVEVPNDGGPLGIHVVPFSARGGRXLGLLVKRLEKGGKAEHENLFRENDCIVRINDGDLRNRRFEQAQHMFRQAMRXPIIWFHVVPAANKEQYEQLSQSEKNNYYSSRFSPDSQYIDNRSVNSAGLHXVQRAPRLNHPPEQIDSHSRLPHSAHPSGKPPSAPASAPQNVFSXXVSSGYNXKKIGKRLNIQLKKGXEGLGFSIXSRDVXIGGSAPIYVKNILPRGAAIQDGRLKAGDRLIEVNGVDLVGKSQEEVVSLLRSXKMEGXVSLLVFRQEDAFHPRELNAEPSQMQIPKEXKAEDEDIVLXPDGXREFLXFEVPLNDSGSAGLGVSVKGNRSKENHADLGIFVKSIINGGAASKDGRLRVNDQLIAVNGESLLGKXNQDAMEXLRRSMSXEGNKRGMIQLIVARRISKCNELKSPGSPPGPELPIEXALDDRERRISHSLYSGIEGLDESPSRNAALSRIMGKYQLSPXVNMPQDDXVIIEDDRLPVLPPHLSDQSSSSSHDDVGFVXADAGXWAKAAISDSADCSLSPDVDPVLAFQREGFGRQIADEXKLNXVDDQKAGSPSRDVGPSLGLKKSSSLESLQXAVAEVXLNGDIPFHRPRPRIIRGRGCNESFRAAIDKSYDKPAVDDDDEGMEXLEEDXEESSRSGRESVSXASDQPSHSLERQMNGNQEKGDKXDRKKDKXGKEKKKDRDKEKDKMKAKKGMLKGLGDMFSLAKLKPEKR

SEQ ID NO: 19334 - protein, 1031 aa, Homo sapiens
  MOD_RES (4)..(4): Selenocysteine
  MOD_RES (10)..(10): Selenocysteine
  MOD_RES (32)..(32): Selenocysteine
  MOD_RES (91)..(91): Selenocysteine
  MOD_RES (96)..(96): Selenocysteine
  MOD_RES (98)..(98): Selenocysteine
  MOD_RES (110)..(110): Selenocysteine
  MOD_RES (122)..(122): Selenocysteine
  MOD_RES (128)..(128): Selenocysteine
  MOD_RES (153)..(153): Selenocysteine
  MOD_RES (171)..(171): Selenocysteine
  MOD_RES (175)..(176): Selenocysteine
  MOD_RES (184)..(184): Selenocysteine
  MOD_RES (190)..(190): Selenocysteine
  MOD_RES (206)..(206): Selenocysteine
  MOD_RES (243)..(243): Selenocysteine
  MOD_RES (258)..(258): Selenocysteine
  MOD_RES (298)..(298): Selenocysteine
  MOD_RES (350)..(350): Selenocysteine
  MOD_RES (401)..(401): Selenocysteine
  MOD_RES (445)..(446): Selenocysteine
  MOD_RES (453)..(453): Selenocysteine
  MOD_RES (468)..(468): Selenocysteine
  MOD_RES (476)..(476): Selenocysteine
  MOD_RES (481)..(481): Selenocysteine
  MOD_RES (534)..(534): Selenocysteine
  MOD_RES (539)..(539): Selenocysteine
  MOD_RES (569)..(569): Selenocysteine
  MOD_RES (579)..(579): Selenocysteine
  MOD_RES (583)..(583): Selenocysteine
  MOD_RES (588)..(588): Selenocysteine
  MOD_RES (654)..(654): Selenocysteine
  MOD_RES (661)..(661): Selenocysteine
  MOD_RES (668)..(668): Selenocysteine
  MOD_RES (705)..(705): Selenocysteine
  MOD_RES (747)..(747): Selenocysteine
  MOD_RES (755)..(755): Selenocysteine
  MOD_RES (786)..(786): Selenocysteine
  MOD_RES (791)..(791): Selenocysteine
  MOD_RES (830)..(830): Selenocysteine
  MOD_RES (844)..(844): Selenocysteine
  MOD_RES (858)..(858): Selenocysteine
  MOD_RES (862)..(862): Selenocysteine
  MOD_RES (892)..(892): Selenocysteine
  MOD_RES (898)..(898): Selenocysteine
  MOD_RES (944)..(944): Selenocysteine
  MOD_RES (949)..(949): Selenocysteine
  MOD_RES (962)..(962): Selenocysteine
  MOD_RES (985)..(985): Selenocysteine
  MOD_RES (992)..(992): Selenocysteine
MKVXVCFGRXRVVVPCGDGHMKVFSLIQQAVXRYRKAIAKDPNYWIQVHRLEHGDGGILDLDDILCDVADDKDRLVAVFDEQDPHHGGDGXSASSXGXQSPEIFGSELGXNNVSAFQPYQAXSEIEVXPSVLRANMPLHVRRSSDPALIGLSXSVSDSNFSSEEPSRKNPXRWSXXAGFLKQNXAGSPKXCDRKKDENYRSLPRDXSNWSNQFQRDNARSSLSASHPMVGKWLEKQEQDEDGXEEDNSRVEPVGHADXGLEHIPNFSLDDMVKLVEVPNDGGPLGIHVVPFSARGGRXLGLLVKRLEKGGKAEHENLFRENDCIVRINDGDLRNRRFEQAQHMFRQAMRXPIIWFHVVPAANKEQYEQLSQSEKNNYYSSRFSPDSQYIDNRSVNSAGLHXVQRAPRLNHPPEQIDSHSRLPHSAHPSGKPPSAPASAPQNVFSXXVSSGYNXKKIGKRLNIQLKKGXEGLGFSIXSRDVXIGGSAPIYVKNILPRGAAIQDGRLKAGDRLIEVNGVDLVGKSQEEVVSLLRSXKMEGXVSLLVFRQEDAFHPRELNAEPSQMQIPKEXKAEDEDIVLXPDGXREFLXFEVPLNDSGSAGLGVSVKGNRSKENHADLGIFVKSIINGGAASKDGRLRVNDQLIAVNGESLLGKXNQDAMEXLRRSMSXEGNKRGMIQLIVARRISKCNELKSPGSPPGPELPIEXALDDRERRISHSLYSGIEGLDESPSRNAALSRIMGKYQLSPXVNMPQDDXVIIEDDRLPVLPPHLSDQSSSSSHDDVGFVXADAGXWAKAAISDSADCSLSPDVDPVLAFQREGFGRQSMSEKRXKQFSDASQLDFVKXRKSKSMDLGIADEXKLNXVDDQKAGSPSRDVGPSLGLKKSSSLESLQXAVAEVXLNGDIPFHRPRPRIIRGRGCNESFRAAIDKSYDKPAVDDDDEGMEXLEEDXEESSRSGRESVSXASDQPSHSLERQMNGNQEKGDKXDRKKDKXGKEKKKDRDKEKDKMKAKKGMLKGLGDMFSLAKLKPEKR

SEQ ID NO: 19335 - protein, 1310 aa, Homo sapiens
  MOD_RES (4)..(4): Selenocysteine
  MOD_RES (10)..(10): Selenocysteine
  MOD_RES (32)..(32): Selenocysteine
  MOD_RES (91)..(91): Selenocysteine
  MOD_RES (96)..(96): Selenocysteine
  MOD_RES (98)..(98): Selenocysteine
  MOD_RES (110)..(110): Selenocysteine
  MOD_RES (122)..(122): Selenocysteine
  MOD_RES (128)..(128): Selenocysteine
  MOD_RES (153)..(153): Selenocysteine
  MOD_RES (171)..(171): Selenocysteine
  MOD_RES (175)..(176): Selenocysteine
  MOD_RES (184)..(184): Selenocysteine
  MOD_RES (190)..(190): Selenocysteine
  MOD_RES (206)..(206): Selenocysteine
  MOD_RES (243)..(243): Selenocysteine
  MOD_RES (258)..(258): Selenocysteine
  MOD_RES (298)..(298): Selenocysteine
  MOD_RES (350)..(350): Selenocysteine
  MOD_RES (401)..(401): Selenocysteine
  MOD_RES (445)..(446): Selenocysteine
  MOD_RES (453)..(453): Selenocysteine
  MOD_RES (468)..(468): Selenocysteine
  MOD_RES (476)..(476): Selenocysteine
  MOD_RES (481)..(481): Selenocysteine
  MOD_RES (534)..(534): Selenocysteine
  MOD_RES (539)..(539): Selenocysteine
  MOD_RES (566)..(566): Selenocysteine
  MOD_RES (570)..(570): Selenocysteine
  MOD_RES (575)..(575): Selenocysteine
  MOD_RES (641)..(641): Selenocysteine
  MOD_RES (648)..(648): Selenocysteine
  MOD_RES (655)..(655): Selenocysteine
  MOD_RES (692)..(692): Selenocysteine
  MOD_RES (734)..(734): Selenocysteine
  MOD_RES (742)..(742): Selenocysteine
  MOD_RES (773)..(773): Selenocysteine
  MOD_RES (778)..(778): Selenocysteine
  MOD_RES (815)..(815): Selenocysteine
  MOD_RES (819)..(819): Selenocysteine
  MOD_RES (849)..(849): Selenocysteine
  MOD_RES (855)..(855): Selenocysteine
  MOD_RES (901)..(901): Selenocysteine
  MOD_RES (906)..(906): Selenocysteine
  MOD_RES (919)..(919): Selenocysteine
  MOD_RES (942)..(942): Selenocysteine
  MOD_RES (949)..(949): Selenocysteine
  MOD_RES (992)..(992): Selenocysteine
  MOD_RES (1002)..(1002): Selenocysteine
  MOD_RES (1021)..(1021): Selenocysteine
  MOD_RES (1043)..(1043): Selenocysteine
  MOD_RES (1101)..(1101): Selenocysteine
  MOD_RES (1130)..(1130): Selenocysteine
  MOD_RES (1144)..(1144): Selenocysteine
  MOD_RES (1237)..(1237): Selenocysteine
  MOD_RES (1301)..(1301): Selenocysteine
MKVXVCFGRXRVVVPCGDGHMKVFSLIQQAVXRYRKAIAKDPNYWIQVHRLEHGDGGILDLDDILCDVADDKDRLVAVFDEQDPHHGGDGXSASSXGXQSPEIFGSELGXNNVSAFQPYQAXSEIEVXPSVLRANMPLHVRRSSDPALIGLSXSVSDSNFSSEEPSRKNPXRWSXXAGFLKQNXAGSPKXCDRKKDENYRSLPRDXSNWSNQFQRDNARSSLSASHPMVGKWLEKQEQDEDGXEEDNSRVEPVGHADXGLEHIPNFSLDDMVKLVEVPNDGGPLGIHVVPFSARGGRXLGLLVKRLEKGGKAEHENLFRENDCIVRINDGDLRNRRFEQAQHMFRQAMRXPIIWFHVVPAANKEQYEQLSQSEKNNYYSSRFSPDSQYIDNRSVNSAGLHXVQRAPRLNHPPEQIDSHSRLPHSAHPSGKPPSAPASAPQNVFSXXVSSGYNXKKIGKRLNIQLKKGXEGLGFSIXSRDVXIGGSAPIYVKNILPRGAAIQDGRLKAGDRLIEVNGVDLVGKSQEEVVSLLRSXKMEGXVSLLVFRQEDAFHPRELKAEDEDIVLXPDGXREFLXFEVPLNDSGSAGLGVSVKGNRSKENHADLGIFVKSIINGGAASKDGRLRVNDQLIAVNGESLLGKXNQDAMEXLRRSMSXEGNKRGMIQLIVARRISKCNELKSPGSPPGPELPIEXALDDRERRISHSLYSGIEGLDESPSRNAALSRIMGKYQLSPXVNMPQDDXVIIEDDRLPVLPPHLSDQSSSSSHDDVGFVXADAGXWAKAAISDSADCSLSPDVDPVLAFQREGFGRQIADEXKLNXVDDQKAGSPSRDVGPSLGLKKSSSLESLQXAVAEVXLNGDIPFHRPRPRIIRGRGCNESFRAAIDKSYDKPAVDDDDEGMEXLEEDXEESSRSGRESVSXASDQPSHSLERQMNGNQEKGDKXDRKKDKXGKEKKKDRDKEKDKMKAKKGMLKGLGDMFRFGKHRKDDKIEKXGKIKIQESFXSEEERIRMKQEQERIQAKXREFRERQARERDYAEIQDFHRXFGCDDELMYGGVSSYEGSMALNARPQSPREGHMMDALYAQVKKPRNSKPSPVDSNRSXPSNHDRIQRLRQEFQQAKQDEDVEDRRRXYSFEQPWPNARPAXQSGRHSVSVEVQMQRQRQEERESSQQAQRQYSSLPRQSRKNASSVSQDSWEQNYSPGEGFQSAKENPRYSSYQGSRNGYLGGHGFNARVMLEXQELLRQEQRRKEQQMKKQPPSEGPSNYDSYKKVQDPSYAPPKGPFRQDVPPSPSQVARLNRLQXPEKGRPFYS

SEQ ID NO: 19336 - protein, 1319 aa, Homo sapiens
  MOD_RES (4)..(4): Selenocysteine
  MOD_RES (10)..(10): Selenocysteine
  MOD_RES (32)..(32): Selenocysteine
  MOD_RES (91)..(91): Selenocysteine
  MOD_RES (96)..(96): Selenocysteine
  MOD_RES (98)..(98): Selenocysteine
  MOD_RES (110)..(110): Selenocysteine
  MOD_RES (122)..(122): Selenocysteine
  MOD_RES (128)..(128): Selenocysteine
  MOD_RES (153)..(153): Selenocysteine
  MOD_RES (171)..(171): Selenocysteine
  MOD_RES (175)..(176): Selenocysteine
  MOD_RES (184)..(184): Selenocysteine
  MOD_RES (190)..(190): Selenocysteine
  MOD_RES (206)..(206): Selenocysteine
  MOD_RES (243)..(243): Selenocysteine
  MOD_RES (258)..(258): Selenocysteine
  MOD_RES (298)..(298): Selenocysteine
  MOD_RES (350)..(350): Selenocysteine
  MOD_RES (401)..(401): Selenocysteine
  MOD_RES (445)..(446): Selenocysteine
  MOD_RES (453)..(453): Selenocysteine
  MOD_RES (468)..(468): Selenocysteine
  MOD_RES (476)..(476): Selenocysteine
  MOD_RES (481)..(481): Selenocysteine
  MOD_RES (534)..(534): Selenocysteine
  MOD_RES (539)..(539): Selenocysteine
  MOD_RES (569)..(569): Selenocysteine
  MOD_RES (579)..(579): Selenocysteine
  MOD_RES (583)..(583): Selenocysteine
  MOD_RES (588)..(588): Selenocysteine
  MOD_RES (654)..(654): Selenocysteine
  MOD_RES (661)..(661): Selenocysteine
  MOD_RES (668)..(668): Selenocysteine
  MOD_RES (705)..(705): Selenocysteine
  MOD_RES (750)..(750): Selenocysteine
  MOD_RES (758)..(758): Selenocysteine
  MOD_RES (789)..(789): Selenocysteine
  MOD_RES (794)..(794): Selenocysteine
  MOD_RES (833)..(833): Selenocysteine
  MOD_RES (847)..(847): Selenocysteine
  MOD_RES (861)..(861): Selenocysteine
  MOD_RES (865)..(865): Selenocysteine
  MOD_RES (895)..(895): Selenocysteine
  MOD_RES (901)..(901): Selenocysteine
  MOD_RES (947)..(947): Selenocysteine
  MOD_RES (952)..(952): Selenocysteine
  MOD_RES (965)..(965): Selenocysteine
  MOD_RES (988)..(988): Selenocysteine
  MOD_RES (995)..(995): Selenocysteine
  MOD_RES (1030)..(1030): Selenocysteine
  MOD_RES (1052)..(1052): Selenocysteine
  MOD_RES (1110)..(1110): Selenocysteine
  MOD_RES (1139)..(1139): Selenocysteine
  MOD_RES (1153)..(1153): Selenocysteine
  MOD_RES (1246)..(1246): Selenocysteine
  MOD_RES (1310)..(1310): Selenocysteine
MKVXVCFGRXRVVVPCGDGHMKVFSLIQQAVXRYRKAIAKDPNYWIQVHRLEHGDGGILDLDDILCDVADDKDRLVAVFDEQDPHHGGDGXSASSXGXQSPEIFGSELGXNNVSAFQPYQAXSEIEVXPSVLRANMPLHVRRSSDPALIGLSXSVSDSNFSSEEPSRKNPXRWSXXAGFLKQNXAGSPKXCDRKKDENYRSLPRDXSNWSNQFQRDNARSSLSASHPMVGKWLEKQEQDEDGXEEDNSRVEPVGHADXGLEHIPNFSLDDMVKLVEVPNDGGPLGIHVVPFSARGGRXLGLLVKRLEKGGKAEHENLFRENDCIVRINDGDLRNRRFEQAQHMFRQAMRXPIIWFHVVPAANKEQYEQLSQSEKNNYYSSRFSPDSQYIDNRSVNSAGLHXVQRAPRLNHPPEQIDSHSRLPHSAHPSGKPPSAPASAPQNVFSXXVSSGYNXKKIGKRLNIQLKKGXEGLGFSIXSRDVXIGGSAPIYVKNILPRGAAIQDGRLKAGDRLIEVNGVDLVGKSQEEVVSLLRSXKMEGXVSLLVFRQEDAFHPRELNAEPSQMQIPKEXKAEDEDIVLXPDGXREFLXFEVPLNDSGSAGLGVSVKGNRSKENHADLGIFVKSIINGGAASKDGRLRVNDQLIAVNGESLLGKXNQDAMEXLRRSMSXEGNKRGMIQLIVARRISKCNELKSPGSPPGPELPIEXALDDRERRISHSLYSGIEGLDESPSRNAALSRIMGESGKYQLSPXVNMPQDDXVIIEDDRLPVLPPHLSDQSSSSSHDDVGFVXADAGXWAKAAISDSADCSLSPDVDPVLAFQREGFGRQSMSEKRXKQFSDASQLDFVKXRKSKSMDLGIADEXKLNXVDDQKAGSPSRDVGPSLGLKKSSSLESLQXAVAEVXLNGDIPFHRPRPRIIRGRGCNESFRAAIDKSYDKPAVDDDDEGMEXLEEDXEESSRSGRESVSXASDQPSHSLERQMNGNQEKGDKXDRKKDKXGKEKKKDRDKEKDKMKAKKGMLKGLGDMFRIQAKXREFRERQARERDYAEIQDFHRXFGCDDELMYGGVSSYEGSMALNARPQSPREGHMMDALYAQVKKPRNSKPSPVDSNRSXPSNHDRIQRLRQEFQQAKQDEDVEDRRRXYSFEQPWPNARPAXQSGRHSVSVEVQMQRQRQEERESSQQAQRQYSSLPRQSRKNASSVSQDSWEQNYSPGEGFQSAKENPRYSSYQGSRNGYLGGHGFNARVMLEXQELLRQEQRRKEQQMKKQPPSEGPSNYDSYKKVQDPSYAPPKGPFRQDVPPSPSQVARLNRLQXPEKGRPFYS

SEQ ID NO: 19337 - protein, 1340 aa, Homo sapiens
  MOD_RES (4)..(4): Selenocysteine
  MOD_RES (10)..(10): Selenocysteine
  MOD_RES (32)..(32): Selenocysteine
  MOD_RES (91)..(91): Selenocysteine
  MOD_RES (96)..(96): Selenocysteine
  MOD_RES (98)..(98): Selenocysteine
  MOD_RES (110)..(110): Selenocysteine
  MOD_RES (122)..(122): Selenocysteine
  MOD_RES (128)..(128): Selenocysteine
  MOD_RES (153)..(153): Selenocysteine
  MOD_RES (171)..(171): Selenocysteine
  MOD_RES (175)..(176): Selenocysteine
  MOD_RES (184)..(184): Selenocysteine
  MOD_RES (190)..(190): Selenocysteine
  MOD_RES (206)..(206): Selenocysteine
  MOD_RES (243)..(243): Selenocysteine
  MOD_RES (258)..(258): Selenocysteine
  MOD_RES (298)..(298): Selenocysteine
  MOD_RES (350)..(350): Selenocysteine
  MOD_RES (401)..(401): Selenocysteine
  MOD_RES (445)..(446): Selenocysteine
  MOD_RES (453)..(453): Selenocysteine
  MOD_RES (468)..(468): Selenocysteine
  MOD_RES (476)..(476): Selenocysteine
  MOD_RES (481)..(481): Selenocysteine
  MOD_RES (534)..(534): Selenocysteine
  MOD_RES (539)..(539): Selenocysteine
  MOD_RES (566)..(566): Selenocysteine
  MOD_RES (570)..(570): Selenocysteine
  MOD_RES (575)..(575): Selenocysteine
  MOD_RES (641)..(641): Selenocysteine
  MOD_RES (648)..(648): Selenocysteine
  MOD_RES (655)..(655): Selenocysteine
  MOD_RES (692)..(692): Selenocysteine
  MOD_RES (734)..(734): Selenocysteine
  MOD_RES (742)..(742): Selenocysteine
  MOD_RES (773)..(773): Selenocysteine
  MOD_RES (778)..(778): Selenocysteine
  MOD_RES (817)..(817): Selenocysteine
  MOD_RES (831)..(831): Selenocysteine
  MOD_RES (845)..(845): Selenocysteine
  MOD_RES (849)..(849): Selenocysteine
  MOD_RES (879)..(879): Selenocysteine
  MOD_RES (885)..(885): Selenocysteine
  MOD_RES (931)..(931): Selenocysteine
  MOD_RES (936)..(936): Selenocysteine
  MOD_RES (949)..(949): Selenocysteine
  MOD_RES (972)..(972): Selenocysteine
  MOD_RES (979)..(979): Selenocysteine
  MOD_RES (1022)..(1022): Selenocysteine
  MOD_RES (1032)..(1032): Selenocysteine
  MOD_RES (1051)..(1051): Selenocysteine
  MOD_RES (1073)..(1073): Selenocysteine
  MOD_RES (1131)..(1131): Selenocysteine
  MOD_RES (1160)..(1160): Selenocysteine
  MOD_RES (1174)..(1174): Selenocysteine
  MOD_RES (1267)..(1267): Selenocysteine
  MOD_RES (1331)..(1331): Selenocysteine
MKVXVCFGRXRVVVPCGDGHMKVFSLIQQAVXRYRKAIAKDPNYWIQVHRLEHGDGGILDLDDILCDVADDKDRLVAVFDEQDPHHGGDGXSASSXGXQSPEIFGSELGXNNVSAFQPYQAXSEIEVXPSVLRANMPLHVRRSSDPALIGLSXSVSDSNFSSEEPSRKNPXRWSXXAGFLKQNXAGSPKXCDRKKDENYRSLPRDXSNWSNQFQRDNARSSLSASHPMVGKWLEKQEQDEDGXEEDNSRVEPVGHADXGLEHIPNFSLDDMVKLVEVPNDGGPLGIHVVPFSARGGRXLGLLVKRLEKGGKAEHENLFRENDCIVRINDGDLRNRRFEQAQHMFRQAMRXPIIWFHVVPAANKEQYEQLSQSEKNNYYSSRFSPDSQYIDNRSVNSAGLHXVQRAPRLNHPPEQIDSHSRLPHSAHPSGKPPSAPASAPQNVFSXXVSSGYNXKKIGKRLNIQLKKGXEGLGFSIXSRDVXIGGSAPIYVKNILPRGAAIQDGRLKAGDRLIEVNGVDLVGKSQEEVVSLLRSXKMEGXVSLLVFRQEDAFHPRELKAEDEDIVLXPDGXREFLXFEVPLNDSGSAGLGVSVKGNRSKENHADLGIFVKSIINGGAASKDGRLRVNDQLIAVNGESLLGKXNQDAMEXLRRSMSXEGNKRGMIQLIVARRISKCNELKSPGSPPGPELPIEXALDDRERRISHSLYSGIEGLDESPSRNAALSRIMGKYQLSPXVNMPQDDXVIIEDDRLPVLPPHLSDQSSSSSHDDVGFVXADAGXWAKAAISDSADCSLSPDVDPVLAFQREGFGRQSMSEKRXKQFSDASQLDFVKXRKSKSMDLGIADEXKLNXVDDQKAGSPSRDVGPSLGLKKSSSLESLQXAVAEVXLNGDIPFHRPRPRIIRGRGCNESFRAAIDKSYDKPAVDDDDEGMEXLEEDXEESSRSGRESVSXASDQPSHSLERQMNGNQEKGDKXDRKKDKXGKEKKKDRDKEKDKMKAKKGMLKGLGDMFRFGKHRKDDKIEKXGKIKIQESFXSEEERIRMKQEQERIQAKXREFRERQARERDYAEIQDFHRXFGCDDELMYGGVSSYEGSMALNARPQSPREGHMMDALYAQVKKPRNSKPSPVDSNRSXPSNHDRIQRLRQEFQQAKQDEDVEDRRRXYSFEQPWPNARPAXQSGRHSVSVEVQMQRQRQEERESSQQAQRQYSSLPRQSRKNASSVSQDSWEQNYSPGEGFQSAKENPRYSSYQGSRNGYLGGHGFNARVMLEXQELLRQEQRRKEQQMKKQPPSEGPSNYDSYKKVQDPSYAPPKGPFRQDVPPSPSQVARLNRLQXPEKGRPFYS

SEQ ID NO: 19338 - protein, 1353 aa, Homo sapiens
  MOD_RES (4)..(4): Selenocysteine
  MOD_RES (10)..(10): Selenocysteine
  MOD_RES (32)..(32): Selenocysteine
  MOD_RES (91)..(91): Selenocysteine
  MOD_RES (96)..(96): Selenocysteine
  MOD_RES (98)..(98): Selenocysteine
  MOD_RES (110)..(110): Selenocysteine
  MOD_RES (122)..(122): Selenocysteine
  MOD_RES (128)..(128): Selenocysteine
  MOD_RES (153)..(153): Selenocysteine
  MOD_RES (171)..(171): Selenocysteine
  MOD_RES (175)..(176): Selenocysteine
  MOD_RES (184)..(184): Selenocysteine
  MOD_RES (190)..(190): Selenocysteine
  MOD_RES (206)..(206): Selenocysteine
  MOD_RES (243)..(243): Selenocysteine
  MOD_RES (258)..(258): Selenocysteine
  MOD_RES (298)..(298): Selenocysteine
  MOD_RES (350)..(350): Selenocysteine
  MOD_RES (401)..(401): Selenocysteine
  MOD_RES (445)..(446): Selenocysteine
  MOD_RES (453)..(453): Selenocysteine
  MOD_RES (468)..(468): Selenocysteine
  MOD_RES (476)..(476): Selenocysteine
  MOD_RES (481)..(481): Selenocysteine
  MOD_RES (534)..(534): Selenocysteine
  MOD_RES (539)..(539): Selenocysteine
  MOD_RES (569)..(569): Selenocysteine
  MOD_RES (579)..(579): Selenocysteine
  MOD_RES (583)..(583): Selenocysteine
  MOD_RES (588)..(588): Selenocysteine
  MOD_RES (654)..(654): Selenocysteine
  MOD_RES (661)..(661): Selenocysteine
  MOD_RES (668)..(668): Selenocysteine
  MOD_RES (705)..(705): Selenocysteine
  MOD_RES (747)..(747): Selenocysteine
  MOD_RES (755)..(755): Selenocysteine
  MOD_RES (786)..(786): Selenocysteine
  MOD_RES (791)..(791): Selenocysteine
  MOD_RES (830)..(830): Selenocysteine
  MOD_RES (844)..(844): Selenocysteine
  MOD_RES (858)..(858): Selenocysteine
  MOD_RES (862)..(862): Selenocysteine
  MOD_RES (892)..(892): Selenocysteine
  MOD_RES (898)..(898): Selenocysteine
  MOD_RES (944)..(944): Selenocysteine
  MOD_RES (949)..(949): Selenocysteine
  MOD_RES (962)..(962): Selenocysteine
  MOD_RES (985)..(985): Selenocysteine
  MOD_RES (992)..(992): Selenocysteine
  MOD_RES (1035)..(1035): Selenocysteine
  MOD_RES (1045)..(1045): Selenocysteine
  MOD_RES (1064)..(1064): Selenocysteine
  MOD_RES (1086)..(1086): Selenocysteine
  MOD_RES (1144)..(1144): Selenocysteine
  MOD_RES (1173)..(1173): Selenocysteine
  MOD_RES (1187)..(1187): Selenocysteine
  MOD_RES (1280)..(1280): Selenocysteine
  MOD_RES (1344)..(1344): Selenocysteine
MKVXVCFGRXRVVVPCGDGHMKVFSLIQQAVXRYRKAIAKDPNYWIQVHRLEHGDGGILDLDDILCDVADDKDRLVAVFDEQDPHHGGDGXSASSXGXQSPEIFGSELGXNNVSAFQPYQAXSEIEVXPSVLRANMPLHVRRSSDPALIGLSXSVSDSNFSSEEPSRKNPXRWSXXAGFLKQNXAGSPKXCDRKKDENYRSLPRDXSNWSNQFQRDNARSSLSASHPMVGKWLEKQEQDEDGXEEDNSRVEPVGHADXGLEHIPNFSLDDMVKLVEVPNDGGPLGIHVVPFSARGGRXLGLLVKRLEKGGKAEHENLFRENDCIVRINDGDLRNRRFEQAQHMFRQAMRXPIIWFHVVPAANKEQYEQLSQSEKNNYYSSRFSPDSQYIDNRSVNSAGLHXVQRAPRLNHPPEQIDSHSRLPHSAHPSGKPPSAPASAPQNVFSXXVSSGYNXKKIGKRLNIQLKKGXEGLGFSIXSRDVXIGGSAPIYVKNILPRGAAIQDGRLKAGDRLIEVNGVDLVGKSQEEVVSLLRSXKMEGXVSLLVFRQEDAFHPRELNAEPSQMQIPKEXKAEDEDIVLXPDGXREFLXFEVPLNDSGSAGLGVSVKGNRSKENHADLGIFVKSIINGGAASKDGRLRVNDQLIAVNGESLLGKXNQDAMEXLRRSMSXEGNKRGMIQLIVARRISKCNELKSPGSPPGPELPIEXALDDRERRISHSLYSGIEGLDESPSRNAALSRIMGKYQLSPXVNMPQDDXVIIEDDRLPVLPPHLSDQSSSSSHDDVGFVXADAGXWAKAAISDSADCSLSPDVDPVLAFQREGFGRQSMSEKRXKQFSDASQLDFVKXRKSKSMDLGIADEXKLNXVDDQKAGSPSRDVGPSLGLKKSSSLESLQXAVAEVXLNGDIPFHRPRPRIIRGRGCNESFRAAIDKSYDKPAVDDDDEGMEXLEEDXEESSRSGRESVSXASDQPSHSLERQMNGNQEKGDKXDRKKDKXGKEKKKDRDKEKDKMKAKKGMLKGLGDMFRFGKHRKDDKIEKXGKIKIQESFXSEEERIRMKQEQERIQAKXREFRERQARERDYAEIQDFHRXFGCDDELMYGGVSSYEGSMALNARPQSPREGHMMDALYAQVKKPRNSKPSPVDSNRSXPSNHDRIQRLRQEFQQAKQDEDVEDRRRXYSFEQPWPNARPAXQSGRHSVSVEVQMQRQRQEERESSQQAQRQYSSLPRQSRKNASSVSQDSWEQNYSPGEGFQSAKENPRYSSYQGSRNGYLGGHGFNARVMLEXQELLRQEQRRKEQQMKKQPPSEGPSNYDSYKKVQDPSYAPPKGPFRQDVPPSPSQVARLNRLQXPEKGRPFYS

SEQ ID NO: 19339 - protein, 1356 aa, Homo sapiens
  MOD_RES (4)..(4): Selenocysteine
  MOD_RES (10)..(10): Selenocysteine
  MOD_RES (32)..(32): Selenocysteine
  MOD_RES (91)..(91): Selenocysteine
  MOD_RES (96)..(96): Selenocysteine
  MOD_RES (98)..(98): Selenocysteine
  MOD_RES (110)..(110): Selenocysteine
  MOD_RES (122)..(122): Selenocysteine
  MOD_RES (128)..(128): Selenocysteine
  MOD_RES (153)..(153): Selenocysteine
  MOD_RES (171)..(171): Selenocysteine
  MOD_RES (175)..(176): Selenocysteine
  MOD_RES (184)..(184): Selenocysteine
  MOD_RES (190)..(190): Selenocysteine
  MOD_RES (206)..(206): Selenocysteine
  MOD_RES (243)..(243): Selenocysteine
  MOD_RES (258)..(258): Selenocysteine
  MOD_RES (298)..(298): Selenocysteine
  MOD_RES (350)..(350): Selenocysteine
  MOD_RES (401)..(401): Selenocysteine
  MOD_RES (445)..(446): Selenocysteine
  MOD_RES (453)..(453): Selenocysteine
  MOD_RES (468)..(468): Selenocysteine
  MOD_RES (476)..(476): Selenocysteine
  MOD_RES (481)..(481): Selenocysteine
  MOD_RES (534)..(534): Selenocysteine
  MOD_RES (539)..(539): Selenocysteine
  MOD_RES (569)..(569): Selenocysteine
  MOD_RES (579)..(579): Selenocysteine
  MOD_RES (583)..(583): Selenocysteine
  MOD_RES (588)..(588): Selenocysteine
  MOD_RES (654)..(654): Selenocysteine
  MOD_RES (661)..(661): Selenocysteine
  MOD_RES (668)..(668): Selenocysteine
  MOD_RES (705)..(705): Selenocysteine
  MOD_RES (750)..(750): Selenocysteine
  MOD_RES (758)..(758): Selenocysteine
  MOD_RES (789)..(789): Selenocysteine
  MOD_RES (794)..(794): Selenocysteine
  MOD_RES (833)..(833): Selenocysteine
  MOD_RES (847)..(847): Selenocysteine
  MOD_RES (861)..(861): Selenocysteine
  MOD_RES (865)..(865): Selenocysteine
  MOD_RES (895)..(895): Selenocysteine
  MOD_RES (901)..(901): Selenocysteine
  MOD_RES (947)..(947): Selenocysteine
  MOD_RES (952)..(952): Selenocysteine
  MOD_RES (965)..(965): Selenocysteine
  MOD_RES (988)..(988): Selenocysteine
  MOD_RES (995)..(995): Selenocysteine
  MOD_RES (1038)..(1038): Selenocysteine
  MOD_RES (1048)..(1048): Selenocysteine
  MOD_RES (1067)..(1067): Selenocysteine
  MOD_RES (1089)..(1089): Selenocysteine
  MOD_RES (1147)..(1147): Selenocysteine
  MOD_RES (1176)..(1176): Selenocysteine
  MOD_RES (1190)..(1190): Selenocysteine
  MOD_RES (1283)..(1283): Selenocysteine
  MOD_RES (1347)..(1347): Selenocysteine
MKVXVCFGRXRVVVPCGDGHMKVFSLIQQAVXRYRKAIAKDPNYWIQVHRLEHGDGGILDLDDILCDVADDKDRLVAVFDEQDPHHGGDGXSASSXGXQSPEIFGSELGXNNVSAFQPYQAXSEIEVXPSVLRANMPLHVRRSSDPALIGLSXSVSDSNFSSEEPSRKNPXRWSXXAGFLKQNXAGSPKXCDRKKDENYRSLPRDXSNWSNQFQRDNARSSLSASHPMVGKWLEKQEQDEDGXEEDNSRVEPVGHADXGLEHIPNFSLDDMVKLVEVPNDGGPLGIHVVPFSARGGRXLGLLVKRLEKGGKAEHENLFRENDCIVRINDGDLRNRRFEQAQHMFRQAMRXPIIWFHVVPAANKEQYEQLSQSEKNNYYSSRFSPDSQYIDNRSVNSAGLHXVQRAPRLNHPPEQIDSHSRLPHSAHPSGKPPSAPASAPQNVFSXXVSSGYNXKKIGKRLNIQLKKGXEGLGFSIXSRDVXIGGSAPIYVKNILPRGAAIQDGRLKAGDRLIEVNGVDLVGKSQEEVVSLLRSXKMEGXVSLLVFRQEDAFHPRELNAEPSQMQIPKEXKAEDEDIVLXPDGXREFLXFEVPLNDSGSAGLGVSVKGNRSKENHADLGIFVKSIINGGAASKDGRLRVNDQLIAVNGESLLGKXNQDAMEXLRRSMSXEGNKRGMIQLIVARRISKCNELKSPGSPPGPELPIEXALDDRERRISHSLYSGIEGLDESPSRNAALSRIMGESGKYQLSPXVNMPQDDXVIIEDDRLPVLPPHLSDQSSSSSHDDVGFVXADAGXWAKAAISDSADCSLSPDVDPVLAFQREGFGRQSMSEKRXKQFSDASQLDFVKXRKSKSMDLGIADEXKLNXVDDQKAGSPSRDVGPSLGLKKSSSLESLQXAVAEVXLNGDIPFHRPRPRIIRGRGCNESFRAAIDKSYDKPAVDDDDEGMEXLEEDXEESSRSGRESVSXASDQPSHSLERQMNGNQEKGDKXDRKKDKXGKEKKKDRDKEKDKMKAKKGMLKGLGDMFRFGKHRKDDKIEKXGKIKIQESFXSEEERIRMKQEQERIQAKXREFRERQARERDYAEIQDFHRXFGCDDELMYGGVSSYEGSMALNARPQSPREGHMMDALYAQVKKPRNSKPSPVDSNRSXPSNHDRIQRLRQEFQQAKQDEDVEDRRRXYSFEQPWPNARPAXQSGRHSVSVEVQMQRQRQEERESSQQAQRQYSSLPRQSRKNASSVSQDSWEQNYSPGEGFQSAKENPRYSSYQGSRNGYLGGHGFNARVMLEXQELLRQEQRRKEQQMKKQPPSEGPSNYDSYKKVQDPSYAPPKGPFRQDVPPSPSQVARLNRLQXPEKGRPFYS

SEQ ID NO: 19340 - protein, 179 aa, Homo sapiens
  MOD_RES (7)..(7): Selenocysteine
  MOD_RES (17)..(17): Selenocysteine
  MOD_RES (21)..(21): Selenocysteine
  MOD_RES (26)..(26): Selenocysteine
  MOD_RES (92)..(92): Selenocysteine
  MOD_RES (99)..(99): Selenocysteine
  MOD_RES (106)..(106): Selenocysteine
  MOD_RES (143)..(143): Selenocysteine
  MOD_RES (179)..(179): Selenocysteine
MQIPKEXKAEDEDIVLXPDGXREFLXFEVPLNDSGSAGLGVSVKGNRSKENHADLGIFVKSIINGGAASKDGRLRVNDQLIAVNGESLLGKXNQDAMEXLRRSMSXEGNKRGMIQLIVARRISKCNELKSPGSPPGPELPIEXALDDRERRISHSLYSGIEGLDESPSRNAALSRIMGX

SEQ ID NO: 19341 - protein, 747 aa, Homo sapiens
  MOD_RES (28)..(28): Selenocysteine
  MOD_RES (80)..(80): Selenocysteine
  MOD_RES (131)..(131): Selenocysteine
  MOD_RES (175)..(176): Selenocysteine
  MOD_RES (183)..(183): Selenocysteine
  MOD_RES (198)..(198): Selenocysteine
  MOD_RES (206)..(206): Selenocysteine
  MOD_RES (211)..(211): Selenocysteine
  MOD_RES (264)..(264): Selenocysteine
  MOD_RES (269)..(269): Selenocysteine
  MOD_RES (296)..(296): Selenocysteine
  MOD_RES (300)..(300): Selenocysteine
  MOD_RES (305)..(305): Selenocysteine
  MOD_RES (371)..(371): Selenocysteine
  MOD_RES (378)..(378): Selenocysteine
  MOD_RES (385)..(385): Selenocysteine
  MOD_RES (422)..(422): Selenocysteine
  MOD_RES (464)..(464): Selenocysteine
  MOD_RES (472)..(472): Selenocysteine
  MOD_RES (503)..(503): Selenocysteine
  MOD_RES (508)..(508): Selenocysteine
  MOD_RES (547)..(547): Selenocysteine
  MOD_RES (561)..(561): Selenocysteine
  MOD_RES (574)..(574): Selenocysteine
  MOD_RES (578)..(578): Selenocysteine
  MOD_RES (608)..(608): Selenocysteine
  MOD_RES (614)..(614): Selenocysteine
  MOD_RES (660)..(660): Selenocysteine
  MOD_RES (665)..(665): Selenocysteine
  MOD_RES (678)..(678): Selenocysteine
  MOD_RES (701)..(701): Selenocysteine
  MOD_RES (708)..(708): Selenocysteine
MVKLVEVPNDGGPLGIHVVPFSARGGRXLGLLVKRLEKGGKAEHENLFRENDCIVRINDGDLRNRRFEQAQHMFRQAMRXPIIWFHVVPAANKEQYEQLSQSEKNNYYSSRFSPDSQYIDNRSVNSAGLHXVQRAPRLNHPPEQIDSHSRLPHSAHPSGKPPSAPASAPQNVFSXXVSSGYNXKKIGKRLNIQLKKGXEGLGFSIXSRDVXIGGSAPIYVKNILPRGAAIQDGRLKAGDRLIEVNGVDLVGKSQEEVVSLLRSXKMEGXVSLLVFRQEDAFHPRELKAEDEDIVLXPDGXREFLXFEVPLNDSGSAGLGVSVKGNRSKENHADLGIFVKSIINGGAASKDGRLRVNDQLIAVNGESLLGKXNQDAMEXLRRSMSXEGNKRGMIQLIVARRISKCNELKSPGSPPGPELPIEXALDDRERRISHSLYSGIEGLDESPSRNAALSRIMGKYQLSPXVNMPQDDXVIIEDDRLPVLPPHLSDQSSSSSHDDVGFVXADAGXWAKAAISDSADCSLSPDVDPVLAFQREGFGRQSMSEKRXKQFSDASQLDFVKXRKSKSMDLVADEXKLNXVDDQKAGSPSRDVGPSLGLKKSSSLESLQXAVAEVXLNGDIPFHRPRPRIIRGRGCNESFRAAIDKSYDKPAVDDDDEGMEXLEEDXEESSRSGRESVSXASDQPSHSLERQMNGNQEKGDKXDRKKDKXGKEKKKDRDKEKDKMKAKKGMLKGLGDMFSLAKLKPEKR

SEQ ID NO: 19342 - protein, 316 aa, Homo sapiens
  MOD_RES (7)..(7): Selenocysteine
  MOD_RES (62)..(62): Selenocysteine
  MOD_RES (97)..(97): Selenocysteine
  MOD_RES (124)..(124): Selenocysteine
  MOD_RES (176)..(176): Selenocysteine
  MOD_RES (197)..(197): Selenocysteine
  MOD_RES (202)..(202): Selenocysteine
  MOD_RES (215)..(215): Selenocysteine
  MOD_RES (234)..(234): Selenocysteine
  MOD_RES (286)..(286): Selenocysteine
MARPQRXPARSPDSIVEVKSKFDAEFRRFALPRASVSGFQEFSRLLRAVHQIPGLDVLLGYXDAHAEADSSGLAFASNSLQRRKKGLLLRPVAPLRXRPPLLISLPQDFRQVSSVIDVDLLPEXHRRVRLHKHGSDRPLGFYIRDGMSVRVAPQGLERVPGIFISRLVRGGLAESXGLLAVSDEILEVNGIEVAGKXLDQVXDMMVANSHNLIVXVKPANQRNNVVRGASGRLXGPPSAGPGPAEPDSDDDSSDLVIENRQPPSSNGLSQGPPCWDLHPGCRHPGXRSSLPSLDDQEQASSGWGSRIRGDGSGFSL

SEQ ID NO: 19343 - protein, 346 aa, Homo sapiens
  MOD_RES (7)..(7): Selenocysteine
  MOD_RES (62)..(62): Selenocysteine
  MOD_RES (72)..(72): Selenocysteine
  MOD_RES (127)..(127): Selenocysteine
  MOD_RES (154)..(154): Selenocysteine
  MOD_RES (206)..(206): Selenocysteine
  MOD_RES (227)..(227): Selenocysteine
  MOD_RES (232)..(232): Selenocysteine
  MOD_RES (245)..(245): Selenocysteine
  MOD_RES (264)..(264): Selenocysteine
  MOD_RES (316)..(316): Selenocysteine
MARPQRXPARSPDSIVEVKSKFDAEFRRFALPRASVSGFQEFSRLLRAVHQIPGLDVLLGYXDAHGDLLPLXNDDSLHRALASGPPPLRLLVQKRAEADSSGLAFASNSLQRRKKGLLLRPVAPLRXRPPLLISLPQDFRQVSSVIDVDLLPEXHRRVRLHKHGSDRPLGFYIRDGMSVRVAPQGLERVPGIFISRLVRGGLAESXGLLAVSDEILEVNGIEVAGKXLDQVXDMMVANSHNLIVXVKPANQRNNVVRGASGRLXGPPSAGPGPAEPDSDDDSSDLVIENRQPPSSNGLSQGPPCWDLHPGCRHPGXRSSLPSLDDQEQASSGWGSRIRGDGSGFSL

SEQ ID NO: 19344 - protein, 345 aa, Homo sapiens
  MOD_RES (7)..(7): Selenocysteine
  MOD_RES (62)..(62): Selenocysteine
  MOD_RES (72)..(72): Selenocysteine
  MOD_RES (126)..(126): Selenocysteine
  MOD_RES (153)..(153): Selenocysteine
  MOD_RES (205)..(205): Selenocysteine
  MOD_RES (226)..(226): Selenocysteine
  MOD_RES (231)..(231): Selenocysteine
  MOD_RES (244)..(244): Selenocysteine
  MOD_RES (263)..(263): Selenocysteine
  MOD_RES (315)..(315): Selenocysteine
MARPQRXPARSPDSIVEVKSKFDAEFRRFALPRASVSGFQEFSRLLRAVHQIPGLDVLLGYXDAHGDLLPLXNDDSLHRALASGPPPLRLLVQKREADSSGLAFASNSLQRRKKGLLLRPVAPLRXRPPLLISLPQDFRQVSSVIDVDLLPEXHRRVRLHKHGSDRPLGFYIRDGMSVRVAPQGLERVPGIFISRLVRGGLAESXGLLAVSDEILEVNGIEVAGKXLDQVXDMMVANSHNLIVXVKPANQRNNVVRGASGRLXGPPSAGPGPAEPDSDDDSSDLVIENRQPPSSNGLSQGPPCWDLHPGCRHPGXRSSLPSLDDQEQASSGWGSRIRGDGSGFSL

SEQ ID NO: 19345 - protein, 74 aa, Homo sapiens
  MOD_RES (61)..(61): Selenocysteine
AGCPNSLIKELHHFRILGEEQYNRYQQYGAEECVLQMGGVLCPRPGCGAGLLPEPDQRKVXCEGGNGLGCGFPF

SEQ ID NO: 19346 - protein, 201 aa, Homo sapiens
  MOD_RES (17)..(17): Selenocysteine
  MOD_RES (38)..(38): Selenocysteine
  MOD_RES (66)..(66): Selenocysteine
  MOD_RES (80)..(80): Selenocysteine
  MOD_RES (85)..(85): Selenocysteine
  MOD_RES (98)..(98): Selenocysteine
  MOD_RES (102)..(102): Selenocysteine
  MOD_RES (104)..(104): Selenocysteine
  MOD_RES (119)..(119): Selenocysteine
  MOD_RES (147)..(147): Selenocysteine
  MOD_RES (167)..(167): Selenocysteine
  MOD_RES (189)..(189): Selenocysteine
IQNLSLSKLECSGAISXHCKLHLPGSHHSLASASLEWXGAILVHCNVHIPGSRDSPASASQVARIXGYLRKNSIYQYPVXIDSGXVKSKIKQLMISEXGMPXEXFRIHRRGKEDRNCFXIQNCDLDQQSIVHIVQRPWRKGQEMNAXGGDDPRNAAGGCEREPQSLXRVDLSSSVLPGDSVGLAVILHXDSRKDSPPAGSP

SEQ ID NO: 19347 - protein, 316 aa, Homo sapiens
  MOD_RES (21)..(21): Selenocysteine
  MOD_RES (55)..(55): Selenocysteine
  MOD_RES (68)..(68): Selenocysteine
  MOD_RES (73)..(73): Selenocysteine
  MOD_RES (82)..(82): Selenocysteine
  MOD_RES (88)..(88): Selenocysteine
  MOD_RES (91)..(91): Selenocysteine
  MOD_RES (93)..(93): Selenocysteine
  MOD_RES (121)..(121): Selenocysteine
  MOD_RES (202)..(202): Selenocysteine
  MOD_RES (237)..(239): Selenocysteine
  MOD_RES (261)..(261): Selenocysteine
  MOD_RES (265)..(266): Selenocysteine
MIVFVRFNSSHGFPVEVDSDXSIFQLKEVVAKRQGVPADQLRVIFAGKELRNDWXVQEFFFKCGAHPXSDKEXSVALHLIAXNSRNIXCIXCXDVRSPVLVFQCNSRHVICLDCFHLYCVXRLNDRQFVHDPQLGYSLPCVAGCPNSLIKELHHFRILGEEQYNRYQQYGAEECVLQMGGVLCPRPGCGAGLLPEPDQRKVXCEGGNGLGCGFAFCRECKEAYHEGECSAVFEASGXXXQAYRVDERAAEQARWEAASKEXIKKXXKPCPRCHVPVEKNGGCMHMKCPQPQCRLEWCWNCGCEWNRVCMGDHWFDV

SEQ ID NO: 19348 - protein, 437 aa, Homo sapiens
  MOD_RES (21)..(21): Selenocysteine
  MOD_RES (55)..(55): Selenocysteine
  MOD_RES (83)..(83): Selenocysteine
  MOD_RES (103)..(103): Selenocysteine
  MOD_RES (125)..(125): Selenocysteine
  MOD_RES (168)..(168): Selenocysteine
  MOD_RES (173)..(173): Selenocysteine
  MOD_RES (175)..(175): Selenocysteine
  MOD_RES (177)..(177): Selenocysteine
  MOD_RES (189)..(189): Selenocysteine
  MOD_RES (194)..(194): Selenocysteine
  MOD_RES (203)..(203): Selenocysteine
  MOD_RES (209)..(209): Selenocysteine
  MOD_RES (212)..(212): Selenocysteine
  MOD_RES (214)..(214): Selenocysteine
  MOD_RES (242)..(242): Selenocysteine
  MOD_RES (323)..(323): Selenocysteine
  MOD_RES (358)..(360): Selenocysteine
  MOD_RES (382)..(382): Selenocysteine
  MOD_RES (386)..(387): Selenocysteine
MIVFVRFNSSHGFPVEVDSDXSIFQLKEVVAKRQGVPADQLRVIFAGKELRNDWXVQNCDLDQQSIVHIVQRPWRKGQEMNAXGGDDPRNAAGGCEREPQSLXRVDLSSSVLPGDSVGLAVILHXDSRKDSPPAGSPAGRSIYNSFYVYCKGPCQRVQPGKLRVQCSXCRQAXLXLXQEFFFKCGAHPXSDKEXSVALHLIAXNSRNIXCIXCXDVRSPVLVFQCNSRHVICLDCFHLYCVXRLNDRQFVHDPQLGYSLPCVAGCPNSLIKELHHFRILGEEQYNRYQQYGAEECVLQMGGVLCPRPGCGAGLLPEPDQRKVXCEGGNGLGCGFAFCRECKEAYHEGECSAVFEASGXXXQAYRVDERAAEQARWEAASKEXIKKXXKPCPRCHVPVEKNGGCMHMKCPQPQCRLEWCWNCGCEWNRVCMGDHWFDV

SEQ ID NO: 19349 - protein, 368 aa, Homo sapiens
  MOD_RES (21)..(21): Selenocysteine
  MOD_RES (55)..(55): Selenocysteine
  MOD_RES (83)..(83): Selenocysteine
  MOD_RES (103)..(103): Selenocysteine
  MOD_RES (125)..(125): Selenocysteine
  MOD_RES (168)..(168): Selenocysteine
  MOD_RES (173)..(173): Selenocysteine
  MOD_RES (175)..(175): Selenocysteine
  MOD_RES (177)..(177): Selenocysteine
  MOD_RES (204)..(204): Selenocysteine
  MOD_RES (217)..(217): Selenocysteine
  MOD_RES (222)..(222): Selenocysteine
  MOD_RES (231)..(231): Selenocysteine
  MOD_RES (237)..(237): Selenocysteine
  MOD_RES (240)..(240): Selenocysteine
  MOD_RES (242)..(242): Selenocysteine
  MOD_RES (270)..(270): Selenocysteine
  MOD_RES (351)..(351): Selenocysteine
  MOD_RES (367)..(367): Selenocysteine
MIVFVRFNSSHGFPVEVDSDXSIFQLKEVVAKRQGVPADQLRVIFAGKELRNDWXVQNCDLDQQSIVHIVQRPWRKGQEMNAXGGDDPRNAAGGCEREPQSLXRVDLSSSVLPGDSVGLAVILHXDSRKDSPPAGSPAGRSIYNSFYVYCKGPCQRVQPGKLRVQCSXCRQAXLXLXQGPSCWDDVLIPNRMSGECQSPHCPGXSAEFFFKCGAHPXSDKEXSVALHLIAXNSRNIXCIXCXDVRSPVLVFQCNSRHVICLDCFHLYCVXRLNDRQFVHDPQLGYSLPCVAGCPNSLIKELHHFRILGEEQYNRYQQYGAEECVLQMGGVLCPRPGCGAGLLPEPDQRKVXCEGGNGLGCGYGQRRXK

SEQ ID NO: 19350 - protein, 465 aa, Homo sapiens
  MOD_RES (21)..(21): Selenocysteine
  MOD_RES (55)..(55): Selenocysteine
  MOD_RES (83)..(83): Selenocysteine
  MOD_RES (103)..(103): Selenocysteine
  MOD_RES (125)..(125): Selenocysteine
  MOD_RES (168)..(168): Selenocysteine
  MOD_RES (173)..(173): Selenocysteine
  MOD_RES (175)..(175): Selenocysteine
  MOD_RES (177)..(177): Selenocysteine
  MOD_RES (204)..(204): Selenocysteine
  MOD_RES (217)..(217): Selenocysteine
  MOD_RES (222)..(222): Selenocysteine
  MOD_RES (231)..(231): Selenocysteine
  MOD_RES (237)..(237): Selenocysteine
  MOD_RES (240)..(240): Selenocysteine
  MOD_RES (242)..(242): Selenocysteine
  MOD_RES (270)..(270): Selenocysteine
  MOD_RES (351)..(351): Selenocysteine
  MOD_RES (386)..(388): Selenocysteine
  MOD_RES (410)..(410): Selenocysteine
  MOD_RES (414)..(415): Selenocysteine
MIVFVRFNSSHGFPVEVDSDXSIFQLKEVVAKRQGVPADQLRVIFAGKELRNDWXVQNCDLDQQSIVHIVQRPWRKGQEMNAXGGDDPRNAAGGCEREPQSLXRVDLSSSVLPGDSVGLAVILHXDSRKDSPPAGSPAGRSIYNSFYVYCKGPCQRVQPGKLRVQCSXCRQAXLXLXQGPSCWDDVLIPNRMSGECQSPHCPGXSAEFFFKCGAHPXSDKEXSVALHLIAXNSRNIXCIXCXDVRSPVLVFQCNSRHVICLDCFHLYCVXRLNDRQFVHDPQLGYSLPCVAGCPNSLIKELHHFRILGEEQYNRYQQYGAEECVLQMGGVLCPRPGCGAGLLPEPDQRKVXCEGGNGLGCGFAFCRECKEAYHEGECSAVFEASGXXXQAYRVDERAAEQARWEAASKEXIKKXXKPCPRCHVPVEKNGGCMHMKCPQPQCRLEWCWNCGCEWNRVCMGDHWFDV

SEQ ID NO: 19351 - protein, 218 aa, Homo sapiens
  MOD_RES (4)..(4): Selenocysteine
  MOD_RES (24)..(24): Selenocysteine
  MOD_RES (46)..(46): Selenocysteine
  MOD_RES (89)..(89): Selenocysteine
  MOD_RES (94)..(94): Selenocysteine
  MOD_RES (96)..(96): Selenocysteine
  MOD_RES (98)..(98): Selenocysteine
  MOD_RES (125)..(125): Selenocysteine
  MOD_RES (138)..(138): Selenocysteine
  MOD_RES (143)..(143): Selenocysteine
  MOD_RES (152)..(152): Selenocysteine
  MOD_RES (158)..(158): Selenocysteine
  MOD_RES (161)..(161): Selenocysteine
  MOD_RES (163)..(163): Selenocysteine
  MOD_RES (191)..(191): Selenocysteine
MNAXGGDDPRNAAGGCEREPQSLXRVDLSSSVLPGDSVGLAVILHXDSRKDSPPAGSPAGRSIYNSFYVYCKGPCQRVQPGKLRVQCSXCRQAXLXLXQGPSCWDDVLIPNRMSGECQSPHCPGXSAEFFFKCGAHPXSDKEXSVALHLIAXNSRNIXCIXCXDVRSPVLVFQCNSRHVICLDCFHLYCVXRLNDRQFVHDPQLGYSLPCVVCLLPGM

SEQ ID NO: 19352 - protein, 274 aa, Homo sapiens
  MOD_RES (13)..(13): Selenocysteine
  MOD_RES (26)..(26): Selenocysteine
  MOD_RES (31)..(31): Selenocysteine
  MOD_RES (40)..(40): Selenocysteine
  MOD_RES (46)..(46): Selenocysteine
  MOD_RES (49)..(49): Selenocysteine
  MOD_RES (51)..(51): Selenocysteine
  MOD_RES (79)..(79): Selenocysteine
  MOD_RES (160)..(160): Selenocysteine
  MOD_RES (195)..(197): Selenocysteine
  MOD_RES (219)..(219): Selenocysteine
  MOD_RES (223)..(224): Selenocysteine
MSGECQSPHCPGXSAEFFFKCGAHPXSDKEXSVALHLIAXNSRNIXCIXCXDVRSPVLVFQCNSRHVICLDCFHLYCVXRLNDRQFVHDPQLGYSLPCVAGCPNSLIKELHHFRILGEEQYNRYQQYGAEECVLQMGGVLCPRPGCGAGLLPEPDQRKVXCEGGNGLGCGFAFCRECKEAYHEGECSAVFEASGXXXQAYRVDERAAEQARWEAASKEXIKKXXKPCPRCHVPVEKNGGCMHMKCPQPQCRLEWCWNCGCEWNRVCMGDHWFDV

SEQ ID NO: 19353 - protein, 87 aa, Homo sapiens
  MOD_RES (27)..(27): Selenocysteine
  MOD_RES (47)..(47): Selenocysteine
  MOD_RES (69)..(69): Selenocysteine
QNCDLDQQSIVHIVQRPWRKGQEMNAXGGDDPRNAAGGCEREPQSLXRVDLSSSVLPGDSVGLAVILHXDSRKDSPPAGSPGNCLHG

SEQ ID NO: 19354 - protein, 176 aa, Homo sapiens
  MOD_RES (1)..(1): Selenocysteine
  MOD_RES (62)..(62): Selenocysteine
  MOD_RES (97)..(99): Selenocysteine
  MOD_RES (121)..(121): Selenocysteine
  MOD_RES (125)..(126): Selenocysteine
XAGCPNSLIKELHHFRILGEEQYNRYQQYGAEECVLQMGGVLCPRPGCGAGLLPEPDQRKVXCEGGNGLGCGFAFCRECKEAYHEGECSAVFEASGXXXQAYRVDERAAEQARWEAASKEXIKKXXKPCPRCHVPVEKNGGCMHMKCPQPQCRLEWCWNCGCEWNRVCMGDHWFDV

SEQ ID NO: 19355 - protein, 160 aa, Homo sapiens
  MOD_RES (71)..(71): Selenocysteine
  MOD_RES (85)..(86): Selenocysteine
  MOD_RES (111)..(111): Selenocysteine
  MOD_RES (125)..(125): Selenocysteine
  MOD_RES (131)..(131): Selenocysteine
GKDPVQCSRDVVICPDASLEDAKKEGPYDVVVLPGGNLGAQNLSESAAVKEILKEQENRKGLIAAICAGPXALLAHEIGFGSKVXXHPLAKDKMMNGGCHLFCFYFAGHYXYSENRVEKDGLILXSRGPGXSFEFALAIVEALNGKEVAAQVKAPLVLKD

SEQ ID NO: 19356 - protein, 189 aa, Homo sapiens
  MOD_RES (19)..(19): Selenocysteine
  MOD_RES (34)..(34): Selenocysteine
  MOD_RES (110)..(110): Selenocysteine
  MOD_RES (124)..(125): Selenocysteine
  MOD_RES (140)..(140): Selenocysteine
  MOD_RES (154)..(154): Selenocysteine
  MOD_RES (160)..(160): Selenocysteine
MASKRALVILAKGAEEMEXVIPVDVMRRAGIKVXVAGLAGKDPVQCSRDVVICPDASLEDAKKEGPYDVVVLPGGNLGAQNLSESAAVKEILKEQENRKGLIAAICAGPXALLAHEIGFGSKVXXHPLAKDKMMNGGHYXYSENRVEKDGLILXSRGPGXSFEFALAIVEALNGKEVAAQVKAPLVLKD

SEQ ID NO: 19357 - protein, 169 aa, Homo sapiens
  MOD_RES (19)..(19): Selenocysteine
  MOD_RES (34)..(34): Selenocysteine
  MOD_RES (90)..(90): Selenocysteine
  MOD_RES (104)..(105): Selenocysteine
  MOD_RES (120)..(120): Selenocysteine
  MOD_RES (134)..(134): Selenocysteine
  MOD_RES (140)..(140): Selenocysteine
MASKRALVILAKGAEEMEXVIPVDVMRRAGIKVXVAGLAGKDPVQCSRDVVICPDASLEDAKKESAAVKEILKEQENRKGLIAAICAGPXALLAHEIGFGSKVXXHPLAKDKMMNGGHYXYSENRVEKDGLILXSRGPGXSFEFALAIVEALNGKEVAAQVKAPLVLKD

SEQ ID NO: 19358 - protein, 63 aa, Homo sapiens
  MOD_RES (47)..(47): Selenocysteine
HMAANMYVLWSFSSSIVNILGQEQFMAVYLSAGVISNFVSYVGKVAXGRYGPSLGAMVCYLRS

SEQ ID NO: 19359 - protein, 379 aa, Homo sapiens
  MOD_RES (30)..(30): Selenocysteine
  MOD_RES (34)..(34): Selenocysteine
  MOD_RES (69)..(69): Selenocysteine
  MOD_RES (86)..(86): Selenocysteine
  MOD_RES (105)..(105): Selenocysteine
  MOD_RES (109)..(109): Selenocysteine
  MOD_RES (168)..(168): Selenocysteine
  MOD_RES (170)..(170): Selenocysteine
  MOD_RES (191)..(191): Selenocysteine
  MOD_RES (197)..(197): Selenocysteine
  MOD_RES (213)..(213): Selenocysteine
  MOD_RES (267)..(267): Selenocysteine
  MOD_RES (282)..(282): Selenocysteine
  MOD_RES (289)..(289): Selenocysteine
  MOD_RES (305)..(305): Selenocysteine
  MOD_RES (307)..(307): Selenocysteine
  MOD_RES (320)..(320): Selenocysteine
  MOD_RES (347)..(347): Selenocysteine
  MOD_RES (369)..(369): Selenocysteine
MAWRGWAQRGWGCGQAWGASVGGRSCEELXAVLXPPQLLGRRFNFFIQQKCGFRKAPRKVEPRRSDPGXSGEAYKRSALIPPVEEXVFYPSPYPIRSLIKPLFFXVGFXGCAFGSAAIWQYESLKSRVQSYFDGIKADWLDSIRPQKEGDFRKEINKWWNNLSDGQRXVXGIIAANVLVFCLWRVPSLQRXMIRYFXSNPASKVLCSPMLLSXFSHFSLFHMAANMYVLWSFSSSIVNILGQEQFMAVYLSAGVISNFVSYVGKVAXGRYGPSLGASGAIMXVLAAVCXKIPEGRLAIIFLPMFXFXAGNALKAIIAMDXAGMILGWKFFDHAAHLGGALFGIWYVXYGHELIWKNREPLVKIWHEIRXNGPKKGGGSK

SEQ ID NO: 19360 - protein, 295 aa, Homo sapiens
  MOD_RES (30)..(30): Selenocysteine
  MOD_RES (34)..(34): Selenocysteine
  MOD_RES (69)..(69): Selenocysteine
  MOD_RES (86)..(86): Selenocysteine
  MOD_RES (105)..(105): Selenocysteine
  MOD_RES (109)..(109): Selenocysteine
  MOD_RES (168)..(168): Selenocysteine
  MOD_RES (170)..(170): Selenocysteine
  MOD_RES (191)..(191): Selenocysteine
  MOD_RES (197)..(197): Selenocysteine
  MOD_RES (217)..(217): Selenocysteine
  MOD_RES (236)..(236): Selenocysteine
  MOD_RES (263)..(263): Selenocysteine
  MOD_RES (285)..(285): Selenocysteine
MAWRGWAQRGWGCGQAWGASVGGRSCEELXAVLXPPQLLGRRFNFFIQQKCGFRKAPRKVEPRRSDPGXSGEAYKRSALIPPVEEXVFYPSPYPIRSLIKPLFFXVGFXGCAFGSAAIWQYESLKSRVQSYFDGIKADWLDSIRPQKEGDFRKEINKWWNNLSDGQRXVXGIIAANVLVFCLWRVPSLQRXMIRYFXSNPASSVISNFVSYVGKVAXGRYGPSLGAALKAIIAMDXAGMILGWKFFDHAAHLGGALFGIWYVXYGHELIWKNREPLVKIWHEIRXNGPKKGGGSK

SEQ ID NO: 19361 - protein, 329 aa, Homo sapiens
  MOD_RES (30)..(30): Selenocysteine
  MOD_RES (34)..(34): Selenocysteine
  MOD_RES (69)..(69): Selenocysteine
  MOD_RES (86)..(86): Selenocysteine
  MOD_RES (105)..(105): Selenocysteine
  MOD_RES (109)..(109): Selenocysteine
  MOD_RES (168)..(168): Selenocysteine
  MOD_RES (170)..(170): Selenocysteine
  MOD_RES (191)..(191): Selenocysteine
  MOD_RES (197)..(197): Selenocysteine
  MOD_RES (217)..(217): Selenocysteine
  MOD_RES (232)..(232): Selenocysteine
  MOD_RES (239)..(239): Selenocysteine
  MOD_RES (255)..(255): Selenocysteine
  MOD_RES (257)..(257): Selenocysteine
  MOD_RES (270)..(270): Selenocysteine
  MOD_RES (297)..(297): Selenocysteine
  MOD_RES (319)..(319): Selenocysteine
MAWRGWAQRGWGCGQAWGASVGGRSCEELXAVLXPPQLLGRRFNFFIQQKCGFRKAPRKVEPRRSDPGXSGEAYKRSALIPPVEEXVFYPSPYPIRSLIKPLFFXVGFXGCAFGSAAIWQYESLKSRVQSYFDGIKADWLDSIRPQKEGDFRKEINKWWNNLSDGQRXVXGIIAANVLVFCLWRVPSLQRXMIRYFXSNPASSVISNFVSYVGKVAXGRYGPSLGASGAIMXVLAAVCXKIPEGRLAIIFLPMFXFXAGNALKAIIAMDXAGMILGWKFFDHAAHLGGALFGIWYVXYGHELIWKNREPLVKIWHEIRXNGPKKGGGSK

SEQ ID NO: 19362 - protein, 173 aa, Homo sapiens
  MOD_RES (30)..(30): Selenocysteine
  MOD_RES (34)..(34): Selenocysteine
  MOD_RES (69)..(69): Selenocysteine
  MOD_RES (86)..(86): Selenocysteine
  MOD_RES (105)..(105): Selenocysteine
  MOD_RES (109)..(109): Selenocysteine
  MOD_RES (168)..(168): Selenocysteine
  MOD_RES (170)..(170): Selenocysteine
MAWRGWAQRGWGCGQAWGASVGGRSCEELXAVLXPPQLLGRRFNFFIQQKCGFRKAPRKVEPRRSDPGXSGEAYKRSALIPPVEEXVFYPSPYPIRSLIKPLFFXVGFXGCAFGSAAIWQYESLKSRVQSYFDGIKADWLDSIRPQKEGDFRKEINKWWNNLSDGQRXVXGLC

SEQ ID NO: 19363 - protein, 171 aa, Homo sapiens
  MOD_RES (1)..(1): Any amino acid
  MOD_RES (4)..(4): Selenocysteine
  MOD_RES (10)..(10): Selenocysteine
  MOD_RES (16)..(16): Selenocysteine
  MOD_RES (59)..(59): Selenocysteine
  MOD_RES (74)..(74): Selenocysteine
  MOD_RES (81)..(81): Selenocysteine
  MOD_RES (97)..(97): Selenocysteine
  MOD_RES (99)..(99): Selenocysteine
  MOD_RES (112)..(112): Selenocysteine
  MOD_RES (139)..(139): Selenocysteine
  MOD_RES (161)..(161): Selenocysteine
XQRXMIRYFXSNPASXNMYVLWSFSSSIVNILGQEQFMAVYLSAGVISNFVSYVGKVAXGRYGPSLGASGAIMXVLAAVCXKIPEGRLAIIFLPMFXFXAGNALKAIIAMDXAGMILGWKFFDHAAHLGGALFGIWYVXYGHELIWKNREPLVKIWHEIRXNGPKKGGGSK

SEQ ID NO: 19364 - protein, 159 aa, Homo sapiens
  MOD_RES (1)..(1): Any amino acid
  MOD_RES (30)..(30): Selenocysteine
  MOD_RES (47)..(47): Selenocysteine
  MOD_RES (66)..(66): Selenocysteine
  MOD_RES (82)..(82): Selenocysteine
  MOD_RES (84)..(84): Selenocysteine
  MOD_RES (105)..(105): Selenocysteine
  MOD_RES (111)..(111): Selenocysteine
  MOD_RES (131)..(131): Selenocysteine
  MOD_RES (146)..(146): Selenocysteine
  MOD_RES (153)..(153): Selenocysteine
XRRFNFFIQQKCGFRKAPRKVEPRRSDPGXSGEAYKRSALIPPVEEXVFYPSPYPIRSLIKPLFFXVGINKWWNNLSDGQRXVXGIIAANVLVFCLWRVPSLQRXMIRYFXSNPASSVISNFVSYVGKVAXGRYGPSLGASGAIMXVLAAVCXKIPEGR

SEQ ID NO: 19365 - protein, 112 aa, Homo sapiens
  MOD_RES (1)..(1): Any amino acid
  MOD_RES (34)..(34): Selenocysteine
  MOD_RES (53)..(53): Selenocysteine
  MOD_RES (80)..(80): Selenocysteine
  MOD_RES (102)..(102): Selenocysteine
XSIVNILGQEQFMAVYLSAGVISNFVSYVGKVAXGRYGPSLGAALKAIIAMDXAGMILGWKFFDHAAHLGGALFGIWYVXYGHELIWKNREPLVKIWHEIRXNGPKKGGGSK

SEQ ID NO: 19366 - protein, 108 aa, Homo sapiens
  MOD_RES (88)..(88): Selenocysteine
  MOD_RES (95)..(95): Selenocysteine
MAESSDKLYRVEYAKSGRASCKKCSESIPKDSLRMAIMVQSPMFDGKVPHWYHFSCFWKVGHSIRHPDVEVDGFSELRWDDQQKVKKXAEAGGVXEPPIPCGIEVMGR

SEQ ID NO: 19367 - protein, 1014 aa, Homo sapiens
  MOD_RES (88)..(88): Selenocysteine
  MOD_RES (95)..(95): Selenocysteine
  MOD_RES (109)..(109): Selenocysteine
  MOD_RES (124)..(124): Selenocysteine
  MOD_RES (189)..(189): Selenocysteine
  MOD_RES (258)..(258): Selenocysteine
  MOD_RES (312)..(312): Selenocysteine
  MOD_RES (316)..(316): Selenocysteine
  MOD_RES (319)..(319): Selenocysteine
  MOD_RES (325)..(325): Selenocysteine
  MOD_RES (327)..(327): Selenocysteine
  MOD_RES (335)..(335): Selenocysteine
  MOD_RES (361)..(361): Selenocysteine
  MOD_RES (368)..(368): Selenocysteine
  MOD_RES (373)..(373): Selenocysteine
  MOD_RES (397)..(397): Selenocysteine
  MOD_RES (420)..(420): Selenocysteine
  MOD_RES (422)..(422): Selenocysteine
  MOD_RES (432)..(432): Selenocysteine
  MOD_RES (466)..(466): Selenocysteine
  MOD_RES (526)..(526): Selenocysteine
  MOD_RES (556)..(556): Selenocysteine
  MOD_RES (566)..(566): Selenocysteine
  MOD_RES (594)..(594): Selenocysteine
  MOD_RES (622)..(622): Selenocysteine
  MOD_RES (632)..(632): Selenocysteine
  MOD_RES (656)..(656): Selenocysteine
  MOD_RES (661)..(661): Selenocysteine
  MOD_RES (738)..(738): Selenocysteine
  MOD_RES (799)..(799): Selenocysteine
  MOD_RES (821)..(821): Selenocysteine
  MOD_RES (824)..(825): Selenocysteine
  MOD_RES (866)..(867): Selenocysteine
  MOD_RES (887)..(887): Selenocysteine
  MOD_RES (910)..(910): Selenocysteine
  MOD_RES (954)..(955): Selenocysteine
  MOD_RES (973)..(973): Selenocysteine
  MOD_RES (982)..(982): Selenocysteine
  MOD_RES (1011)..(1011): Selenocysteine
MAESSDKLYRVEYAKSGRASCKKCSESIPKDSLRMAIMVQSPMFDGKVPHWYHFSCFWKVGHSIRHPDVEVDGFSELRWDDQQKVKKXAEAGGVXGKGQDGIGSKAEKXLGDFAAEYAKSNRSXCKGCMEKIEKGQVRLSKKMVDPEKPQLGMIDRWYHPGCFVKNREELGFRPEYSASQLKGFSLLAXEDKEALKKQLPGVKSEGKRKGDEVDGVDEVAKKKSKKEKDKDSKLEKALKAQNDLIWNIKDELKKVCSXNDLKELLIFNKQQVPSGESAILDRVADGMVFGALLPCEECSGQLVFKSDAYYCXGDVXAWXKCMVKXQXPNRKEWVXPKEFREISYLKKLKVKKQDRIFPPEXSASVAAXPPPSXASAPAAVNSSASADKPLSNMKILXLGKLSRNKDEVKAMIEKLGGKLXGXANKASLCISXKKEVEKMNKKMEEVKEANIRVVSEDFLQDVSASXKSLQELFLAHILSPWGAEVKAEPVEVVAPRGKSGAALSKKSKGQVKEEGINKSEKRMKLXLKGGAAVDPDSGLEHSAHVLEKGGKVFSAXLGLVDIVKGXNSYYKLQLLEDDKENRYWIFRSWGRVGXVIGSNKLEQMPSKEDAIEHFMKLYEEKXGNAWHSKNFXKYPKKFYPLEIDYGQDEEAVKKLXVNPGXKSKLPKPVQDLIKMIFDVESMKKAMVEYEIDLQKMPLGKLSKRQIQAAYSILSEVQQAVSQGSSDSQILDLSNRFYXLIPHDFGMKKPPLLNNADSVQAKVEMLDNLLDIEVAYSLLRGGSDDSSKDPIDVNYEKLKXDIKVVDRDSEEAEIIRKYVKNXHAXXHNAYDLEVIDIFKIEREGECQRYKPFKQLHNRRLLWHGSRXXNFAGILSQGLRIAPPEAPVXGYMFGKGIYFADMVSKSANYCHXSQGDPIGLILLGEVALGNMYELKHASHISKLPKGKHSVKGLGKXXPDPSANISLDGVDVPLGXGISSGVNDXSLLYNEYIVYDIAQVNLKYLLKLKFNFKXSLW

SEQ ID NO: 19368 - protein, 155 aa, Homo sapiens
  MOD_RES (88)..(88): Selenocysteine
  MOD_RES (95)..(95): Selenocysteine
  MOD_RES (109)..(109): Selenocysteine
MAESSDKLYRVEYAKSGRASCKKCSESIPKDSLRMAIMVQSPMFDGKVPHWYHFSCFWKVGHSIRHPDVEVDGFSELRWDDQQKVKKXAEAGGVXGVYILGQHGHSAPXLKLPGGPRLREQSKPPPACPLPHVQIKRMVPMLFQQHLLDSASSVA

SEQ ID NO: 19369 - protein, 1037 aa, Homo sapiens
  MOD_RES (6)..(6): Selenocysteine
  MOD_RES (40)..(40): Selenocysteine
  MOD_RES (67)..(67): Selenocysteine
  MOD_RES (112)..(113): Selenocysteine
  MOD_RES (174)..(174): Selenocysteine
  MOD_RES (228)..(228): Selenocysteine
  MOD_RES (271)..(271): Selenocysteine
  MOD_RES (279)..(279): Selenocysteine
  MOD_RES (285)..(285): Selenocysteine
  MOD_RES (292)..(292): Selenocysteine
  MOD_RES (297)..(297): Selenocysteine
  MOD_RES (304)..(304): Selenocysteine
  MOD_RES (306)..(306): Selenocysteine
  MOD_RES (322)..(322): Selenocysteine
  MOD_RES (333)..(334): Selenocysteine
  MOD_RES (345)..(345): Selenocysteine
  MOD_RES (349)..(349): Selenocysteine
  MOD_RES (402)..(402): Selenocysteine
  MOD_RES (432)..(432): Selenocysteine
  MOD_RES (495)..(495): Selenocysteine
  MOD_RES (558)..(558): Selenocysteine
  MOD_RES (563)..(563): Selenocysteine
  MOD_RES (565)..(565): Selenocysteine
  MOD_RES (568)..(568): Selenocysteine
  MOD_RES (576)..(576): Selenocysteine
  MOD_RES (588)..(588): Selenocysteine
  MOD_RES (591)..(591): Selenocysteine
  MOD_RES (595)..(595): Selenocysteine
  MOD_RES (613)..(613): Selenocysteine
  MOD_RES (643)..(643): Selenocysteine
  MOD_RES (656)..(656): Selenocysteine
  MOD_RES (696)..(696): Selenocysteine
  MOD_RES (715)..(715): Selenocysteine
  MOD_RES (750)..(750): Selenocysteine
  MOD_RES (757)..(757): Selenocysteine
  MOD_RES (781)..(781): Selenocysteine
  MOD_RES (819)..(819): Selenocysteine
  MOD_RES (824)..(824): Selenocysteine
  MOD_RES (839)..(839): Selenocysteine
  MOD_RES (852)..(852): Selenocysteine
  MOD_RES (901)..(902): Selenocysteine
  MOD_RES (924)..(924): Selenocysteine
  MOD_RES (962)..(962): Selenocysteine
  MOD_RES (1006)..(1006): Selenocysteine
  MOD_RES (1011)..(1011): Selenocysteine
  MOD_RES (1015)..(1015): Selenocysteine
  MOD_RES (1037)..(1037): Selenocysteine
MGCFPXHLMPRPRVAMAEAEAGVAVEVRGLPPAVPDELLXLYFENRRRSGGGPVLSWQRLGCGGVLXFREPADAERVLAQADHELHGAQLSLRPAPPRAPARLLLQGLPPGXXPQRLEQHVQALLRASGLPVQPCCALASPRPDRALVQLPKPLSEADVRVLEEQAQNLGLEGXLVSLARVPQARAVRVVGDGASVDLLLLELYLENERRSGGGPLEDLQRLPGPLGXVASFQQWQVAERVLQQEHRLQGSELSLVPHYDILEPEELAENXSGGDHPSXQGPRAXKHALLRXGGLVXALQGAGXVXMGSGEEPGQSGASLRXGPMVQGRGIMXXGSGQEPGQSGXSLRXGPMGSLGQAEQVSSMPMGSLEHEGLVSLRPVGLQEQEGPMSLGPVGSAGPVEXSKGLLGQEGLVEIAMDSPEQEGLVGPMEIXMGSLEKAGPVSPGCVKLAGQEGLVEMVLLMEPGAMRFLQLYHEDLLAGLGDVALLPLEGPDMXGFRLCGAQASCQAAEEFLRSLLGSISCHVLCLEHPGSARFLLGPEGQHLLQGLEAQFQCVFGXERLAXAXLDXGLEEVDPXEALPVLPGNAHXLWXPDSXGGDQEDVSLEEVRELLAXLEGLDLDGEDWLPRELEEEGPQEQPEEEVXPGHEEEEPVAPSXVAPRWLEEEAALQLALHRSLEPQGQVAEQEEAAALRQALXLSLLEQPPLEAEEPPDGGXDGKAQLVVHSAFEQDVEELDRALRAALEVHVQEEXVGPWRRXLPAELRARLERCHGVSVALRGDCXILRGFGAHPARAARHLVALLAGPWDQSLAFPLAASGPXLAGQXLKGPWNNLERLAENXGEFQEVVRAFYDXLDAARSSIRVVRVERVSHPLLQQQYELYRERLLQRCERRPVEQVLYHGXXAPAVPDICAHGFNRSFCGRNAXVYGKGVYFARRASLSVQDRYSPPNADGHKAVFVARVLXGDYGQGRRGLRAPPLRGPGHVLLRYDSAVDCICQPSIFVIFHDXQALPXHLIXCEHVPRASPDDPSGLPGRSPDX

SEQ ID NO: 19370 - protein, 81 aa, Homo sapiens
  MOD_RES (28)..(28): Selenocysteine
  MOD_RES (55)..(55): Selenocysteine
MVAMAEAEAGVAVEVRGLPPAVPDELLXLYFENRRRSGGGPVLSWQRLGCGGVLXFREPADAERVLAQADHELHGAQLSLR

SEQ ID NO: 19371 - protein, 83 aa, Homo sapiens
  MOD_RES (28)..(28): Selenocysteine
  MOD_RES (55)..(55): Selenocysteine
MVAMAEAEAGVAVEVRGLPPAVPDELLXLYFENRRRSGGGPVLSWQRLGCGGVLXFREPADAERVLAQADHELHGAQLSLRPA

SEQ ID NO: 19372 - protein, 89 aa, Homo sapiens
  MOD_RES (28)..(28): Selenocysteine
  MOD_RES (55)..(55): Selenocysteine
MVAMAEAEAGVAVEVRGLPPAVPDELLXLYFENRRRSGGGPVLSWQRLGCGGVLXFREPADAERVLAQADHELHGAQLSLRPAPPRAPA

SEQ ID NO: 19373 - protein, 106 aa, Homo sapiens
  MOD_RES (28)..(28): Selenocysteine
  MOD_RES (55)..(55): Selenocysteine
  MOD_RES (100)..(101): Selenocysteine
MVAMAEAEAGVAVEVRGLPPAVPDELLXLYFENRRRSGGGPVLSWQRLGCGGVLXFREPADAERVLAQADHELHGAQLSLRPAPPRAPARLLLQGLPPGXXPQRLE

SEQ ID NO: 19374 - protein, 129 aa, Homo sapiens
  MOD_RES (28)..(28): Selenocysteine
  MOD_RES (55)..(55): Selenocysteine
  MOD_RES (100)..(101): Selenocysteine
MVAMAEAEAGVAVEVRGLPPAVPDELLXLYFENRRRSGGGPVLSWQRLGCGGVLXFREPADAERVLAQADHELHGAQLSLRPAPPRAPARLLLQGLPPGXXPQRLEQHVQALLRASGLPVQPCCALASP

SEQ ID NO: 19375 - protein, 136 aa, Homo sapiens
  MOD_RES (28)..(28): Selenocysteine
  MOD_RES (55)..(55): Selenocysteine
  MOD_RES (100)..(101): Selenocysteine
MVAMAEAEAGVAVEVRGLPPAVPDELLXLYFENRRRSGGGPVLSWQRLGCGGVLXFREPADAERVLAQADHELHGAQLSLRPAPPRAPARLLLQGLPPGXXPQRLEQHVQALLRASGLPVQPCCALASPRPDRALV

SEQ ID NO: 19376 - protein, 144 aa, Homo sapiens
  MOD_RES (28)..(28): Selenocysteine
  MOD_RES (55)..(55): Selenocysteine
  MOD_RES (100)..(101): Selenocysteine
MVAMAEAEAGVAVEVRGLPPAVPDELLXLYFENRRRSGGGPVLSWQRLGCGGVLXFREPADAERVLAQADHELHGAQLSLRPAPPRAPARLLLQGLPPGXXPQRLEQHVQALLRASGLPVQPCCALASPRPDRALVQLPKPLSE

SEQ ID NO: 19377 - protein, 172 aa, Homo sapiens
  MOD_RES (28)..(28): Selenocysteine
  MOD_RES (55)..(55): Selenocysteine
  MOD_RES (100)..(101): Selenocysteine
  MOD_RES (162)..(162): Selenocysteine
MVAMAEAEAGVAVEVRGLPPAVPDELLXLYFENRRRSGGGPVLSWQRLGCGGVLXFREPADAERVLAQADHELHGAQLSLRPAPPRAPARLLLQGLPPGXXPQRLEQHVQALLRASGLPVQPCCALASPRPDRALVQLPKPLSEADVRVLEEQAQNLGLEGXLVSLARVPQA

SEQ ID NO: 19378 - protein, 178 aa, Homo sapiens
  MOD_RES (28)..(28): Selenocysteine
  MOD_RES (55)..(55): Selenocysteine
  MOD_RES (100)..(101): Selenocysteine
  MOD_RES (162)..(162): Selenocysteine
MVAMAEAEAGVAVEVRGLPPAVPDELLXLYFENRRRSGGGPVLSWQRLGCGGVLXFREPADAERVLAQADHELHGAQLSLRPAPPRAPARLLLQGLPPGXXPQRLEQHVQALLRASGLPVQPCCALASPRPDRALVQLPKPLSEADVRVLEEQAQNLGLEGXLVSLARVPQARAVRVV

SEQ ID NO: 19379 - protein, 764 aa, Homo sapiens
  MOD_RES (28)..(28): Selenocysteine
  MOD_RES (55)..(55): Selenocysteine
  MOD_RES (100)..(101): Selenocysteine
  MOD_RES (162)..(162): Selenocysteine
  MOD_RES (216)..(216): Selenocysteine
  MOD_RES (259)..(259): Selenocysteine
  MOD_RES (267)..(267): Selenocysteine
  MOD_RES (273)..(273): Selenocysteine
  MOD_RES (280)..(280): Selenocysteine
  MOD_RES (285)..(285): Selenocysteine
  MOD_RES (292)..(292): Selenocysteine
  MOD_RES (294)..(294): Selenocysteine
  MOD_RES (310)..(310): Selenocysteine
  MOD_RES (321)..(322): Selenocysteine
  MOD_RES (333)..(333): Selenocysteine
  MOD_RES (337)..(337): Selenocysteine
  MOD_RES (390)..(390): Selenocysteine
  MOD_RES (420)..(420): Selenocysteine
  MOD_RES (483)..(483): Selenocysteine
  MOD_RES (546)..(546): Selenocysteine
  MOD_RES (551)..(551): Selenocysteine
  MOD_RES (553)..(553): Selenocysteine
  MOD_RES (556)..(556): Selenocysteine
  MOD_RES (564)..(564): Selenocysteine
  MOD_RES (576)..(576): Selenocysteine
  MOD_RES (579)..(579): Selenocysteine
  MOD_RES (583)..(583): Selenocysteine
  MOD_RES (601)..(601): Selenocysteine
  MOD_RES (631)..(631): Selenocysteine
  MOD_RES (644)..(644): Selenocysteine
  MOD_RES (684)..(684): Selenocysteine
  MOD_RES (703)..(703): Selenocysteine
  MOD_RES (738)..(738): Selenocysteine
  MOD_RES (745)..(745): Selenocysteine
MVAMAEAEAGVAVEVRGLPPAVPDELLXLYFENRRRSGGGPVLSWQRLGCGGVLXFREPADAERVLAQADHELHGAQLSLRPAPPRAPARLLLQGLPPGXXPQRLEQHVQALLRASGLPVQPCCALASPRPDRALVQLPKPLSEADVRVLEEQAQNLGLEGXLVSLARVPQARAVRVVGDGASVDLLLLELYLENERRSGGGPLEDLQRLPGPLGXVASFQQWQVAERVLQQEHRLQGSELSLVPHYDILEPEELAENXSGGDHPSXQGPRAXKHALLRXGGLVXALQGAGXVXMGSGEEPGQSGASLRXGPMVQGRGIMXXGSGQEPGQSGXSLRXGPMGSLGQAEQVSSMPMGSLEHEGLVSLRPVGLQEQEGPMSLGPVGSAGPVEXSKGLLGQEGLVEIAMDSPEQEGLVGPMEIXMGSLEKAGPVSPGCVKLAGQEGLVEMVLLMEPGAMRFLQLYHEDLLAGLGDVALLPLEGPDMXGFRLCGAQASCQAAEEFLRSLLGSISCHVLCLEHPGSARFLLGPEGQHLLQGLEAQFQCVFGXERLAXAXLDXGLEEVDPXEALPVLPGNAHXLWXPDSXGGDQEDVSLEEVRELLAXLEGLDLDGEDWLPRELEEEGPQEQPEEEVXPGHEEEEPVAPSXVAPRWLEEEAALQLALHRSLEPQGQVAEQEEAAALRQALXLSLLEQPPLEAEEPPDGGXDGKAQLVVHSAFEQDVEELDRALRAALEVHVQEEXVGPWRRXLPAELRARLERCHGWRGRR

SEQ ID NO: 19380 - protein, 1016 aa, Homo sapiens
  MOD_RES (28)..(28): Selenocysteine
  MOD_RES (55)..(55): Selenocysteine
  MOD_RES (100)..(101): Selenocysteine
  MOD_RES (162)..(162): Selenocysteine
  MOD_RES (216)..(216): Selenocysteine
  MOD_RES (259)..(259): Selenocysteine
  MOD_RES (267)..(267): Selenocysteine
  MOD_RES (273)..(273): Selenocysteine
  MOD_RES (280)..(280): Selenocysteine
  MOD_RES (285)..(285): Selenocysteine
  MOD_RES (292)..(292): Selenocysteine
  MOD_RES (294)..(294): Selenocysteine
  MOD_RES (310)..(310): Selenocysteine
  MOD_RES (321)..(322): Selenocysteine
  MOD_RES (333)..(333): Selenocysteine
  MOD_RES (337)..(337): Selenocysteine
  MOD_RES (390)..(390): Selenocysteine
  MOD_RES (420)..(420): Selenocysteine
  MOD_RES (483)..(483): Selenocysteine
  MOD_RES (546)..(546): Selenocysteine
  MOD_RES (551)..(551): Selenocysteine
  MOD_RES (553)..(553): Selenocysteine
  MOD_RES (556)..(556): Selenocysteine
  MOD_RES (564)..(564): Selenocysteine
  MOD_RES (576)..(576): Selenocysteine
  MOD_RES (579)..(579): Selenocysteine
  MOD_RES (583)..(583): Selenocysteine
  MOD_RES (592)..(592): Selenocysteine
  MOD_RES (622)..(622): Selenocysteine
  MOD_RES (635)..(635): Selenocysteine
  MOD_RES (675)..(675): Selenocysteine
  MOD_RES (694)..(694): Selenocysteine
  MOD_RES (729)..(729): Selenocysteine
  MOD_RES (736)..(736): Selenocysteine
  MOD_RES (760)..(760): Selenocysteine
  MOD_RES (798)..(798): Selenocysteine
  MOD_RES (803)..(803): Selenocysteine
  MOD_RES (818)..(818): Selenocysteine
  MOD_RES (831)..(831): Selenocysteine
  MOD_RES (880)..(881): Selenocysteine
  MOD_RES (903)..(903): Selenocysteine
  MOD_RES (941)..(941): Selenocysteine
  MOD_RES (985)..(985): Selenocysteine
  MOD_RES (990)..(990): Selenocysteine
  MOD_RES (994)..(994): Selenocysteine
  MOD_RES (1016)..(1016): Selenocysteine
MVAMAEAEAGVAVEVRGLPPAVPDELLXLYFENRRRSGGGPVLSWQRLGCGGVLXFREPADAERVLAQADHELHGAQLSLRPAPPRAPARLLLQGLPPGXXPQRLEQHVQALLRASGLPVQPCCALASPRPDRALVQLPKPLSEADVRVLEEQAQNLGLEGXLVSLARVPQARAVRVVGDGASVDLLLLELYLENERRSGGGPLEDLQRLPGPLGXVASFQQWQVAERVLQQEHRLQGSELSLVPHYDILEPEELAENXSGGDHPSXQGPRAXKHALLRXGGLVXALQGAGXVXMGSGEEPGQSGASLRXGPMVQGRGIMXXGSGQEPGQSGXSLRXGPMGSLGQAEQVSSMPMGSLEHEGLVSLRPVGLQEQEGPMSLGPVGSAGPVEXSKGLLGQEGLVEIAMDSPEQEGLVGPMEIXMGSLEKAGPVSPGCVKLAGQEGLVEMVLLMEPGAMRFLQLYHEDLLAGLGDVALLPLEGPDMXGFRLCGAQASCQAAEEFLRSLLGSISCHVLCLEHPGSARFLLGPEGQHLLQGLEAQFQCVFGXERLAXAXLDXGLEEVDPXEALPVLPGNAHXLWXPDSXEEVRELLAXLEGLDLDGEDWLPRELEEEGPQEQPEEEVXPGHEEEEPVAPSXVAPRWLEEEAALQLALHRSLEPQGQVAEQEEAAALRQALXLSLLEQPPLEAEEPPDGGXDGKAQLVVHSAFEQDVEELDRALRAALEVHVQEEXVGPWRRXLPAELRARLERCHGVSVALRGDCXILRGFGAHPARAARHLVALLAGPWDQSLAFPLAASGPXLAGQXLKGPWNNLERLAENXGEFQEVVRAFYDXLDAARSSIRVVRVERVSHPLLQQQYELYRERLLQRCERRPVEQVLYHGXXAPAVPDICAHGFNRSFCGRNAXVYGKGVYFARRASLSVQDRYSPPNADGHKAVFVARVLXGDYGQGRRGLRAPPLRGPGHVLLRYDSAVDCICQPSIFVIFHDXQALPXHLIXCEHVPRASPDDPSGLPGRSPDX

SEQ ID NO: 19381 - protein, 1025 aa, Homo sapiens
  MOD_RES (28)..(28): Selenocysteine
  MOD_RES (55)..(55): Selenocysteine
  MOD_RES (100)..(101): Selenocysteine
  MOD_RES (162)..(162): Selenocysteine
  MOD_RES (216)..(216): Selenocysteine
  MOD_RES (259)..(259): Selenocysteine
  MOD_RES (267)..(267): Selenocysteine
  MOD_RES (273)..(273): Selenocysteine
  MOD_RES (280)..(280): Selenocysteine
  MOD_RES (285)..(285): Selenocysteine
  MOD_RES (292)..(292): Selenocysteine
  MOD_RES (294)..(294): Selenocysteine
  MOD_RES (310)..(310): Selenocysteine
  MOD_RES (321)..(322): Selenocysteine
  MOD_RES (333)..(333): Selenocysteine
  MOD_RES (337)..(337): Selenocysteine
  MOD_RES (390)..(390): Selenocysteine
  MOD_RES (420)..(420): Selenocysteine
  MOD_RES (483)..(483): Selenocysteine
  MOD_RES (546)..(546): Selenocysteine
  MOD_RES (551)..(551): Selenocysteine
  MOD_RES (553)..(553): Selenocysteine
  MOD_RES (556)..(556): Selenocysteine
  MOD_RES (564)..(564): Selenocysteine
  MOD_RES (576)..(576): Selenocysteine
  MOD_RES (579)..(579): Selenocysteine
  MOD_RES (583)..(583): Selenocysteine
  MOD_RES (601)..(601): Selenocysteine
  MOD_RES (631)..(631): Selenocysteine
  MOD_RES (644)..(644): Selenocysteine
  MOD_RES (684)..(684): Selenocysteine
  MOD_RES (703)..(703): Selenocysteine
  MOD_RES (738)..(738): Selenocysteine
  MOD_RES (745)..(745): Selenocysteine
  MOD_RES (769)..(769): Selenocysteine
  MOD_RES (807)..(807): Selenocysteine
  MOD_RES (812)..(812): Selenocysteine
  MOD_RES (827)..(827): Selenocysteine
  MOD_RES (840)..(840): Selenocysteine
  MOD_RES (889)..(890): Selenocysteine
  MOD_RES (912)..(912): Selenocysteine
  MOD_RES (950)..(950): Selenocysteine
  MOD_RES (994)..(994): Selenocysteine
  MOD_RES (999)..(999): Selenocysteine
  MOD_RES (1003)..(1003): Selenocysteine
  MOD_RES (1025)..(1025): Selenocysteine
MVAMAEAEAGVAVEVRGLPPAVPDELLXLYFENRRRSGGGPVLSWQRLGCGGVLXFREPADAERVLAQADHELHGAQLSLRPAPPRAPARLLLQGLPPGXXPQRLEQHVQALLRASGLPVQPCCALASPRPDRALVQLPKPLSEADVRVLEEQAQNLGLEGXLVSLARVPQARAVRVVGDGASVDLLLLELYLENERRSGGGPLEDLQRLPGPLGXVASFQQWQVAERVLQQEHRLQGSELSLVPHYDILEPEELAENXSGGDHPSXQGPRAXKHALLRXGGLVXALQGAGXVXMGSGEEPGQSGASLRXGPMVQGRGIMXXGSGQEPGQSGXSLRXGPMGSLGQAEQVSSMPMGSLEHEGLVSLRPVGLQEQEGPMSLGPVGSAGPVEXSKGLLGQEGLVEIAMDSPEQEGLVGPMEIXMGSLEKAGPVSPGCVKLAGQEGLVEMVLLMEPGAMRFLQLYHEDLLAGLGDVALLPLEGPDMXGFRLCGAQASCQAAEEFLRSLLGSISCHVLCLEHPGSARFLLGPEGQHLLQGLEAQFQCVFGXERLAXAXLDXGLEEVDPXEALPVLPGNAHXLWXPDSXGGDQEDVSLEEVRELLAXLEGLDLDGEDWLPRELEEEGPQEQPEEEVXPGHEEEEPVAPSXVAPRWLEEEAALQLALHRSLEPQGQVAEQEEAAALRQALXLSLLEQPPLEAEEPPDGGXDGKAQLVVHSAFEQDVEELDRALRAALEVHVQEEXVGPWRRXLPAELRARLERCHGVSVALRGDCXILRGFGAHPARAARHLVALLAGPWDQSLAFPLAASGPXLAGQXLKGPWNNLERLAENXGEFQEVVRAFYDXLDAARSSIRVVRVERVSHPLLQQQYELYRERLLQRCERRPVEQVLYHGXXAPAVPDICAHGFNRSFCGRNAXVYGKGVYFARRASLSVQDRYSPPNADGHKAVFVARVLXGDYGQGRRGLRAPPLRGPGHVLLRYDSAVDCICQPSIFVIFHDXQALPXHLIXCEHVPRASPDDPSGLPGRSPDX

SEQ ID NO: 19382 - protein, 146 aa, Homo sapiens
  MOD_RES (28)..(28): Selenocysteine
  MOD_RES (55)..(55): Selenocysteine
  MOD_RES (100)..(101): Selenocysteine
MVAMAEAEAGVAVEVRGLPPAVPDELLXLYFENRRRSGGGPVLSWQRLGCGGVLXFREPADAERVLAQADHELHGAQLSLRPAPPRAPARLLLQGLPPGXXPQRLEQHVQALLRASGLPVQPCCALASPRPDRALVQLPKPLSEAG

SEQ ID NO: 19383 - protein, 339 aa, Homo sapiens
  MOD_RES (28)..(28): Selenocysteine
  MOD_RES (55)..(55): Selenocysteine
  MOD_RES (77)..(77): Selenocysteine
  MOD_RES (131)..(131): Selenocysteine
  MOD_RES (174)..(174): Selenocysteine
  MOD_RES (182)..(182): Selenocysteine
  MOD_RES (188)..(188): Selenocysteine
  MOD_RES (195)..(195): Selenocysteine
  MOD_RES (200)..(200): Selenocysteine
  MOD_RES (207)..(207): Selenocysteine
  MOD_RES (209)..(209): Selenocysteine
  MOD_RES (225)..(225): Selenocysteine
  MOD_RES (236)..(237): Selenocysteine
  MOD_RES (248)..(248): Selenocysteine
  MOD_RES (252)..(252): Selenocysteine
  MOD_RES (305)..(305): Selenocysteine
  MOD_RES (335)..(335): Selenocysteine
MVAMAEAEAGVAVEVRGLPPAVPDELLXLYFENRRRSGGGPVLSWQRLGCGGVLXFREPADVRVLEEQAQNLGLEGXLVSLARVPQARAVRVVGDGASVDLLLLELYLENERRSGGGPLEDLQRLPGPLGXVASFQQWQVAERVLQQEHRLQGSELSLVPHYDILEPEELAENXSGGDHPSXQGPRAXKHALLRXGGLVXALQGAGXVXMGSGEEPGQSGASLRXGPMVQGRGIMXXGSGQEPGQSGXSLRXGPMGSLGQAEQVSSMPMGSLEHEGLVSLRPVGLQEQEGPMSLGPVGSAGPVEXSKGLLGQEGLVEIAMDSPEQEGLVGPMEIXMGSL

SEQ ID NO: 19384 - protein, 323 aa, Homo sapiens
  MOD_RES (96)..(96): Selenocysteine
  MOD_RES (112)..(112): Selenocysteine
  MOD_RES (117)..(117): Selenocysteine
  MOD_RES (141)..(141): Selenocysteine
  MOD_RES (174)..(174): Selenocysteine
  MOD_RES (181)..(181): Selenocysteine
  MOD_RES (184)..(184): Selenocysteine
  MOD_RES (227)..(227): Selenocysteine
  MOD_RES (258)..(258): Selenocysteine
  MOD_RES (293)..(293): Selenocysteine
MQPSGWAAAREAAGRDMLAADLRCSLFASALQSYKRDSVLRPFPASYARGDCKDFEALLADASKLPNLKELLQSSGDNHKRAWDLVSWILSSKVLXIHSAGKAEFEKIQKLXGAPHXPVPAPDFLFEIEYFDPANAKFYEXKGERDLIYAFHGSRLENFHSIIHNGLHCHLNKXSLFGEGXYLXSDLSLALIYSPHGHGWQHSLLGPILSCVAVCEVIDHPDVKCQXKKKDSKEIDRRRARIKHSEGGDIPPKYFVVXNNQLLRVKYLLVYSQKPPKSRASSQLSWFSSHWFXVMISLYLLLLLIVSVINSSAFQHFWNRAKR

SEQ ID NO: 19385 - protein, 207 aa, Homo sapiens
  MOD_RES (59)..(59): Selenocysteine
  MOD_RES (66)..(66): Selenocysteine
  MOD_RES (69)..(69): Selenocysteine
  MOD_RES (112)..(112): Selenocysteine
  MOD_RES (143)..(143): Selenocysteine
  MOD_RES (177)..(177): Selenocysteine
MQPSGWAAAREAAGRDMLAADLRCSLFASALQSYKRDSVLRPFPASYARGDCKDFEALXSLFGEGXYLXSDLSLALIYSPHGHGWQHSLLGPILSCVAVCEVIDHPDVKCQXKKKDSKEIDRRRARIKHSEGGDIPPKYFVVXNNQLLRVKYLLVYSQKPPKRASSQLSWFSSHWFXVMISLYLLLLLIVSVINSSAFQHFWNRAKR

SEQ ID NO: 19386 - protein, 72 aa, Homo sapiens
  MOD_RES (1)..(1): Any amino acid
  MOD_RES (22)..(22): Selenocysteine
  MOD_RES (56)..(56): Selenocysteine
XRRARIKHSEGGDIPPKYFVVXNNQLLRVKYLLVYSQKPPKRASSQLSWFSSHWFXVMISLYLLLLLIALGI

SEQ ID NO: 19387 - protein, 110 aa, Homo sapiens
  MOD_RES (9)..(9): Selenocysteine
  MOD_RES (28)..(28): Selenocysteine
  MOD_RES (39)..(39): Selenocysteine
  MOD_RES (62)..(62): Selenocysteine
  MOD_RES (86)..(86): Selenocysteine
MAARRRRSXGGGRARALNESKRVNNGNXAPEDSSPAKKXRRCQRQESKKMPVAGGKANKDRXEDKQDESVKALLLKGKAPVDPECXAKVGKAHVYCEGNDVYDVMLNQIP

SEQ ID NO: 19388 - protein, 570 aa, Homo sapiens
  MOD_RES (9)..(9): Selenocysteine
  MOD_RES (28)..(28): Selenocysteine
  MOD_RES (39)..(39): Selenocysteine
  MOD_RES (62)..(62): Selenocysteine
  MOD_RES (86)..(86): Selenocysteine
  MOD_RES (109)..(109): Selenocysteine
  MOD_RES (171)..(171): Selenocysteine
  MOD_RES (197)..(197): Selenocysteine
  MOD_RES (199)..(199): Selenocysteine
  MOD_RES (205)..(205): Selenocysteine
  MOD_RES (249)..(249): Selenocysteine
  MOD_RES (258)..(258): Selenocysteine
  MOD_RES (294)..(294): Selenocysteine
  MOD_RES (304)..(304): Selenocysteine
  MOD_RES (310)..(310): Selenocysteine
  MOD_RES (336)..(336): Selenocysteine
  MOD_RES (376)..(376): Selenocysteine
  MOD_RES (380)..(380): Selenocysteine
  MOD_RES (385)..(385): Selenocysteine
  MOD_RES (387)..(387): Selenocysteine
  MOD_RES (440)..(440): Selenocysteine
  MOD_RES (469)..(469): Selenocysteine
  MOD_RES (502)..(502): Selenocysteine
  MOD_RES (517)..(517): Selenocysteine
  MOD_RES (522)..(522): Selenocysteine
  MOD_RES (531)..(531): Selenocysteine
  MOD_RES (540)..(540): Selenocysteine
MAARRRRSXGGGRARALNESKRVNNGNXAPEDSSPAKKXRRCQRQESKKMPVAGGKANKDRXEDKQDESVKALLLKGKAPVDPECXAKVGKAHVYCEGNDVYDVMLNQXNLQFNNNKYYLIQLLEDDAQRNFSVWMRWGRVGKMGQHSLVACSGNLNKAKEIFQKKFLDKXKNNWEDREKFEKVPGKYDMLQMDYAXNXQDEEEXKKEESLKSPLKPESQLDLRVQELIKLICNVQAMEEMMMEMKYNXKKAPLGKLXVAQIKAGYQSLKKIEDCIRAGQHGRALMEACNEFYXRIPHDFGLRXPPLIRXQKELSEKIQLLEALGDIEIAIKLVKXELQSPEHPLDQHYRNLHCALRPLDHESYEFKVISQYLQSXHAPXHSDYXMXLLDLFEVEKDGEKEAFREDLHNRMLLWHGSRMSNWVGILSHGLRIAPPEAPIXGYMFGKGIYFADMSSKSANYCFASRLKNXGLLLLSEVALGQCNELLEANPKAEGLLQGKHSXKGLGKMAPSSAHFVXLNGSXVPLGPASDXGILNPDGYXLNYNEYIVYNPNQVRMRYLLKVQFNFLQLW

SEQ ID NO: 19389 - protein, 531 aa, Homo sapiens
  MOD_RES (9)..(9): Selenocysteine
  MOD_RES (28)..(28): Selenocysteine
  MOD_RES (39)..(39): Selenocysteine
  MOD_RES (62)..(62): Selenocysteine
  MOD_RES (99)..(99): Selenocysteine
  MOD_RES (122)..(122): Selenocysteine
  MOD_RES (184)..(184): Selenocysteine
  MOD_RES (210)..(210): Selenocysteine
  MOD_RES (212)..(212): Selenocysteine
  MOD_RES (218)..(218): Selenocysteine
  MOD_RES (262)..(262): Selenocysteine
  MOD_RES (271)..(271): Selenocysteine
  MOD_RES (307)..(307): Selenocysteine
  MOD_RES (317)..(317): Selenocysteine
  MOD_RES (323)..(323): Selenocysteine
  MOD_RES (349)..(349): Selenocysteine
  MOD_RES (389)..(389): Selenocysteine
  MOD_RES (393)..(393): Selenocysteine
  MOD_RES (398)..(398): Selenocysteine
  MOD_RES (400)..(400): Selenocysteine
  MOD_RES (453)..(453): Selenocysteine
  MOD_RES (482)..(482): Selenocysteine
  MOD_RES (515)..(515): Selenocysteine
  MOD_RES (530)..(530): Selenocysteine
MAARRRRSXGGGRARALNESKRVNNGNXAPEDSSPAKKXRRCQRQESKKMPVAGGKANKDRXEDKQDGMPGRSWASKRVSESVKALLLKGKAPVDPECXAKVGKAHVYCEGNDVYDVMLNQXNLQFNNNKYYLIQLLEDDAQRNFSVWMRWGRVGKMGQHSLVACSGNLNKAKEIFQKKFLDKXKNNWEDREKFEKVPGKYDMLQMDYAXNXQDEEEXKKEESLKSPLKPESQLDLRVQELIKLICNVQAMEEMMMEMKYNXKKAPLGKLXVAQIKAGYQSLKKIEDCIRAGQHGRALMEACNEFYXRIPHDFGLRXPPLIRXQKELSEKIQLLEALGDIEIAIKLVKXELQSPEHPLDQHYRNLHCALRPLDHESYEFKVISQYLQSXHAPXHSDYXMXLLDLFEVEKDGEKEAFREDLHNRMLLWHGSRMSNWVGILSHGLRIAPPEAPIXGYMFGKGIYFADMSSKSANYCFASRLKNXGLLLLSEVALGQCNELLEANPKAEGLLQGKHSXKGLGKMAPSSAHFVXL

SEQ ID NO: 19390 - protein, 583 aa, Homo sapiens
  MOD_RES (9)..(9): Selenocysteine
  MOD_RES (28)..(28): Selenocysteine
  MOD_RES (39)..(39): Selenocysteine
  MOD_RES (62)..(62): Selenocysteine
  MOD_RES (99)..(99): Selenocysteine
  MOD_RES (122)..(122): Selenocysteine
  MOD_RES (184)..(184): Selenocysteine
  MOD_RES (210)..(210): Selenocysteine
  MOD_RES (212)..(212): Selenocysteine
  MOD_RES (218)..(218): Selenocysteine
  MOD_RES (262)..(262): Selenocysteine
  MOD_RES (271)..(271): Selenocysteine
  MOD_RES (307)..(307): Selenocysteine
  MOD_RES (317)..(317): Selenocysteine
  MOD_RES (323)..(323): Selenocysteine
  MOD_RES (349)..(349): Selenocysteine
  MOD_RES (389)..(389): Selenocysteine
  MOD_RES (393)..(393): Selenocysteine
  MOD_RES (398)..(398): Selenocysteine
  MOD_RES (400)..(400): Selenocysteine
  MOD_RES (453)..(453): Selenocysteine
  MOD_RES (482)..(482): Selenocysteine
  MOD_RES (515)..(515): Selenocysteine
  MOD_RES (530)..(530): Selenocysteine
  MOD_RES (535)..(535): Selenocysteine
  MOD_RES (544)..(544): Selenocysteine
  MOD_RES (553)..(553): Selenocysteine
MAARRRRSXGGGRARALNESKRVNNGNXAPEDSSPAKKXRRCQRQESKKMPVAGGKANKDRXEDKQDGMPGRSWASKRVSESVKALLLKGKAPVDPECXAKVGKAHVYCEGNDVYDVMLNQXNLQFNNNKYYLIQLLEDDAQRNFSVWMRWGRVGKMGQHSLVACSGNLNKAKEIFQKKFLDKXKNNWEDREKFEKVPGKYDMLQMDYAXNXQDEEEXKKEESLKSPLKPESQLDLRVQELIKLICNVQAMEEMMMEMKYNXKKAPLGKLXVAQIKAGYQSLKKIEDCIRAGQHGRALMEACNEFYXRIPHDFGLRXPPLIRXQKELSEKIQLLEALGDIEIAIKLVKXELQSPEHPLDQHYRNLHCALRPLDHESYEFKVISQYLQSXHAPXHSDYXMXLLDLFEVEKDGEKEAFREDLHNRMLLWHGSRMSNWVGILSHGLRIAPPEAPIXGYMFGKGIYFADMSSKSANYCFASRLKNXGLLLLSEVALGQCNELLEANPKAEGLLQGKHSXKGLGKMAPSSAHFVXLNGSXVPLGPASDXGILNPDGYXLNYNEYIVYNPNQVRMRYLLKVQFNFLQLW

SEQ ID NO: 19391 - protein, 177 aa, Homo sapiens
  MOD_RES (1)..(1): Any amino acid
  MOD_RES (26)..(26): Selenocysteine
  MOD_RES (66)..(66): Selenocysteine
  MOD_RES (70)..(70): Selenocysteine
  MOD_RES (75)..(75): Selenocysteine
  MOD_RES (77)..(77): Selenocysteine
  MOD_RES (130)..(130): Selenocysteine
  MOD_RES (159)..(159): Selenocysteine
  MOD_RES (175)..(175): Selenocysteine
XKELSEKIQLLEALGDIEIAIKLVKXELQSPEHPLDQHYRNLHCALRPLDHESYEFKVISQYLQSXHAPXHSDYXMXLLDLFEVEKDGEKEAFREDLHNRMLLWHGSRMSNWVGILSHGLRIAPPEAPIXGYMFGKGIYFADMSSKSANYCFASRLKNXGLLLLSEEWEYSAIRXSK

SEQ ID NO: 19392 - protein, 683 aa, Homo sapiens
  MOD_RES (7)..(7): Selenocysteine
  MOD_RES (29)..(29): Selenocysteine
  MOD_RES (41)..(41): Selenocysteine
  MOD_RES (52)..(52): Selenocysteine
  MOD_RES (86)..(86): Selenocysteine
  MOD_RES (91)..(91): Selenocysteine
  MOD_RES (103)..(103): Selenocysteine
  MOD_RES (111)..(111): Selenocysteine
  MOD_RES (142)..(142): Selenocysteine
  MOD_RES (191)..(191): Selenocysteine
  MOD_RES (209)..(210): Selenocysteine
  MOD_RES (224)..(224): Selenocysteine
  MOD_RES (228)..(228): Selenocysteine
  MOD_RES (235)..(236): Selenocysteine
  MOD_RES (240)..(240): Selenocysteine
  MOD_RES (267)..(267): Selenocysteine
  MOD_RES (274)..(274): Selenocysteine
  MOD_RES (289)..(289): Selenocysteine
  MOD_RES (299)..(299): Selenocysteine
  MOD_RES (305)..(305): Selenocysteine
  MOD_RES (335)..(335): Selenocysteine
  MOD_RES (348)..(348): Selenocysteine
  MOD_RES (363)..(363): Selenocysteine
  MOD_RES (386)..(386): Selenocysteine
  MOD_RES (389)..(389): Selenocysteine
  MOD_RES (448)..(448): Selenocysteine
  MOD_RES (454)..(454): Selenocysteine
  MOD_RES (458)..(458): Selenocysteine
  MOD_RES (469)..(469): Selenocysteine
  MOD_RES (482)..(482): Selenocysteine
  MOD_RES (487)..(487): Selenocysteine
  MOD_RES (489)..(489): Selenocysteine
  MOD_RES (504)..(504): Selenocysteine
  MOD_RES (545)..(545): Selenocysteine
  MOD_RES (548)..(548): Selenocysteine
  MOD_RES (567)..(567): Selenocysteine
  MOD_RES (594)..(594): Selenocysteine
  MOD_RES (632)..(632): Selenocysteine
  MOD_RES (652)..(652): Selenocysteine
  MOD_RES (654)..(654): Selenocysteine
  MOD_RES (659)..(659): Selenocysteine
  MOD_RES (669)..(670): Selenocysteine
MPENPAXDKLQVLQVLDRLKMKLQEKGDXSQNEKLSMFYEXLKSPLFNQILXLQQSIKQLKGQLNHIPSDCSANFDFSRKGLLVFXDGSIXNGNVHRPSNNSXVSGLFPWXPKLGNEDFNSVIQQMAQGRQIEYIDIERPSXGGLGFSVVALRSQNLGKVDIFVKDVQPGSVADRDQRLKENDQILAINHXPLDQNISHQQAIALLQQXXGSLRLIVAREPVHXKSSXSSSLNDXXLPEXVCWGHVEEVELINDGSGLGFGIVGGKXSGVVVRXIVPGGLADRDGRLQXGDHILKIGGXNVQGMXSEQVAQVLRNCGNSVRMLVARDPAGDISVXPPAPAALPVALPXVASKGPGSDSSLFEXYNVELVRKDGQSLGIRIVGYVGXSHXGEASGIYVKSIIPGSAAYHNGHIQVNDKIVAVDGVNIQGFANHDVVEVLRNAGQVVHLXLVRRKXSSSXSPLEPPSDRGXVVEPLKPPALFLXGAVEXEXNVDGEDEEIKERIDXLKNDNIQALEKLEKVPDSPENELKSRWENLLGPDYEVMVAXLDXQIADDAELQKYSKLLPIHXLRLGVEVDSFDGHHYISSIVSGGPVDXLGLLQPEDELLEVNGMQLYGKSRREAVSFLKEVPPPFXLVCCRRLFDDEASVDEPRRXEXSLPEXENSLKYKRLXXIWMSILKKMMMGN

SEQ ID NO: 19393 - protein, 1181 aa, Homo sapiens
  MOD_RES (7)..(7): Selenocysteine
  MOD_RES (29)..(29): Selenocysteine
  MOD_RES (41)..(41): Selenocysteine
  MOD_RES (52)..(52): Selenocysteine
  MOD_RES (86)..(86): Selenocysteine
  MOD_RES (91)..(91): Selenocysteine
  MOD_RES (103)..(103): Selenocysteine
  MOD_RES (111)..(111): Selenocysteine
  MOD_RES (142)..(142): Selenocysteine
  MOD_RES (191)..(191): Selenocysteine
  MOD_RES (209)..(210): Selenocysteine
  MOD_RES (224)..(224): Selenocysteine
  MOD_RES (228)..(228): Selenocysteine
  MOD_RES (235)..(236): Selenocysteine
  MOD_RES (240)..(240): Selenocysteine
  MOD_RES (267)..(267): Selenocysteine
  MOD_RES (274)..(274): Selenocysteine
  MOD_RES (289)..(289): Selenocysteine
  MOD_RES (299)..(299): Selenocysteine
  MOD_RES (305)..(305): Selenocysteine
  MOD_RES (335)..(335): Selenocysteine
  MOD_RES (348)..(348): Selenocysteine
  MOD_RES (363)..(363): Selenocysteine
  MOD_RES (386)..(386): Selenocysteine
  MOD_RES (389)..(389): Selenocysteine
  MOD_RES (448)..(448): Selenocysteine
  MOD_RES (454)..(454): Selenocysteine
  MOD_RES (458)..(458): Selenocysteine
  MOD_RES (469)..(469): Selenocysteine
  MOD_RES (482)..(482): Selenocysteine
  MOD_RES (487)..(487): Selenocysteine
  MOD_RES (489)..(489): Selenocysteine
  MOD_RES (504)..(504): Selenocysteine
  MOD_RES (545)..(545): Selenocysteine
  MOD_RES (548)..(548): Selenocysteine
  MOD_RES (567)..(567): Selenocysteine
  MOD_RES (594)..(594): Selenocysteine
  MOD_RES (632)..(632): Selenocysteine
  MOD_RES (652)..(652): Selenocysteine
  MOD_RES (654)..(654): Selenocysteine
  MOD_RES (659)..(659): Selenocysteine
  MOD_RES (669)..(669): Selenocysteine
  MOD_RES (710)..(710): Selenocysteine
  MOD_RES (748)..(748): Selenocysteine
  MOD_RES (794)..(794): Selenocysteine
  MOD_RES (799)..(799): Selenocysteine
  MOD_RES (858)..(858): Selenocysteine
  MOD_RES (898)..(898): Selenocysteine
  MOD_RES (910)..(910): Selenocysteine
  MOD_RES (926)..(926): Selenocysteine
  MOD_RES (929)..(929): Selenocysteine
  MOD_RES (961)..(961): Selenocysteine
  MOD_RES (982)..(982): Selenocysteine
  MOD_RES (1022)..(1022): Selenocysteine
  MOD_RES (1032)..(1032): Selenocysteine
  MOD_RES (1041)..(1041): Selenocysteine
  MOD_RES (1043)..(1043): Selenocysteine
  MOD_RES (1057)..(1057): Selenocysteine
  MOD_RES (1088)..(1088): Selenocysteine
  MOD_RES (1116)..(1116): Selenocysteine
  MOD_RES (1121)..(1121): Selenocysteine
  MOD_RES (1162)..(1162): Selenocysteine
  MOD_RES (1166)..(1167): Selenocysteine
MPENPAXDKLQVLQVLDRLKMKLQEKGDXSQNEKLSMFYEXLKSPLFNQILXLQQSIKQLKGQLNHIPSDCSANFDFSRKGLLVFXDGSIXNGNVHRPSNNSXVSGLFPWXPKLGNEDFNSVIQQMAQGRQIEYIDIERPSXGGLGFSVVALRSQNLGKVDIFVKDVQPGSVADRDQRLKENDQILAINHXPLDQNISHQQAIALLQQXXGSLRLIVAREPVHXKSSXSSSLNDXXLPEXVCWGHVEEVELINDGSGLGFGIVGGKXSGVVVRXIVPGGLADRDGRLQXGDHILKIGGXNVQGMXSEQVAQVLRNCGNSVRMLVARDPAGDISVXPPAPAALPVALPXVASKGPGSDSSLFEXYNVELVRKDGQSLGIRIVGYVGXSHXGEASGIYVKSIIPGSAAYHNGHIQVNDKIVAVDGVNIQGFANHDVVEVLRNAGQVVHLXLVRRKXSSSXSPLEPPSDRGXVVEPLKPPALFLXGAVEXEXNVDGEDEEIKERIDXLKNDNIQALEKLEKVPDSPENELKSRWENLLGPDYEVMVAXLDXQIADDAELQKYSKLLPIHXLRLGVEVDSFDGHHYISSIVSGGPVDXLGLLQPEDELLEVNGMQLYGKSRREAVSFLKEVPPPFXLVCCRRLFDDEASVDEPRRXEXSLPEXEVDHNMDVNXEEDDDGELALWSPEVKIVELVKDCKGLGFSILDYQDPLDPXRSVIVIRSLVADGVAERSGGLLPGDRLVSVNEYCLDNXSLAEAVEILKAVPPGLVHLGICKPLVEDNEEESCYILHSSSNEDKXEFSGXIHDINSSLILEAPKGFRDEPYFKEELVDEPFLDLGKSFHSQQKEIEQSKEAWEMHEFLXPRLQEMDEEREILVDEEYELYQDPSPSMELYPLSHIQEAXPVPSVNELHFGXQWLHDNEPSESQEARXGRXVYSQEAQPYGYCPENVMKENFVMESLPSVPSXEGNSQQGRFDDLENLNSLAKXSLDLGMIPNDVQGPSLLIDLPVVAQRREQEDLPLYQHQAXRVISKASAYXGMLSSRYAXDXCELPEREEGEGEEXPNFSHWGPPRIVEIFREPNVSLGISIVGGQXVIKRLKNGEELKGIFIKQVLEDSPAGKXNALKXGDKILEVSGVDLQNASHSEAVEAIKNAGNPVVFIVQSLSSXPPWXXERDSVSKKKKRKER

SEQ ID NO: 19394 - protein, 1182 aa, Homo sapiens
  MOD_RES (7)..(7): Selenocysteine
  MOD_RES (29)..(29): Selenocysteine
  MOD_RES (41)..(41): Selenocysteine
  MOD_RES (52)..(52): Selenocysteine
  MOD_RES (86)..(86): Selenocysteine
  MOD_RES (91)..(91): Selenocysteine
  MOD_RES (103)..(103): Selenocysteine
  MOD_RES (111)..(111): Selenocysteine
  MOD_RES (142)..(142): Selenocysteine
  MOD_RES (191)..(191): Selenocysteine
  MOD_RES (209)..(210): Selenocysteine
  MOD_RES (224)..(224): Selenocysteine
  MOD_RES (228)..(228): Selenocysteine
  MOD_RES (235)..(236): Selenocysteine
  MOD_RES (240)..(240): Selenocysteine
  MOD_RES (267)..(267): Selenocysteine
  MOD_RES (274)..(274): Selenocysteine
  MOD_RES (289)..(289): Selenocysteine
  MOD_RES (299)..(299): Selenocysteine
  MOD_RES (305)..(305): Selenocysteine
  MOD_RES (335)..(335): Selenocysteine
  MOD_RES (348)..(348): Selenocysteine
  MOD_RES (363)..(363): Selenocysteine
  MOD_RES (386)..(386): Selenocysteine
  MOD_RES (389)..(389): Selenocysteine
  MOD_RES (448)..(448): Selenocysteine
  MOD_RES (454)..(454): Selenocysteine
  MOD_RES (458)..(458): Selenocysteine
  MOD_RES (469)..(469): Selenocysteine
  MOD_RES (482)..(482): Selenocysteine
  MOD_RES (487)..(487): Selenocysteine
  MOD_RES (489)..(489): Selenocysteine
  MOD_RES (504)..(504): Selenocysteine
  MOD_RES (545)..(545): Selenocysteine
  MOD_RES (548)..(548): Selenocysteine
  MOD_RES (567)..(567): Selenocysteine
  MOD_RES (594)..(594): Selenocysteine
  MOD_RES (632)..(632): Selenocysteine
  MOD_RES (652)..(652): Selenocysteine
  MOD_RES (654)..(654): Selenocysteine
  MOD_RES (659)..(659): Selenocysteine
  MOD_RES (669)..(669): Selenocysteine
  MOD_RES (710)..(710): Selenocysteine
  MOD_RES (748)..(748): Selenocysteine
  MOD_RES (794)..(794): Selenocysteine
  MOD_RES (799)..(799): Selenocysteine
  MOD_RES (858)..(858): Selenocysteine
  MOD_RES (898)..(898): Selenocysteine
  MOD_RES (910)..(910): Selenocysteine
  MOD_RES (926)..(926): Selenocysteine
  MOD_RES (929)..(929): Selenocysteine
  MOD_RES (961)..(961): Selenocysteine
  MOD_RES (982)..(982): Selenocysteine
  MOD_RES (1022)..(1022): Selenocysteine
  MOD_RES (1032)..(1032): Selenocysteine
  MOD_RES (1041)..(1041): Selenocysteine
  MOD_RES (1043)..(1043): Selenocysteine
  MOD_RES (1057)..(1057): Selenocysteine
  MOD_RES (1088)..(1088): Selenocysteine
  MOD_RES (1116)..(1116): Selenocysteine
  MOD_RES (1121)..(1121): Selenocysteine
  MOD_RES (1150)..(1150): Selenocysteine
  MOD_RES (1163)..(1163): Selenocysteine
  MOD_RES (1168)..(1168): Selenocysteine
MPENPAXDKLQVLQVLDRLKMKLQEKGDXSQNEKLSMFYEXLKSPLFNQILXLQQSIKQLKGQLNHIPSDCSANFDFSRKGLLVFXDGSIXNGNVHRPSNNSXVSGLFPWXPKLGNEDFNSVIQQMAQGRQIEYIDIERPSXGGLGFSVVALRSQNLGKVDIFVKDVQPGSVADRDQRLKENDQILAINHXPLDQNISHQQAIALLQQXXGSLRLIVAREPVHXKSSXSSSLNDXXLPEXVCWGHVEEVELINDGSGLGFGIVGGKXSGVVVRXIVPGGLADRDGRLQXGDHILKIGGXNVQGMXSEQVAQVLRNCGNSVRMLVARDPAGDISVXPPAPAALPVALPXVASKGPGSDSSLFEXYNVELVRKDGQSLGIRIVGYVGXSHXGEASGIYVKSIIPGSAAYHNGHIQVNDKIVAVDGVNIQGFANHDVVEVLRNAGQVVHLXLVRRKXSSSXSPLEPPSDRGXVVEPLKPPALFLXGAVEXEXNVDGEDEEIKERIDXLKNDNIQALEKLEKVPDSPENELKSRWENLLGPDYEVMVAXLDXQIADDAELQKYSKLLPIHXLRLGVEVDSFDGHHYISSIVSGGPVDXLGLLQPEDELLEVNGMQLYGKSRREAVSFLKEVPPPFXLVCCRRLFDDEASVDEPRRXEXSLPEXEVDHNMDVNXEEDDDGELALWSPEVKIVELVKDCKGLGFSILDYQDPLDPXRSVIVIRSLVADGVAERSGGLLPGDRLVSVNEYCLDNXSLAEAVEILKAVPPGLVHLGICKPLVEDNEEESCYILHSSSNEDKXEFSGXIHDINSSLILEAPKGFRDEPYFKEELVDEPFLDLGKSFHSQQKEIEQSKEAWEMHEFLXPRLQEMDEEREILVDEEYELYQDPSPSMELYPLSHIQEAXPVPSVNELHFGXQWLHDNEPSESQEARXGRXVYSQEAQPYGYCPENVMKENFVMESLPSVPSXEGNSQQGRFDDLENLNSLAKXSLDLGMIPNDVQGPSLLIDLPVVAQRREQEDLPLYQHQAXRVISKASAYXGMLSSRYAXDXCELPEREEGEGEEXPNFSHWGPPRIVEIFREPNVSLGISIVGGQXVIKRLKNGEELKGIFIKQVLEDSPAGKXNALKXGDKILEASGVDKELCNQFVSPAEGRKIAXWEVCSEPSSCHSXPAWVXEQDSVSKKKKNHEG

SEQ ID NO: 19395 - protein, 1801 aa, Homo sapiens
  MOD_RES (7)..(7): Selenocysteine
  MOD_RES (29)..(29): Selenocysteine
  MOD_RES (41)..(41): Selenocysteine
  MOD_RES (52)..(52): Selenocysteine
  MOD_RES (86)..(86): Selenocysteine
  MOD_RES (91)..(91): Selenocysteine
  MOD_RES (103)..(103): Selenocysteine
  MOD_RES (111)..(111): Selenocysteine
  MOD_RES (142)..(142): Selenocysteine
  MOD_RES (191)..(191): Selenocysteine
  MOD_RES (209)..(210): Selenocysteine
  MOD_RES (224)..(224): Selenocysteine
  MOD_RES (228)..(228): Selenocysteine
  MOD_RES (235)..(236): Selenocysteine
  MOD_RES (240)..(240): Selenocysteine
  MOD_RES (267)..(267): Selenocysteine
  MOD_RES (274)..(274): Selenocysteine
  MOD_RES (289)..(289): Selenocysteine
  MOD_RES (299)..(299): Selenocysteine
  MOD_RES (305)..(305): Selenocysteine
  MOD_RES (335)..(335): Selenocysteine
  MOD_RES (348)..(348): Selenocysteine
  MOD_RES (363)..(363): Selenocysteine
  MOD_RES (386)..(386): Selenocysteine
  MOD_RES (389)..(389): Selenocysteine
  MOD_RES (448)..(448): Selenocysteine
  MOD_RES (454)..(454): Selenocysteine
  MOD_RES (458)..(458): Selenocysteine
  MOD_RES (469)..(469): Selenocysteine
  MOD_RES (482)..(482): Selenocysteine
  MOD_RES (487)..(487): Selenocysteine
  MOD_RES (489)..(489): Selenocysteine
  MOD_RES (504)..(504): Selenocysteine
  MOD_RES (545)..(545): Selenocysteine
  MOD_RES (548)..(548): Selenocysteine
  MOD_RES (567)..(567): Selenocysteine
  MOD_RES (594)..(594): Selenocysteine
  MOD_RES (632)..(632): Selenocysteine
  MOD_RES (652)..(652): Selenocysteine
  MOD_RES (654)..(654): Selenocysteine
  MOD_RES (659)..(659): Selenocysteine
  MOD_RES (669)..(669): Selenocysteine
  MOD_RES (710)..(710): Selenocysteine
  MOD_RES (748)..(748): Selenocysteine
  MOD_RES (794)..(794): Selenocysteine
  MOD_RES (799)..(799): Selenocysteine
  MOD_RES (858)..(858): Selenocysteine
  MOD_RES (898)..(898): Selenocysteine
  MOD_RES (910)..(910): Selenocysteine
  MOD_RES (926)..(926): Selenocysteine
  MOD_RES (929)..(929): Selenocysteine
  MOD_RES (961)..(961): Selenocysteine
  MOD_RES (982)..(982): Selenocysteine
  MOD_RES (1022)..(1022): Selenocysteine
  MOD_RES (1032)..(1032): Selenocysteine
  MOD_RES (1041)..(1041): Selenocysteine
  MOD_RES (1043)..(1043): Selenocysteine
  MOD_RES (1057)..(1057): Selenocysteine
  MOD_RES (1088)..(1088): Selenocysteine
  MOD_RES (1116)..(1116): Selenocysteine
  MOD_RES (1121)..(1121): Selenocysteine
  MOD_RES (1162)..(1162): Selenocysteine
  MOD_RES (1177)..(1177): Selenocysteine
  MOD_RES (1184)..(1184): Selenocysteine
  MOD_RES (1194)..(1194): Selenocysteine
  MOD_RES (1209)..(1209): Selenocysteine
  MOD_RES (1222)..(1222): Selenocysteine
  MOD_RES (1309)..(1309): Selenocysteine
  MOD_RES (1331)..(1331): Selenocysteine
  MOD_RES (1349)..(1349): Selenocysteine
  MOD_RES (1387)..(1387): Selenocysteine
  MOD_RES (1407)..(1407): Selenocysteine
  MOD_RES (1412)..(1412): Selenocysteine
  MOD_RES (1427)..(1427): Selenocysteine
  MOD_RES (1457)..(1457): Selenocysteine
  MOD_RES (1503)..(1503): Selenocysteine
  MOD_RES (1508)..(1508): Selenocysteine
  MOD_RES (1595)..(1595): Selenocysteine
  MOD_RES (1598)..(1598): Selenocysteine
  MOD_RES (1620)..(1620): Selenocysteine
  MOD_RES (1624)..(1625): Selenocysteine
  MOD_RES (1649)..(1649): Selenocysteine
  MOD_RES (1657)..(1657): Selenocysteine
  MOD_RES (1670)..(1670): Selenocysteine
  MOD_RES (1676)..(1676): Selenocysteine
  MOD_RES (1718)..(1718): Selenocysteine
  MOD_RES (1762)..(1762): Selenocysteine
  MOD_RES (1776)..(1776): Selenocysteine
  MOD_RES (1784)..(1784): Selenocysteine
  MOD_RES (1792)..(1792): Selenocysteine
  MOD_RES (1799)..(1799): Selenocysteine
MPENPAXDKLQVLQVLDRLKMKLQEKGDXSQNEKLSMFYEXLKSPLFNQILXLQQSIKQLKGQLNHIPSDCSANFDFSRKGLLVFXDGSIXNGNVHRPSNNSXVSGLFPWXPKLGNEDFNSVIQQMAQGRQIEYIDIERPSXGGLGFSVVALRSQNLGKVDIFVKDVQPGSVADRDQRLKENDQILAINHXPLDQNISHQQAIALLQQXXGSLRLIVAREPVHXKSSXSSSLNDXXLPEXVCWGHVEEVELINDGSGLGFGIVGGKXSGVVVRXIVPGGLADRDGRLQXGDHILKIGGXNVQGMXSEQVAQVLRNCGNSVRMLVARDPAGDISVXPPAPAALPVALPXVASKGPGSDSSLFEXYNVELVRKDGQSLGIRIVGYVGXSHXGEASGIYVKSIIPGSAAYHNGHIQVNDKIVAVDGVNIQGFANHDVVEVLRNAGQVVHLXLVRRKXSSSXSPLEPPSDRGXVVEPLKPPALFLXGAVEXEXNVDGEDEEIKERIDXLKNDNIQALEKLEKVPDSPENELKSRWENLLGPDYEVMVAXLDXQIADDAELQKYSKLLPIHXLRLGVEVDSFDGHHYISSIVSGGPVDXLGLLQPEDELLEVNGMQLYGKSRREAVSFLKEVPPPFXLVCCRRLFDDEASVDEPRRXEXSLPEXEVDHNMDVNXEEDDDGELALWSPEVKIVELVKDCKGLGFSILDYQDPLDPXRSVIVIRSLVADGVAERSGGLLPGDRLVSVNEYCLDNXSLAEAVEILKAVPPGLVHLGICKPLVEDNEEESCYILHSSSNEDKXEFSGXIHDINSSLILEAPKGFRDEPYFKEELVDEPFLDLGKSFHSQQKEIEQSKEAWEMHEFLXPRLQEMDEEREILVDEEYELYQDPSPSMELYPLSHIQEAXPVPSVNELHFGXQWLHDNEPSESQEARXGRXVYSQEAQPYGYCPENVMKENFVMESLPSVPSXEGNSQQGRFDDLENLNSLAKXSLDLGMIPNDVQGPSLLIDLPVVAQRREQEDLPLYQHQAXRVISKASAYXGMLSSRYAXDXCELPEREEGEGEEXPNFSHWGPPRIVEIFREPNVSLGISIVGGQXVIKRLKNGEELKGIFIKQVLEDSPAGKXNALKXGDKILEVSGVDLQNASHSEAVEAIKNAGNPVVFIVQSLSSXPRVIPNVHNKANKIXGNQNQDXQEKKEKRQGXAPPPMKLPPPYKALXDDSDENEEEDAFXDQKIRQRYADLPGELHIIELEKDKNGLGLSLAGNKDRSRMSIFVVGINPEGPAAADGRMRIGDELLEINNQILYGRSHQNASAIIKXAPSKVKLVFIRNEDAVNQMAVXPFPVPSSSPSSIEDQSGXEPISSEEDGSVEVGIKQLPESESFKLAVSQMKQQKYPXKVSFSSQEIPLAPASSYHSXDADFXGYGGFQAPLSVDPAXCPIVPGQEMIIEISKGRSGLGLSIVGGKDXPLNAIVIHEVYEEGAAARDGRLWAGDQILEVNGVDLRNSSHEEAIXALRQXPQKVRLVVYRDEAHYRDEENLEIFPVDLQKKAGRGLGLSIVGKRNGSGVFISDIVKGGAADLDGRLIQGDQILSVNGEDMRNASQEXVAXILKCAQGLVQLEIGRLRAGSWXSARXXSQNSQGSQQSAHSSCHPSFAPVIXGLQNLVGXKRVSDPSQKNSGXDMEPRXVEINRELSDALGISIAGGRGSPLGDIPVFIAMIQASGVAARXQKLKVGDRIVSINGQPLDGLSHADVVNLLKNAYGRIILQVVADXNISAIAAQLENMSXGYHLGSPXAEHHPEDXEEQLQMXAD

SEQ ID NO: 19396 - protein, 1134 aa, Homo sapiens
  MOD_RES (4)..(4): Selenocysteine
  MOD_RES (7)..(7): Selenocysteine
  MOD_RES (26)..(26): Selenocysteine
  MOD_RES (53)..(53): Selenocysteine
  MOD_RES (91)..(91): Selenocysteine
  MOD_RES (111)..(111): Selenocysteine
  MOD_RES (113)..(113): Selenocysteine
  MOD_RES (118)..(118): Selenocysteine
  MOD_RES (128)..(128): Selenocysteine
  MOD_RES (169)..(169): Selenocysteine
  MOD_RES (207)..(207): Selenocysteine
  MOD_RES (253)..(253): Selenocysteine
  MOD_RES (258)..(258): Selenocysteine
  MOD_RES (317)..(317): Selenocysteine
  MOD_RES (357)..(357): Selenocysteine
  MOD_RES (369)..(369): Selenocysteine
  MOD_RES (385)..(385): Selenocysteine
  MOD_RES (388)..(388): Selenocysteine
  MOD_RES (420)..(420): Selenocysteine
  MOD_RES (441)..(441): Selenocysteine
  MOD_RES (481)..(481): Selenocysteine
  MOD_RES (491)..(491): Selenocysteine
  MOD_RES (500)..(500): Selenocysteine
  MOD_RES (502)..(502): Selenocysteine
  MOD_RES (516)..(516): Selenocysteine
  MOD_RES (547)..(547): Selenocysteine
  MOD_RES (575)..(575): Selenocysteine
  MOD_RES (580)..(580): Selenocysteine
  MOD_RES (621)..(621): Selenocysteine
  MOD_RES (636)..(636): Selenocysteine
  MOD_RES (643)..(643): Selenocysteine
  MOD_RES (653)..(653): Selenocysteine
  MOD_RES (668)..(668): Selenocysteine
  MOD_RES (681)..(681): Selenocysteine
  MOD_RES (768)..(768): Selenocysteine
  MOD_RES (790)..(790): Selenocysteine
  MOD_RES (808)..(808): Selenocysteine
  MOD_RES (846)..(846): Selenocysteine
  MOD_RES (866)..(866): Selenocysteine
  MOD_RES (871)..(871): Selenocysteine
  MOD_RES (886)..(886): Selenocysteine
  MOD_RES (916)..(916): Selenocysteine
  MOD_RES (962)..(962): Selenocysteine
  MOD_RES (967)..(967): Selenocysteine
  MOD_RES (1054)..(1054): Selenocysteine
  MOD_RES (1057)..(1057): Selenocysteine
  MOD_RES (1079)..(1079): Selenocysteine
  MOD_RES (1083)..(1084): Selenocysteine
  MOD_RES (1094)..(1094): Selenocysteine
  MOD_RES (1131)..(1131): Selenocysteine
MVAXLDXQIADDAELQKYSKLLPIHXLRLGVEVDSFDGHHYISSIVSGGPVDXLGLLQPEDELLEVNGMQLYGKSRREAVSFLKEVPPPFXLVCCRRLFDDEASVDEPRRXEXSLPEXEVDHNMDVNXEEDDDGELALWSPEVKIVELVKDCKGLGFSILDYQDPLDPXRSVIVIRSLVADGVAERSGGLLPGDRLVSVNEYCLDNXSLAEAVEILKAVPPGLVHLGICKPLVEDNEEESCYILHSSSNEDKXEFSGXIHDINSSLILEAPKGFRDEPYFKEELVDEPFLDLGKSFHSQQKEIEQSKEAWEMHEFLXPRLQEMDEEREILVDEEYELYQDPSPSMELYPLSHIQEAXPVPSVNELHFGXQWLHDNEPSESQEARXGRXVYSQEAQPYGYCPENVMKENFVMESLPSVPSXEGNSQQGRFDDLENLNSLAKXSLDLGMIPNDVQGPSLLIDLPVVAQRREQEDLPLYQHQAXRVISKASAYXGMLSSRYAXDXCELPEREEGEGEEXPNFSHWGPPRIVEIFREPNVSLGISIVGGQXVIKRLKNGEELKGIFIKQVLEDSPAGKXNALKXGDKILEVSGVDLQNASHSEAVEAIKNAGNPVVFIVQSLSSXPRVIPNVHNKANKIXGNQNQDXQEKKEKRQGXAPPPMKLPPPYKALXDDSDENEEEDAFXDQKIRQRYADLPGELHIIELEKDKNGLGLSLAGNKDRSRMSIFVVGINPEGPAAADGRMRIGDELLEINNQILYGRSHQNASAIIKXAPSKVKLVFIRNEDAVNQMAVXPFPVPSSSPSSIEDQSGXEPISSEEDGSVEVGIKQLPESESFKLAVSQMKQQKYPXKVSFSSQEIPLAPASSYHSXDADFXGYGGFQAPLSVDPAXCPIVPGQEMIIEISKGRSGLGLSIVGGKDXPLNAIVIHEVYEEGAAARDGRLWAGDQILEVNGVDLRNSSHEEAIXALRQXPQKVRLVVYRDEAHYRDEENLEIFPVDLQKKAGRGLGLSIVGKRNGSGVFISDIVKGGAADLDGRLIQGDQILSVNGEDMRNASQEXVAXILKCAQGLVQLEIGRLRAGSWXSARXXSQNSQSAECXQQLSSLLRSCHHWPAKPGWHKKSFRSFPEKFRHRYGXKDC

SEQ ID NO: 19397 - protein, 452 aa, Homo sapiens
  MOD_RES (93)..(93): Selenocysteine
  MOD_RES (115)..(115): Selenocysteine
  MOD_RES (133)..(133): Selenocysteine
  MOD_RES (171)..(171): Selenocysteine
  MOD_RES (191)..(191): Selenocysteine
  MOD_RES (196)..(196): Selenocysteine
  MOD_RES (211)..(211): Selenocysteine
  MOD_RES (241)..(241): Selenocysteine
  MOD_RES (268)..(268): Selenocysteine
  MOD_RES (317)..(317): Selenocysteine
  MOD_RES (322)..(322): Selenocysteine
  MOD_RES (409)..(409): Selenocysteine
  MOD_RES (412)..(412): Selenocysteine
  MOD_RES (434)..(434): Selenocysteine
  MOD_RES (438)..(439): Selenocysteine
MVQGGFPEKIRQRYADLPGELHIIELEKDKNGLGLSLAGNKDRSRMSIFVVGINPEGPAAADGRMRIGDELLEINNQILYGRSHQNASAIIKXAPSKVKLVFIRNEDAVNQMAVXPFPVPSSSPSSIEDQSGXEPISSEEDGSVEVGIKQLPESESFKLAVSQMKQQKYPXKVSFSSQEIPLAPASSYHSXDADFXGYGGFQAPLSVDPAXCPIVPGQEMIIEISKGRSGLGLSIVGGKDXPLFWRLGSPRAWSQHLVRAFMLHHPVXEVEGQNAIVIHEVYEEGAAARDGRLWAGDQILEVNGVDLRNSSHEEAIXALRQXPQKVRLVVYRDEAHYRDEENLEIFPVDLQKKAGRGLGLSIVGKRNGSGVFISDIVKGGAADLDGRLIQGDQILSVNGEDMRNASQEXVAXILKCAQGLVQLEIGRLRAGSWXSARXXSQNSQVVDGFSSD

SEQ ID NO: 19398 - protein, 593 aa, Homo sapiens
  MOD_RES (93)..(93): Selenocysteine
  MOD_RES (115)..(115): Selenocysteine
  MOD_RES (133)..(133): Selenocysteine
  MOD_RES (171)..(171): Selenocysteine
  MOD_RES (191)..(191): Selenocysteine
  MOD_RES (196)..(196): Selenocysteine
  MOD_RES (211)..(211): Selenocysteine
  MOD_RES (241)..(241): Selenocysteine
  MOD_RES (287)..(287): Selenocysteine
  MOD_RES (292)..(292): Selenocysteine
  MOD_RES (379)..(379): Selenocysteine
  MOD_RES (382)..(382): Selenocysteine
  MOD_RES (404)..(404): Selenocysteine
  MOD_RES (408)..(409): Selenocysteine
  MOD_RES (433)..(433): Selenocysteine
  MOD_RES (441)..(441): Selenocysteine
  MOD_RES (454)..(454): Selenocysteine
  MOD_RES (460)..(460): Selenocysteine
  MOD_RES (502)..(502): Selenocysteine
  MOD_RES (546)..(546): Selenocysteine
  MOD_RES (560)..(560): Selenocysteine
  MOD_RES (568)..(568): Selenocysteine
  MOD_RES (576)..(576): Selenocysteine
MVQGGFPEKIRQRYADLPGELHIIELEKDKNGLGLSLAGNKDRSRMSIFVVGINPEGPAAADGRMRIGDELLEINNQILYGRSHQNASAIIKXAPSKVKLVFIRNEDAVNQMAVXPFPVPSSSPSSIEDQSGXEPISSEEDGSVEVGIKQLPESESFKLAVSQMKQQKYPXKVSFSSQEIPLAPASSYHSXDADFXGYGGFQAPLSVDPAXCPIVPGQEMIIEISKGRSGLGLSIVGGKDXPLNAIVIHEVYEEGAAARDGRLWAGDQILEVNGVDLRNSSHEEAIXALRQXPQKVRLVVYRDEAHYRDEENLEIFPVDLQKKAGRGLGLSIVGKRNGSGVFISDIVKGGAADLDGRLIQGDQILSVNGEDMRNASQEXVAXILKCAQGLVQLEIGRLRAGSWXSARXXSQNSQGSQQSAHSSCHPSFAPVIXGLQNLVGXKRVSDPSQKNSGXDMEPRXVEINRELSDALGISIAGGRGSPLGDIPVFIAMIQASGVAARXQKLKVGDRIVSINGQPLDGLSHADVVNLLKNAYGRIILQVVADXNISAIAAQLENMSXGYHLGSPXAEHHPEDXERCCNCPMDSPCPLLLG

SEQ ID NO: 19399 - protein, 111 aa, Homo sapiens
  MOD_RES (10)..(10): Selenocysteine
  MOD_RES (25)..(25): Selenocysteine
  MOD_RES (38)..(38): Selenocysteine
QEKKEKRQGXAPPPMKLPPPYKALXDDSDENEEEDAFXDQKIRQRYADLPGELHIIELEKDKNGLGLSLAGNKDRSRMSIFVVGINPEGPAAADGRMRIGDELLEVRSMCF

SEQ ID NO: 19400 - protein, 139 aa, Homo sapiens
  MOD_RES (1)..(1): Any amino acid
  MOD_RES (4)..(4): Selenocysteine
  MOD_RES (9)..(9): Selenocysteine
  MOD_RES (96)..(96): Selenocysteine
  MOD_RES (99)..(99): Selenocysteine
  MOD_RES (121)..(121): Selenocysteine
  MOD_RES (125)..(126): Selenocysteine
XAIXALRQXPQKVRLVVYRDEAHYRDEENLEIFPVDLQKKAGRGLGLSIVGKRNGSGVFISDIVKGGAADLDGRLIQGDQILSVNGEDMRNASQEXVAXILKCAQGLVQLEIGRLRAGSWXSARXXSQNSQVVDGFSSD

SEQ ID NO: 19401 - protein, 146 aa, Homo sapiens
  MOD_RES (1)..(1): Any amino acid
  MOD_RES (8)..(8): Selenocysteine
  MOD_RES (23)..(23): Selenocysteine
  MOD_RES (30)..(30): Selenocysteine
  MOD_RES (40)..(40): Selenocysteine
  MOD_RES (55)..(55): Selenocysteine
  MOD_RES (68)..(68): Selenocysteine
  MOD_RES (136)..(136): Selenocysteine
  MOD_RES (138)..(138): Selenocysteine
XVQSLSSXPRVIPNVHNKANKIXGNQNQDXQEKKEKRQGXAPPPMKLPPPYKALXDDSDENEEEDAFXDQKIRQRYADLPGELHIIELEKDKNGLGLSLAGNKDRSRMSIFVVGINPEGPAAADGRMRIGDELLEXLXQNRIYSHP

SEQ ID NO: 19402 - protein, 537 aa, Homo sapiens
  MOD_RES (16)..(16): Selenocysteine
  MOD_RES (24)..(24): Selenocysteine
  MOD_RES (91)..(91): Selenocysteine
  MOD_RES (108)..(108): Selenocysteine
  MOD_RES (123)..(123): Selenocysteine
  MOD_RES (138)..(138): Selenocysteine
  MOD_RES (180)..(180): Selenocysteine
  MOD_RES (190)..(190): Selenocysteine
  MOD_RES (248)..(248): Selenocysteine
  MOD_RES (262)..(262): Selenocysteine
  MOD_RES (302)..(302): Selenocysteine
  MOD_RES (317)..(317): Selenocysteine
  MOD_RES (351)..(351): Selenocysteine
  MOD_RES (437)..(437): Selenocysteine
  MOD_RES (484)..(484): Selenocysteine
  MOD_RES (508)..(508): Selenocysteine
  MOD_RES (523)..(524): Selenocysteine
  MOD_RES (532)..(532): Selenocysteine
MERVNDASCGPSGCYXYQVSRHSXEMLHNLNQQRKNGGRFCDVLLRVGDESFPAHRAVLAACSEYFESVFSAQLGDGGAADGGPADVGGAXAAPGGGAGGSRELEMHXISSKVFGDILDFAYXSRIVVRLESFPELMXAAKFLLMRSVIEICQEVIKQSNVQILVPPARADIMLFRPPGXSDLGFPLDMXNGAALAANSNGIAGSMQPEEEAARAAGAAIAGQASLPVLPGVDRLPMVAGPLSPQLLXSPFPSVASSAPPLXGKRGRGRPRKANLLDSMFGSPGGLREAGILPCGLCGKVFXDANRLRQHEAQHGVXSLQLGYIDLPPPRLGENGLPISEDPDGPRKRSRXRKQVACEICGKIFRDVYHLNRHKLSHSGEKPYSCPVCGLRFKRKDRMSYHVRSHDGSVGKPYICQSCGKGFSRPDHLNGHIKQVHXSERPHKCQVWVGSSSGLPPLEPLPSDLPSWDFAQPALWRSSHSVPDXAFSLSLKKSFPALENLGPAHSSNXLFCPAPPGYLRQGWXXPEGSRAFXQWPVG

SEQ ID NO: 19403 - protein, 537 aa, Homo sapiens
  MOD_RES (16)..(16): Selenocysteine
  MOD_RES (24)..(24): Selenocysteine
  MOD_RES (91)..(91): Selenocysteine
  MOD_RES (108)..(108): Selenocysteine
  MOD_RES (123)..(123): Selenocysteine
  MOD_RES (138)..(138): Selenocysteine
  MOD_RES (180)..(180): Selenocysteine
  MOD_RES (190)..(190): Selenocysteine
  MOD_RES (248)..(248): Selenocysteine
  MOD_RES (262)..(262): Selenocysteine
  MOD_RES (302)..(302): Selenocysteine
  MOD_RES (317)..(317): Selenocysteine
  MOD_RES (351)..(351): Selenocysteine
  MOD_RES (437)..(437): Selenocysteine
  MOD_RES (446)..(446): Selenocysteine
  MOD_RES (453)..(453): Selenocysteine
  MOD_RES (533)..(533): Selenocysteine
MERVNDASCGPSGCYXYQVSRHSXEMLHNLNQQRKNGGRFCDVLLRVGDESFPAHRAVLAACSEYFESVFSAQLGDGGAADGGPADVGGAXAAPGGGAGGSRELEMHXISSKVFGDILDFAYXSRIVVRLESFPELMXAAKFLLMRSVIEICQEVIKQSNVQILVPPARADIMLFRPPGXSDLGFPLDMXNGAALAANSNGIAGSMQPEEEAARAAGAAIAGQASLPVLPGVDRLPMVAGPLSPQLLXSPFPSVASSAPPLXGKRGRGRPRKANLLDSMFGSPGGLREAGILPCGLCGKVFXDANRLRQHEAQHGVXSLQLGYIDLPPPRLGENGLPISEDPDGPRKRSRXRKQVACEICGKIFRDVYHLNRHKLSHSGEKPYSCPVCGLRFKRKDRMSYHVRSHDGSVGKPYICQSCGKGFSRPDHLNGHIKQVHXSERPHKCQXCNASFAXRDRLRSHLACHEDKVPCQVCGKYLRAAYMADHLKKHSEGPSNFCSICNRGLQAPGAHPEWGSSVPLRQDLWQQRRPEMLXSGSD

SEQ ID NO: 19404 - protein, 641 aa, Homo sapiens
  MOD_RES (16)..(16): Selenocysteine
  MOD_RES (24)..(24): Selenocysteine
  MOD_RES (91)..(91): Selenocysteine
  MOD_RES (108)..(108): Selenocysteine
  MOD_RES (123)..(123): Selenocysteine
  MOD_RES (138)..(138): Selenocysteine
  MOD_RES (180)..(180): Selenocysteine
  MOD_RES (190)..(190): Selenocysteine
  MOD_RES (248)..(248): Selenocysteine
  MOD_RES (262)..(262): Selenocysteine
  MOD_RES (302)..(302): Selenocysteine
  MOD_RES (317)..(317): Selenocysteine
  MOD_RES (351)..(351): Selenocysteine
  MOD_RES (437)..(437): Selenocysteine
  MOD_RES (446)..(446): Selenocysteine
  MOD_RES (453)..(453): Selenocysteine
  MOD_RES (530)..(530): Selenocysteine
MERVNDASCGPSGCYXYQVSRHSXEMLHNLNQQRKNGGRFCDVLLRVGDESFPAHRAVLAACSEYFESVFSAQLGDGGAADGGPADVGGAXAAPGGGAGGSRELEMHXISSKVFGDILDFAYXSRIVVRLESFPELMXAAKFLLMRSVIEICQEVIKQSNVQILVPPARADIMLFRPPGXSDLGFPLDMXNGAALAANSNGIAGSMQPEEEAARAAGAAIAGQASLPVLPGVDRLPMVAGPLSPQLLXSPFPSVASSAPPLXGKRGRGRPRKANLLDSMFGSPGGLREAGILPCGLCGKVFXDANRLRQHEAQHGVXSLQLGYIDLPPPRLGENGLPISEDPDGPRKRSRXRKQVACEICGKIFRDVYHLNRHKLSHSGEKPYSCPVCGLRFKRKDRMSYHVRSHDGSVGKPYICQSCGKGFSRPDHLNGHIKQVHXSERPHKCQXCNASFAXRDRLRSHLACHEDKVPCQVCGKYLRAAYMADHLKKHSEGPSNFCSICNREGQKCSHQDPIESSDSYGDLSDASDLKXPEKQSANGSFSCDMAVPKNKMESDGEKKYPCPECGSFFRSKSYLNKHIQKVHVRALGGPLGDLGPALGSPFSPQQNMSLLESFGFQIVQSAFASSLVDPEVDQQPMGPEGK

SEQ ID NO: 19405 - protein, 687 aa, Homo sapiens
  MOD_RES (16)..(16): Selenocysteine
  MOD_RES (24)..(24): Selenocysteine
  MOD_RES (91)..(91): Selenocysteine
  MOD_RES (108)..(108): Selenocysteine
  MOD_RES (123)..(123): Selenocysteine
  MOD_RES (138)..(138): Selenocysteine
  MOD_RES (180)..(180): Selenocysteine
  MOD_RES (190)..(190): Selenocysteine
  MOD_RES (248)..(248): Selenocysteine
  MOD_RES (262)..(262): Selenocysteine
  MOD_RES (302)..(302): Selenocysteine
  MOD_RES (317)..(317): Selenocysteine
  MOD_RES (351)..(351): Selenocysteine
  MOD_RES (437)..(437): Selenocysteine
  MOD_RES (446)..(446): Selenocysteine
  MOD_RES (453)..(453): Selenocysteine
  MOD_RES (516)..(516): Selenocysteine
  MOD_RES (544)..(544): Selenocysteine
  MOD_RES (576)..(576): Selenocysteine
MERVNDASCGPSGCYXYQVSRHSXEMLHNLNQQRKNGGRFCDVLLRVGDESFPAHRAVLAACSEYFESVFSAQLGDGGAADGGPADVGGAXAAPGGGAGGSRELEMHXISSKVFGDILDFAYXSRIVVRLESFPELMXAAKFLLMRSVIEICQEVIKQSNVQILVPPARADIMLFRPPGXSDLGFPLDMXNGAALAANSNGIAGSMQPEEEAARAAGAAIAGQASLPVLPGVDRLPMVAGPLSPQLLXSPFPSVASSAPPLXGKRGRGRPRKANLLDSMFGSPGGLREAGILPCGLCGKVFXDANRLRQHEAQHGVXSLQLGYIDLPPPRLGENGLPISEDPDGPRKRSRXRKQVACEICGKIFRDVYHLNRHKLSHSGEKPYSCPVCGLRFKRKDRMSYHVRSHDGSVGKPYICQSCGKGFSRPDHLNGHIKQVHXSERPHKCQXCNASFAXRDRLRSHLACHEDKVPCQVCGKYLRAAYMADHLKKHSEGPSNFCSICNRGFSSASYLKVHVKXHHGVPLPQVSRHQEPILNGGAAFHCARXYGNKEGQKCSHQDPIESSDSYGDLSDASDLKXPEKQSANGSFSCDMAVPKNKMESDGEKKYPCPECGSFFRSKSYLNKHIQKVHVRALGGPLGDLGPALGSPFSPQQNMSLLESFGFQIVQSAFASSLVDPEVDQQPMGPEGK

SEQ ID NO: 19406 - protein, 72 aa, Homo sapiens
  MOD_RES (61)..(61): Selenocysteine
  MOD_RES (70)..(70): Selenocysteine
KKIEDLEKEVVRERQENLRLVRLMQDKEEMIGKLKEEIDLLNRDLDDIEDENEQLKQENKXLLKVVGQLXSS

SEQ ID NO: 19407 - protein, 64 aa, Homo sapiens
  MOD_RES (3)..(3): Selenocysteine
  MOD_RES (8)..(8): Selenocysteine
  MOD_RES (16)..(17): Selenocysteine
  MOD_RES (60)..(60): Selenocysteine
MAXGGYRXSSGLGGSXXDFLEEWKAKREKMRAKQNPPGPAPPGGGSSDAAGKPPAGALGXPAAA

SEQ ID NO: 19408 - protein, 76 aa, Homo sapiens
  MOD_RES (3)..(3): Selenocysteine
  MOD_RES (8)..(8): Selenocysteine
  MOD_RES (16)..(17): Selenocysteine
  MOD_RES (60)..(60): Selenocysteine
MAXGGYRXSSGLGGSXXDFLEEWKAKREKMRAKQNPPGPAPPGGGSSDAAGKPPAGALGXPAAAAANELNNNLPGG

SEQ ID NO: 19409 - protein, 340 aa, Homo sapiens
  MOD_RES (3)..(3): Selenocysteine
  MOD_RES (8)..(8): Selenocysteine
  MOD_RES (16)..(17): Selenocysteine
  MOD_RES (60)..(60): Selenocysteine
  MOD_RES (99)..(99): Selenocysteine
  MOD_RES (163)..(163): Selenocysteine
  MOD_RES (194)..(194): Selenocysteine
  MOD_RES (198)..(198): Selenocysteine
  MOD_RES (221)..(221): Selenocysteine
  MOD_RES (229)..(230): Selenocysteine
  MOD_RES (244)..(244): Selenocysteine
  MOD_RES (261)..(261): Selenocysteine
  MOD_RES (267)..(267): Selenocysteine
  MOD_RES (330)..(330): Selenocysteine
  MOD_RES (339)..(339): Selenocysteine
MAXGGYRXSSGLGGSXXDFLEEWKAKREKMRAKQNPPGPAPPGGGSSDAAGKPPAGALGXPAAAAANELNNNLPGGAPAAPAVPGPGGVNCAVGSAMLXRAAPGPRRSEDEPPAASASAAPPPQRDEEEPDGVPEKGKSSGPSARKGKGQIEKRKLREKRRSXGVVNIPAAECLDEYEDDEAGQKERKREDAIXQQNXIQNEAVNLLDPGSSYLLQEPPRXVSGRYKSXXSVSEEDVSSRYSRXDRSGFPRYNRDANVSGXLVSSSXLEKKIEDLEKEVVRERQENLRLVRLMQDKEEMIGKLKEEIDLLNRDLDDIEDENEQLKQENKXLLKVVGQLXR

SEQ ID NO: 19410 - protein, 194 aa, Homo sapiens
  MOD_RES (1)..(1): Any amino acid
  MOD_RES (6)..(6): Selenocysteine
  MOD_RES (45)..(45): Selenocysteine
  MOD_RES (109)..(109): Selenocysteine
  MOD_RES (140)..(140): Selenocysteine
  MOD_RES (144)..(144): Selenocysteine
  MOD_RES (167)..(167): Selenocysteine
  MOD_RES (181)..(181): Selenocysteine
  MOD_RES (187)..(187): Selenocysteine
XGALGXPAAAAANELNNNLPGGAPAAPAVPGPGGVNCAVGSAMLXRAAPGPRRSEDEPPAASASAAPPPQRDEEEPDGVPEKGKSSGPSARKGKGQIEKRKLREKRRSXGVVNIPAAECLDEYEDDEAGQKERKREDAIXQQNXIQNEAVNLLDPGSSYLLQEPPRXVSGRYKRKRDKPYXEQGAVXRSGSVGG

SEQ ID NO: 19411 - protein, 457 aa, Homo sapiens
  MOD_RES (4)..(4): Selenocysteine
  MOD_RES (98)..(98): Selenocysteine
  MOD_RES (157)..(157): Selenocysteine
  MOD_RES (173)..(174): Selenocysteine
  MOD_RES (245)..(245): Selenocysteine
  MOD_RES (263)..(263): Selenocysteine
  MOD_RES (276)..(276): Selenocysteine
  MOD_RES (300)..(300): Selenocysteine
  MOD_RES (305)..(305): Selenocysteine
  MOD_RES (314)..(314): Selenocysteine
  MOD_RES (329)..(329): Selenocysteine
  MOD_RES (334)..(334): Selenocysteine
  MOD_RES (352)..(352): Selenocysteine
  MOD_RES (357)..(357): Selenocysteine
  MOD_RES (420)..(420): Selenocysteine
  MOD_RES (456)..(456): Selenocysteine
MKFXLGLGSRAWRVSWEGAAAAAAGPGAGGSALRCRAQRVSSPRLGRRGSRLSGALPLCLSRGGGGAQALPDCAGPSPGHPGHPGARQLAGPLAMEQXYGEVNQLGGVFVNGRPLPNAIRLRIVELAQLGIRPCDISRQLRVSHGCVSKILARYNEXGSILPGAIGGSKPRVXXPNVVKHIRDYKQGDPGIFAWEIRDRLLADGVCDKYNVPSVSSISRILRNKIGSLAQPGPYEASKQPPSQPXLPYNHIYQYPYPSPVSPXGAKMGSHPGVPGXAGHVSIPRSWPSAHSVSNILGIRXFMEQXGALAGSEGXAYSPKMEDWAGVNRXAFPAXPAVNGLEKPALEADIKYXQSASXLSAVGGFLPACAYPASNQHGVYSAPGGGYLAPGPPWPPAQGPPLAPPGAGVAVHGGELAAAMXFKHPSREVADRKPPSSGSKAPDALSSLHGLPIPASXS

SEQ ID NO: 19412 - protein, 534 aa, Homo sapiens
  MOD_RES (4)..(4): Selenocysteine
  MOD_RES (98)..(98): Selenocysteine
  MOD_RES (157)..(157): Selenocysteine
  MOD_RES (173)..(174): Selenocysteine
  MOD_RES (245)..(245): Selenocysteine
  MOD_RES (263)..(263): Selenocysteine
  MOD_RES (276)..(276): Selenocysteine
  MOD_RES (300)..(300): Selenocysteine
  MOD_RES (305)..(305): Selenocysteine
  MOD_RES (314)..(314): Selenocysteine
  MOD_RES (329)..(329): Selenocysteine
  MOD_RES (334)..(334): Selenocysteine
  MOD_RES (352)..(352): Selenocysteine
  MOD_RES (357)..(357): Selenocysteine
  MOD_RES (420)..(420): Selenocysteine
  MOD_RES (439)..(439): Selenocysteine
  MOD_RES (445)..(445): Selenocysteine
  MOD_RES (461)..(461): Selenocysteine
  MOD_RES (484)..(484): Selenocysteine
MKFXLGLGSRAWRVSWEGAAAAAAGPGAGGSALRCRAQRVSSPRLGRRGSRLSGALPLCLSRGGGGAQALPDCAGPSPGHPGHPGARQLAGPLAMEQXYGEVNQLGGVFVNGRPLPNAIRLRIVELAQLGIRPCDISRQLRVSHGCVSKILARYNEXGSILPGAIGGSKPRVXXPNVVKHIRDYKQGDPGIFAWEIRDRLLADGVCDKYNVPSVSSISRILRNKIGSLAQPGPYEASKQPPSQPXLPYNHIYQYPYPSPVSPXGAKMGSHPGVPGXAGHVSIPRSWPSAHSVSNILGIRXFMEQXGALAGSEGXAYSPKMEDWAGVNRXAFPAXPAVNGLEKPALEADIKYXQSASXLSAVGGFLPACAYPASNQHGVYSAPGGGYLAPGPPWPPAQGPPLAPPGAGVAVHGGELAAAMXFKHPSREGSLPAPAARPRXPSVAYXDCPSRPRPPRGSSPRXRARRERQADPGAQVCAAAPAIGXGRIGGLAEEEASAGPRGARPASPQAQPCLWPDPPHFLYWSGFLGFSELGF

SEQ ID NO: 19413 - protein, 433 aa, Homo sapiens
  MOD_RES (15)..(15): Selenocysteine
  MOD_RES (19)..(19): Selenocysteine
  MOD_RES (26)..(26): Selenocysteine
  MOD_RES (32)..(32): Selenocysteine
  MOD_RES (74)..(74): Selenocysteine
  MOD_RES (133)..(133): Selenocysteine
  MOD_RES (149)..(150): Selenocysteine
  MOD_RES (221)..(221): Selenocysteine
  MOD_RES (239)..(239): Selenocysteine
  MOD_RES (252)..(252): Selenocysteine
  MOD_RES (276)..(276): Selenocysteine
  MOD_RES (281)..(281): Selenocysteine
  MOD_RES (290)..(290): Selenocysteine
  MOD_RES (305)..(305): Selenocysteine
  MOD_RES (310)..(310): Selenocysteine
  MOD_RES (328)..(328): Selenocysteine
  MOD_RES (333)..(333): Selenocysteine
  MOD_RES (396)..(396): Selenocysteine
  MOD_RES (432)..(432): Selenocysteine
MRRAPLRGSSAPLPXPSQXQAVCPWXPSCLGXHRSPLEVRLGAVPRSAWGPLANPPGVFSPSGSLLSGASAEQXYGEVNQLGGVFVNGRPLPNAIRLRIVELAQLGIRPCDISRQLRVSHGCVSKILARYNEXGSILPGAIGGSKPRVXXPNVVKHIRDYKQGDPGIFAWEIRDRLLADGVCDKYNVPSVSSISRILRNKIGSLAQPGPYEASKQPPSQPXLPYNHIYQYPYPSPVSPXGAKMGSHPGVPGXAGHVSIPRSWPSAHSVSNILGIRXFMEQXGALAGSEGXAYSPKMEDWAGVNRXAFPAXPAVNGLEKPALEADIKYXQSASXLSAVGGFLPACAYPASNQHGVYSAPGGGYLAPGPPWPPAQGPPLAPPGAGVAVHGGELAAAMXFKHPSREVADRKPPSSGSKAPDALSSLHGLPIPASXS

SEQ ID NO: 19414 - protein, 304 aa, Homo sapiens
  MOD_RES (79)..(79): Selenocysteine
  MOD_RES (96)..(96): Selenocysteine
  MOD_RES (112)..(112): Selenocysteine
  MOD_RES (132)..(132): Selenocysteine
  MOD_RES (145)..(145): Selenocysteine
  MOD_RES (154)..(154): Selenocysteine
  MOD_RES (160)..(160): Selenocysteine
  MOD_RES (163)..(163): Selenocysteine
  MOD_RES (168)..(168): Selenocysteine
  MOD_RES (173)..(173): Selenocysteine
  MOD_RES (228)..(228): Selenocysteine
  MOD_RES (230)..(230): Selenocysteine
  MOD_RES (270)..(270): Selenocysteine
  MOD_RES (284)..(284): Selenocysteine
  MOD_RES (295)..(295): Selenocysteine
  MOD_RES (297)..(297): Selenocysteine
  MOD_RES (302)..(302): Selenocysteine
MAGPCCVWGVVFFSCLSPAGHGGVNQLGGVFVNGRPLPDVVRQRIVELAHQGVRPCDISRQLRVSHGCVSKILGRYYEXGSIKPGVIGGSKPKVAXPKVVDKIAEYKRQNPXMFAWEIRDRLLAEGICDNDXVPSVSSINRIIRXKVQQPFHPXPDGAGXGVXAPGHXIVPSXASPPVSSASNDPVGSYSINGILGIPRSNDVSEGSVPNGDSQSGVDSLRKHLRADXFXQQQLEALDRVFERPSYPDVFQASEHIKSEQGNEYSLPALXPGLDEVKSSLSASXNPELGSNVSGXQXYPVVXGR

SEQ ID NO: 19415 - protein, 394 aa, Homo sapiens
  MOD_RES (75)..(75): Selenocysteine
  MOD_RES (92)..(92): Selenocysteine
  MOD_RES (108)..(108): Selenocysteine
  MOD_RES (128)..(128): Selenocysteine
  MOD_RES (141)..(141): Selenocysteine
  MOD_RES (150)..(150): Selenocysteine
  MOD_RES (156)..(156): Selenocysteine
  MOD_RES (159)..(159): Selenocysteine
  MOD_RES (164)..(164): Selenocysteine
  MOD_RES (169)..(169): Selenocysteine
  MOD_RES (232)..(232): Selenocysteine
  MOD_RES (234)..(234): Selenocysteine
  MOD_RES (274)..(274): Selenocysteine
  MOD_RES (288)..(288): Selenocysteine
  MOD_RES (299)..(299): Selenocysteine
  MOD_RES (301)..(301): Selenocysteine
  MOD_RES (306)..(306): Selenocysteine
  MOD_RES (313)..(314): Selenocysteine
  MOD_RES (325)..(325): Selenocysteine
  MOD_RES (332)..(332): Selenocysteine
  MOD_RES (334)..(334): Selenocysteine
  MOD_RES (355)..(355): Selenocysteine
MDMHCKADPFSAMHPGHGGVNQLGGVFVNGRPLPDVVRQRIVELAHQGVRPCDISRQLRVSHGCVSKILGRYYEXGSIKPGVIGGSKPKVAXPKVVDKIAEYKRQNPXMFAWEIRDRLLAEGICDNDXVPSVSSINRIIRXKVQQPFHPXPDGAGXGVXAPGHXIVPSXASPPVSSASNDPVGSYSINGILGIPRSNGEKRKRDEDVSEGSVPNGDSQSGVDSLRKHLRADXFXQQQLEALDRVFERPSYPDVFQASEHIKSEQGNEYSLPALXPGLDEVKSSLSASXNPELGSNVSGXQXYPVVXGRDMASXXLPGYPPHVPPXGQGSYPXSXLAGMVPGSEFSGNPYSHPQYXAYNEAWRFSNPALLSSPYYYSAAPRGSAPAAAAAAYDRH

SEQ ID NO: 19416 - protein, 396 aa, Homo sapiens
  MOD_RES (75)..(75): Selenocysteine
  MOD_RES (92)..(92): Selenocysteine
  MOD_RES (108)..(108): Selenocysteine
  MOD_RES (128)..(128): Selenocysteine
  MOD_RES (141)..(141): Selenocysteine
  MOD_RES (150)..(150): Selenocysteine
  MOD_RES (156)..(156): Selenocysteine
  MOD_RES (159)..(159): Selenocysteine
  MOD_RES (164)..(164): Selenocysteine
  MOD_RES (169)..(169): Selenocysteine
  MOD_RES (232)..(232): Selenocysteine
  MOD_RES (234)..(234): Selenocysteine
  MOD_RES (274)..(274): Selenocysteine
  MOD_RES (288)..(288): Selenocysteine
  MOD_RES (299)..(299): Selenocysteine
  MOD_RES (301)..(301): Selenocysteine
  MOD_RES (306)..(306): Selenocysteine
  MOD_RES (313)..(314): Selenocysteine
  MOD_RES (325)..(325): Selenocysteine
  MOD_RES (332)..(332): Selenocysteine
  MOD_RES (334)..(334): Selenocysteine
  MOD_RES (368)..(368): Selenocysteine
  MOD_RES (375)..(375): Selenocysteine
  MOD_RES (377)..(377): Selenocysteine
  MOD_RES (379)..(379): Selenocysteine
  MOD_RES (382)..(382): Selenocysteine
  MOD_RES (385)..(386): Selenocysteine
  MOD_RES (393)..(393): Selenocysteine
MDMHCKADPFSAMHPGHGGVNQLGGVFVNGRPLPDVVRQRIVELAHQGVRPCDISRQLRVSHGCVSKILGRYYEXGSIKPGVIGGSKPKVAXPKVVDKIAEYKRQNPXMFAWEIRDRLLAEGICDNDXVPSVSSINRIIRXKVQQPFHPXPDGAGXGVXAPGHXIVPSXASPPVSSASNDPVGSYSINGILGIPRSNGEKRKRDEDVSEGSVPNGDSQSGVDSLRKHLRADXFXQQQLEALDRVFERPSYPDVFQASEHIKSEQGNEYSLPALXPGLDEVKSSLSASXNPELGSNVSGXQXYPVVXGRDMASXXLPGYPPHVPPXGQGSYPXSXLAGMVPEAAVGPSSSLMSKPGRKLAEVPPCVQPXGASSPAXRXAXPSXRPXXRLGDSAXPPY

SEQ ID NO: 19417 - protein, 214 aa, Homo sapiens
  MOD_RES (75)..(75): Selenocysteine
  MOD_RES (92)..(92): Selenocysteine
  MOD_RES (108)..(108): Selenocysteine
  MOD_RES (128)..(128): Selenocysteine
  MOD_RES (141)..(141): Selenocysteine
  MOD_RES (150)..(150): Selenocysteine
  MOD_RES (156)..(156): Selenocysteine
  MOD_RES (159)..(159): Selenocysteine
  MOD_RES (164)..(164): Selenocysteine
  MOD_RES (169)..(169): Selenocysteine
  MOD_RES (210)..(210): Selenocysteine
MDMHCKADPFSAMHPGHGGVNQLGGVFVNGRPLPDVVRQRIVELAHQGVRPCDISRQLRVSHGCVSKILGRYYEXGSIKPGVIGGSKPKVAXPKVVDKIAEYKRQNPXMFAWEIRDRLLAEGICDNDXVPSVSSINRIIRXKVQQPFHPXPDGAGXGVXAPGHXIVPSXASPPVSSASNDPVGSYSINGILGIPRSNGEKRKRDEVEVYXDPAH

SEQ ID NO: 19418 - protein, 417 aa, Homo sapiens
  MOD_RES (75)..(75): Selenocysteine
  MOD_RES (92)..(92): Selenocysteine
  MOD_RES (108)..(108): Selenocysteine
  MOD_RES (128)..(128): Selenocysteine
  MOD_RES (141)..(141): Selenocysteine
  MOD_RES (150)..(150): Selenocysteine
  MOD_RES (156)..(156): Selenocysteine
  MOD_RES (159)..(159): Selenocysteine
  MOD_RES (164)..(164): Selenocysteine
  MOD_RES (169)..(169): Selenocysteine
  MOD_RES (210)..(210): Selenocysteine
  MOD_RES (226)..(226): Selenocysteine
  MOD_RES (255)..(255): Selenocysteine
  MOD_RES (257)..(257): Selenocysteine
  MOD_RES (297)..(297): Selenocysteine
  MOD_RES (311)..(311): Selenocysteine
  MOD_RES (322)..(322): Selenocysteine
  MOD_RES (324)..(324): Selenocysteine
  MOD_RES (329)..(329): Selenocysteine
  MOD_RES (336)..(337): Selenocysteine
  MOD_RES (348)..(348): Selenocysteine
  MOD_RES (355)..(355): Selenocysteine
  MOD_RES (357)..(357): Selenocysteine
  MOD_RES (378)..(378): Selenocysteine
MDMHCKADPFSAMHPGHGGVNQLGGVFVNGRPLPDVVRQRIVELAHQGVRPCDISRQLRVSHGCVSKILGRYYEXGSIKPGVIGGSKPKVAXPKVVDKIAEYKRQNPXMFAWEIRDRLLAEGICDNDXVPSVSSINRIIRXKVQQPFHPXPDGAGXGVXAPGHXIVPSXASPPVSSASNDPVGSYSINGILGIPRSNGEKRKRDEVEVYXDPAHIRGGGGLHLVWXLRDVSEGSVPNGDSQSGVDSLRKHLRADXFXQQQLEALDRVFERPSYPDVFQASEHIKSEQGNEYSLPALXPGLDEVKSSLSASXNPELGSNVSGXQXYPVVXGRDMASXXLPGYPPHVPPXGQGSYPXSXLAGMVPGSEFSGNPYSHPQYXAYNEAWRFSNPALLSSPYYYSAAPRGSAPAAAAAAYDRH

SEQ ID NO: 19419 - protein, 393 aa, Homo sapiens
  MOD_RES (74)..(74): Selenocysteine
  MOD_RES (91)..(91): Selenocysteine
  MOD_RES (107)..(107): Selenocysteine
  MOD_RES (127)..(127): Selenocysteine
  MOD_RES (140)..(140): Selenocysteine
  MOD_RES (149)..(149): Selenocysteine
  MOD_RES (155)..(155): Selenocysteine
  MOD_RES (158)..(158): Selenocysteine
  MOD_RES (163)..(163): Selenocysteine
  MOD_RES (168)..(168): Selenocysteine
  MOD_RES (231)..(231): Selenocysteine
  MOD_RES (233)..(233): Selenocysteine
  MOD_RES (273)..(273): Selenocysteine
  MOD_RES (287)..(287): Selenocysteine
  MOD_RES (298)..(298): Selenocysteine
  MOD_RES (300)..(300): Selenocysteine
  MOD_RES (305)..(305): Selenocysteine
  MOD_RES (312)..(313): Selenocysteine
  MOD_RES (324)..(324): Selenocysteine
  MOD_RES (331)..(331): Selenocysteine
  MOD_RES (333)..(333): Selenocysteine
  MOD_RES (354)..(354): Selenocysteine
MDMHCKADPFSAMHRHGGVNQLGGVFVNGRPLPDVVRQRIVELAHQGVRPCDISRQLRVSHGCVSKILGRYYEXGSIKPGVIGGSKPKVAXPKVVDKIAEYKRQNPXMFAWEIRDRLLAEGICDNDXVPSVSSINRIIRXKVQQPFHPXPDGAGXGVXAPGHXIVPSXASPPVSSASNDPVGSYSINGILGIPRSNGEKRKRDEDVSEGSVPNGDSQSGVDSLRKHLRADXFXQQQLEALDRVFERPSYPDVFQASEHIKSEQGNEYSLPALXPGLDEVKSSLSASXNPELGSNVSGXQXYPVVXGRDMASXXLPGYPPHVPPXGQGSYPXSXLAGMVPGSEFSGNPYSHPQYXAYNEAWRFSNPALLSSPYYYSAAPRGSAPAAAAAAYDRH

SEQ ID NO: 19420 - protein, 403 aa, Homo sapiens
  MOD_RES (2)..(3): Selenocysteine
  MOD_RES (31)..(31): Selenocysteine
  MOD_RES (93)..(93): Selenocysteine
  MOD_RES (110)..(111): Selenocysteine
  MOD_RES (147)..(147): Selenocysteine
  MOD_RES (224)..(225): Selenocysteine
  MOD_RES (227)..(227): Selenocysteine
  MOD_RES (241)..(241): Selenocysteine
  MOD_RES (248)..(248): Selenocysteine
  MOD_RES (259)..(259): Selenocysteine
  MOD_RES (297)..(297): Selenocysteine
  MOD_RES (301)..(301): Selenocysteine
  MOD_RES (304)..(304): Selenocysteine
  MOD_RES (310)..(310): Selenocysteine
  MOD_RES (315)..(315): Selenocysteine
  MOD_RES (327)..(327): Selenocysteine
  MOD_RES (338)..(338): Selenocysteine
  MOD_RES (343)..(343): Selenocysteine
  MOD_RES (359)..(359): Selenocysteine
  MOD_RES (367)..(367): Selenocysteine
  MOD_RES (383)..(383): Selenocysteine
MXXLAGAVPRMMRPGPGQNYPRSGFPLEVSXPLGQGRVNQLGGVFINGRPLPNHIRHKIVEMAHHGIRPCVISRQLRVSHGCVSKILCRYQEXGSIRPGAIGGSKPKQVXXPDVEKKIEEYKRENPGMFSWEIRDKLLKDAVCDRNXVPSVSSISRILRSKFGKGEEEEADLERKEAEESEKKAKHSIDGILSERASAPQSDEGSDIDSEPDLPLKRKQRRSRXXFXAEQLEELERAFERXHYPDIYXREELAQRAKLXEARVQVWFSNRRARWRKQAGANQLMAFNHLIPGGFPPXAMPXLPXYQLSEXSYQPXSIPQAVSDPSSXVHRPQPLPPSXVHQSXIPSNPDSSSAYCLPSXRHGFSSYXDSFVPPSGPSNPMNPXIGNGLSPQVPFIISSQISRK

SEQ ID NO: 19421 - protein, 407 aa, Homo sapiens
  MOD_RES (2)..(3): Selenocysteine
  MOD_RES (31)..(31): Selenocysteine
  MOD_RES (93)..(93): Selenocysteine
  MOD_RES (110)..(111): Selenocysteine
  MOD_RES (147)..(147): Selenocysteine
  MOD_RES (224)..(225): Selenocysteine
  MOD_RES (227)..(227): Selenocysteine
  MOD_RES (241)..(241): Selenocysteine
  MOD_RES (248)..(248): Selenocysteine
  MOD_RES (259)..(259): Selenocysteine
  MOD_RES (297)..(297): Selenocysteine
  MOD_RES (301)..(301): Selenocysteine
  MOD_RES (304)..(304): Selenocysteine
  MOD_RES (310)..(310): Selenocysteine
  MOD_RES (315)..(315): Selenocysteine
  MOD_RES (327)..(327): Selenocysteine
  MOD_RES (338)..(338): Selenocysteine
  MOD_RES (343)..(343): Selenocysteine
  MOD_RES (359)..(359): Selenocysteine
  MOD_RES (367)..(367): Selenocysteine
  MOD_RES (383)..(383): Selenocysteine
MXXLAGAVPRMMRPGPGQNYPRSGFPLEVSXPLGQGRVNQLGGVFINGRPLPNHIRHKIVEMAHHGIRPCVISRQLRVSHGCVSKILCRYQEXGSIRPGAIGGSKPKQVXXPDVEKKIEEYKRENPGMFSWEIRDKLLKDAVCDRNXVPSVSSISRILRSKFGKGEEEEADLERKEAEESEKKAKHSIDGILSERASAPQSDEGSDIDSEPDLPLKRKQRRSRXXFXAEQLEELERAFERXHYPDIYXREELAQRAKLXEARVQVWFSNRRARWRKQAGANQLMAFNHLIPGGFPPXAMPXLPXYQLSEXSYQPXSIPQAVSDPSSXVHRPQPLPPSXVHQSXIPSNPDSSSAYCLPSXRHGFSSYXDSFVPPSGPSNPMNPXIGNGLSPQVPFIISSQISLGFKSF

SEQ ID NO: 19422 - protein, 479 aa, Homo sapiens
  MOD_RES (2)..(3): Selenocysteine
  MOD_RES (31)..(31): Selenocysteine
  MOD_RES (93)..(93): Selenocysteine
  MOD_RES (110)..(111): Selenocysteine
  MOD_RES (147)..(147): Selenocysteine
  MOD_RES (224)..(225): Selenocysteine
  MOD_RES (227)..(227): Selenocysteine
  MOD_RES (241)..(241): Selenocysteine
  MOD_RES (248)..(248): Selenocysteine
  MOD_RES (259)..(259): Selenocysteine
  MOD_RES (297)..(297): Selenocysteine
  MOD_RES (301)..(301): Selenocysteine
  MOD_RES (304)..(304): Selenocysteine
  MOD_RES (310)..(310): Selenocysteine
  MOD_RES (315)..(315): Selenocysteine
  MOD_RES (327)..(327): Selenocysteine
  MOD_RES (338)..(338): Selenocysteine
  MOD_RES (343)..(343): Selenocysteine
  MOD_RES (359)..(359): Selenocysteine
  MOD_RES (367)..(367): Selenocysteine
  MOD_RES (383)..(383): Selenocysteine
  MOD_RES (397)..(397): Selenocysteine
  MOD_RES (408)..(408): Selenocysteine
  MOD_RES (416)..(416): Selenocysteine
  MOD_RES (422)..(424): Selenocysteine
  MOD_RES (444)..(444): Selenocysteine
  MOD_RES (452)..(452): Selenocysteine
  MOD_RES (455)..(456): Selenocysteine
  MOD_RES (464)..(464): Selenocysteine
  MOD_RES (478)..(478): Selenocysteine
MXXLAGAVPRMMRPGPGQNYPRSGFPLEVSXPLGQGRVNQLGGVFINGRPLPNHIRHKIVEMAHHGIRPCVISRQLRVSHGCVSKILCRYQEXGSIRPGAIGGSKPKQVXXPDVEKKIEEYKRENPGMFSWEIRDKLLKDAVCDRNXVPSVSSISRILRSKFGKGEEEEADLERKEAEESEKKAKHSIDGILSERASAPQSDEGSDIDSEPDLPLKRKQRRSRXXFXAEQLEELERAFERXHYPDIYXREELAQRAKLXEARVQVWFSNRRARWRKQAGANQLMAFNHLIPGGFPPXAMPXLPXYQLSEXSYQPXSIPQAVSDPSSXVHRPQPLPPSXVHQSXIPSNPDSSSAYCLPSXRHGFSSYXDSFVPPSGPSNPMNPXIGNGLSPQVMGLLXNHGGVPHQPQXDYALSPLXGGLEPXXXVSASCSQRLDHMKSLDSLPXSQSYCPPXYSXXGYSMDPVXGYQYGQYGQSKPWXF

SEQ ID NO: 19423 - protein, 484 aa, Homo sapiens
  MOD_RES (2)..(3): Selenocysteine
  MOD_RES (31)..(31): Selenocysteine
  MOD_RES (93)..(93): Selenocysteine
  MOD_RES (110)..(111): Selenocysteine
  MOD_RES (147)..(147): Selenocysteine
  MOD_RES (224)..(225): Selenocysteine
  MOD_RES (227)..(227): Selenocysteine
  MOD_RES (241)..(241): Selenocysteine
  MOD_RES (248)..(248): Selenocysteine
  MOD_RES (259)..(259): Selenocysteine
  MOD_RES (297)..(297): Selenocysteine
  MOD_RES (301)..(301): Selenocysteine
  MOD_RES (304)..(304): Selenocysteine
  MOD_RES (310)..(310): Selenocysteine
  MOD_RES (315)..(315): Selenocysteine
  MOD_RES (327)..(327): Selenocysteine
  MOD_RES (338)..(338): Selenocysteine
  MOD_RES (343)..(343): Selenocysteine
  MOD_RES (359)..(359): Selenocysteine
  MOD_RES (367)..(367): Selenocysteine
  MOD_RES (383)..(383): Selenocysteine
  MOD_RES (397)..(397): Selenocysteine
  MOD_RES (408)..(408): Selenocysteine
  MOD_RES (416)..(416): Selenocysteine
  MOD_RES (422)..(424): Selenocysteine
  MOD_RES (444)..(444): Selenocysteine
  MOD_RES (452)..(452): Selenocysteine
  MOD_RES (455)..(456): Selenocysteine
  MOD_RES (464)..(464): Selenocysteine
MXXLAGAVPRMMRPGPGQNYPRSGFPLEVSXPLGQGRVNQLGGVFINGRPLPNHIRHKIVEMAHHGIRPCVISRQLRVSHGCVSKILCRYQEXGSIRPGAIGGSKPKQVXXPDVEKKIEEYKRENPGMFSWEIRDKLLKDAVCDRNXVPSVSSISRILRSKFGKGEEEEADLERKEAEESEKKAKHSIDGILSERASAPQSDEGSDIDSEPDLPLKRKQRRSRXXFXAEQLEELERAFERXHYPDIYXREELAQRAKLXEARVQVWFSNRRARWRKQAGANQLMAFNHLIPGGFPPXAMPXLPXYQLSEXSYQPXSIPQAVSDPSSXVHRPQPLPPSXVHQSXIPSNPDSSSAYCLPSXRHGFSSYXDSFVPPSGPSNPMNPXIGNGLSPQVMGLLXNHGGVPHQPQXDYALSPLXGGLEPXXXVSASCSQRLDHMKSLDSLPXSQSYCPPXYSXXGYSMDPVXGYQYGQYGQSAFHYLKPDIA

SEQ ID NO: 19424 - protein, 505 aa, Homo sapiens
  MOD_RES (2)..(3): Selenocysteine
  MOD_RES (31)..(31): Selenocysteine
  MOD_RES (93)..(93): Selenocysteine
  MOD_RES (110)..(111): Selenocysteine
  MOD_RES (147)..(147): Selenocysteine
  MOD_RES (224)..(225): Selenocysteine
  MOD_RES (227)..(227): Selenocysteine
  MOD_RES (241)..(241): Selenocysteine
  MOD_RES (248)..(248): Selenocysteine
  MOD_RES (259)..(259): Selenocysteine
  MOD_RES (297)..(297): Selenocysteine
  MOD_RES (301)..(301): Selenocysteine
  MOD_RES (304)..(304): Selenocysteine
  MOD_RES (310)..(310): Selenocysteine
  MOD_RES (315)..(315): Selenocysteine
  MOD_RES (327)..(327): Selenocysteine
  MOD_RES (338)..(338): Selenocysteine
  MOD_RES (343)..(343): Selenocysteine
  MOD_RES (359)..(359): Selenocysteine
  MOD_RES (367)..(367): Selenocysteine
  MOD_RES (383)..(383): Selenocysteine
  MOD_RES (397)..(397): Selenocysteine
  MOD_RES (408)..(408): Selenocysteine
  MOD_RES (416)..(416): Selenocysteine
  MOD_RES (422)..(424): Selenocysteine
  MOD_RES (444)..(444): Selenocysteine
  MOD_RES (452)..(452): Selenocysteine
  MOD_RES (455)..(456): Selenocysteine
  MOD_RES (464)..(464): Selenocysteine
  MOD_RES (492)..(492): Selenocysteine
MXXLAGAVPRMMRPGPGQNYPRSGFPLEVSXPLGQGRVNQLGGVFINGRPLPNHIRHKIVEMAHHGIRPCVISRQLRVSHGCVSKILCRYQEXGSIRPGAIGGSKPKQVXXPDVEKKIEEYKRENPGMFSWEIRDKLLKDAVCDRNXVPSVSSISRILRSKFGKGEEEEADLERKEAEESEKKAKHSIDGILSERASAPQSDEGSDIDSEPDLPLKRKQRRSRXXFXAEQLEELERAFERXHYPDIYXREELAQRAKLXEARVQVWFSNRRARWRKQAGANQLMAFNHLIPGGFPPXAMPXLPXYQLSEXSYQPXSIPQAVSDPSSXVHRPQPLPPSXVHQSXIPSNPDSSSAYCLPSXRHGFSSYXDSFVPPSGPSNPMNPXIGNGLSPQVMGLLXNHGGVPHQPQXDYALSPLXGGLEPXXXVSASCSQRLDHMKSLDSLPXSQSYCPPXYSXXGYSMDPVXGYQYGQYGQSAFHYLKPDIAWFQILLNXFDKSSGEEEDLEQ

SEQ ID NO: 19425 - protein, 206 aa, Homo sapiens
  MOD_RES (2)..(3): Selenocysteine
  MOD_RES (31)..(31): Selenocysteine
  MOD_RES (93)..(93): Selenocysteine
  MOD_RES (110)..(111): Selenocysteine
  MOD_RES (147)..(147): Selenocysteine
MXXLAGAVPRMMRPGPGQNYPRSGFPLEVSXPLGQGRVNQLGGVFINGRPLPNHIRHKIVEMAHHGIRPCVISRQLRVSHGCVSKILCRYQEXGSIRPGAIGGSKPKQVXXPDVEKKIEEYKRENPGMFSWEIRDKLLKDAVCDRNXVPSVSSISRILRSKFGKGEEEEADLERKEAEESEKKAKHSIDGILSERGKALVSGVSSH

SEQ ID NO: 19426 - protein, 215 aa, Homo sapiens
  MOD_RES (2)..(3): Selenocysteine
  MOD_RES (31)..(31): Selenocysteine
  MOD_RES (93)..(93): Selenocysteine
  MOD_RES (110)..(111): Selenocysteine
  MOD_RES (147)..(147): Selenocysteine
  MOD_RES (205)..(205): Selenocysteine
  MOD_RES (209)..(209): Selenocysteine
MXXLAGAVPRMMRPGPGQNYPRSGFPLEVSXPLGQGRVNQLGGVFINGRPLPNHIRHKIVEMAHHGIRPCVISRQLRVSHGCVSKILCRYQEXGSIRPGAIGGSKPKQVXXPDVEKKIEEYKRENPGMFSWEIRDKLLKDAVCDRNXVPSVSSISRILRSKFGKGEEEEADLERKEAEESEKKAKHSIDGILSERGKRWRLGRRXCWVXWRASAS

SEQ ID NO: 19427 - protein, 483 aa, Homo sapiens
  MOD_RES (2)..(3): Selenocysteine
  MOD_RES (31)..(31): Selenocysteine
  MOD_RES (93)..(93): Selenocysteine
  MOD_RES (109)..(110): Selenocysteine
  MOD_RES (146)..(146): Selenocysteine
  MOD_RES (223)..(224): Selenocysteine
  MOD_RES (226)..(226): Selenocysteine
  MOD_RES (240)..(240): Selenocysteine
  MOD_RES (247)..(247): Selenocysteine
  MOD_RES (258)..(258): Selenocysteine
  MOD_RES (296)..(296): Selenocysteine
  MOD_RES (300)..(300): Selenocysteine
  MOD_RES (303)..(303): Selenocysteine
  MOD_RES (309)..(309): Selenocysteine
  MOD_RES (314)..(314): Selenocysteine
  MOD_RES (326)..(326): Selenocysteine
  MOD_RES (337)..(337): Selenocysteine
  MOD_RES (342)..(342): Selenocysteine
  MOD_RES (358)..(358): Selenocysteine
  MOD_RES (366)..(366): Selenocysteine
  MOD_RES (382)..(382): Selenocysteine
  MOD_RES (396)..(396): Selenocysteine
  MOD_RES (407)..(407): Selenocysteine
  MOD_RES (415)..(415): Selenocysteine
  MOD_RES (421)..(423): Selenocysteine
  MOD_RES (443)..(443): Selenocysteine
  MOD_RES (451)..(451): Selenocysteine
  MOD_RES (454)..(455): Selenocysteine
  MOD_RES (463)..(463): Selenocysteine
MXXLAGAVPRMMRPGPGQNYPRSGFPLEVSXPLGQGRVNQLGGVFINGRPLPNHIRHKIVEMAHHGIRPCVISRQLRVSHGCVSKILCRYQEXGSIRPGAIGGSKPKVXXPDVEKKIEEYKRENPGMFSWEIRDKLLKDAVCDRNXVPSVSSISRILRSKFGKGEEEEADLERKEAEESEKKAKHSIDGILSERASAPQSDEGSDIDSEPDLPLKRKQRRSRXXFXAEQLEELERAFERXHYPDIYXREELAQRAKLXEARVQVWFSNRRARWRKQAGANQLMAFNHLIPGGFPPXAMPXLPXYQLSEXSYQPXSIPQAVSDPSSXVHRPQPLPPSXVHQSXIPSNPDSSSAYCLPSXRHGFSSYXDSFVPPSGPSNPMNPXIGNGLSPQVMGLLXNHGGVPHQPQXDYALSPLXGGLEPXXXVSASCSQRLDHMKSLDSLPXSQSYCPPXYSXXGYSMDPVXGYQYGQYGQSAFHYLKPDIA

SEQ ID NO: 19428 - protein, 257 aa, Homo sapiens
  MOD_RES (20)..(20): Selenocysteine
  MOD_RES (37)..(37): Selenocysteine
  MOD_RES (54)..(54): Selenocysteine
  MOD_RES (71)..(71): Selenocysteine
  MOD_RES (104)..(104): Selenocysteine
  MOD_RES (108)..(108): Selenocysteine
  MOD_RES (130)..(130): Selenocysteine
  MOD_RES (144)..(144): Selenocysteine
  MOD_RES (151)..(151): Selenocysteine
  MOD_RES (155)..(155): Selenocysteine
  MOD_RES (159)..(159): Selenocysteine
  MOD_RES (165)..(165): Selenocysteine
  MOD_RES (195)..(195): Selenocysteine
  MOD_RES (197)..(197): Selenocysteine
  MOD_RES (203)..(203): Selenocysteine
  MOD_RES (235)..(235): Selenocysteine
  MOD_RES (250)..(250): Selenocysteine
MAWSSKSWLCLIASSCPRDXLLPSAHHASPVPASHLXQVSNGCVSKILGRYYRXGVLEPKGIGGSKPRLAXPPVVARIAQLKGECPALFAWEIQRQLCAEGLCXQDKXPSVSSINRVLRALQEDQGLPCXRLRSPAVLAPAVLXPHSGSEXPRGXHPGXGHRNRXIFSPSQAEALEKEFQRGQYPDSVARGKLAXAXSLPEDXVRVWFSNRRAKWRRQEKLKWEMQLPGASQGLXVPRVAPGIISAQGPXVFMSRKY

SEQ ID NO: 19429 - protein, 341 aa, Homo sapiens
  MOD_RES (20)..(20): Selenocysteine
  MOD_RES (37)..(37): Selenocysteine
  MOD_RES (54)..(54): Selenocysteine
  MOD_RES (71)..(71): Selenocysteine
  MOD_RES (104)..(104): Selenocysteine
  MOD_RES (108)..(108): Selenocysteine
  MOD_RES (130)..(130): Selenocysteine
  MOD_RES (144)..(144): Selenocysteine
  MOD_RES (151)..(151): Selenocysteine
  MOD_RES (155)..(155): Selenocysteine
  MOD_RES (159)..(159): Selenocysteine
  MOD_RES (165)..(165): Selenocysteine
  MOD_RES (195)..(195): Selenocysteine
  MOD_RES (197)..(197): Selenocysteine
  MOD_RES (203)..(203): Selenocysteine
  MOD_RES (235)..(235): Selenocysteine
  MOD_RES (255)..(255): Selenocysteine
  MOD_RES (275)..(275): Selenocysteine
  MOD_RES (284)..(284): Selenocysteine
MAWSSKSWLCLIASSCPRDXLLPSAHHASPVPASHLXQVSNGCVSKILGRYYRXGVLEPKGIGGSKPRLAXPPVVARIAQLKGECPALFAWEIQRQLCAEGLCXQDKXPSVSSINRVLRALQEDQGLPCXRLRSPAVLAPAVLXPHSGSEXPRGXHPGXGHRNRXIFSPSQAEALEKEFQRGQYPDSVARGKLAXAXSLPEDXVRVWFSNRRAKWRRQEKLKWEMQLPGASQGLXVPRVAPGIISAQQSPGSVPXAALPALEPLGPSCYQLCWAXAPERCLSDXPPKACLKPCWGHLPPQPNSLDSGLLCLPCPSSHCHLASLSGSQALLWPGCPLLYGLE

SEQ ID NO: 19430 - protein, 349 aa, Homo sapiens
  MOD_RES (26)..(26): Selenocysteine
  MOD_RES (64)..(64): Selenocysteine
  MOD_RES (81)..(81): Selenocysteine
  MOD_RES (114)..(114): Selenocysteine
  MOD_RES (118)..(118): Selenocysteine
  MOD_RES (140)..(140): Selenocysteine
  MOD_RES (154)..(154): Selenocysteine
  MOD_RES (161)..(161): Selenocysteine
  MOD_RES (165)..(165): Selenocysteine
  MOD_RES (169)..(169): Selenocysteine
  MOD_RES (175)..(175): Selenocysteine
  MOD_RES (205)..(205): Selenocysteine
  MOD_RES (207)..(207): Selenocysteine
  MOD_RES (213)..(213): Selenocysteine
  MOD_RES (245)..(245): Selenocysteine
  MOD_RES (265)..(265): Selenocysteine
  MOD_RES (285)..(285): Selenocysteine
  MOD_RES (294)..(294): Selenocysteine
  MOD_RES (342)..(342): Selenocysteine
  MOD_RES (344)..(344): Selenocysteine
MHQDGISSMNQLGGLFVNGRPLPLDXRQQIVRLAVSGMRPCDISRILKVSNGCVSKILGRYYRXGVLEPKGIGGSKPRLAXPPVVARIAQLKGECPALFAWEIQRQLCAEGLCXQDKXPSVSSINRVLRALQEDQGLPCXRLRSPAVLAPAVLXPHSGSEXPRGXHPGXGHRNRXIFSPSQAEALEKEFQRGQYPDSVARGKLAXAXSLPEDXVRVWFSNRRAKWRRQEKLKWEMQLPGASQGLXVPRVAPGIISAQQSPGSVPXAALPALEPLGPSCYQLCWAXAPERCLSDXPPKACLKPCWDCGSFLLPVIAPSCVDVAWPCLDASLAHHLIGGAGKAXPXHFSHP

SEQ ID NO: 19431 - protein, 340 aa, Homo sapiens
  MOD_RES (18)..(18): Selenocysteine
  MOD_RES (56)..(56): Selenocysteine
  MOD_RES (73)..(73): Selenocysteine
  MOD_RES (106)..(106): Selenocysteine
  MOD_RES (110)..(110): Selenocysteine
  MOD_RES (132)..(132): Selenocysteine
  MOD_RES (146)..(146): Selenocysteine
  MOD_RES (153)..(153): Selenocysteine
  MOD_RES (157)..(157): Selenocysteine
  MOD_RES (161)..(161): Selenocysteine
  MOD_RES (167)..(167): Selenocysteine
  MOD_RES (197)..(197): Selenocysteine
  MOD_RES (199)..(199): Selenocysteine
  MOD_RES (205)..(205): Selenocysteine
  MOD_RES (237)..(237): Selenocysteine
  MOD_RES (257)..(257): Selenocysteine
  MOD_RES (277)..(277): Selenocysteine
  MOD_RES (286)..(286): Selenocysteine
  MOD_RES (334)..(334): Selenocysteine
  MOD_RES (336)..(336): Selenocysteine
MNQLGGLFVNGRPLPLDXRQQIVRLAVSGMRPCDISRILKVSNGCVSKILGRYYRXGVLEPKGIGGSKPRLAXPPVVARIAQLKGECPALFAWEIQRQLCAEGLCXQDKXPSVSSINRVLRALQEDQGLPCXRLRSPAVLAPAVLXPHSGSEXPRGXHPGXGHRNRXIFSPSQAEALEKEFQRGQYPDSVARGKLAXAXSLPEDXVRVWFSNRRAKWRRQEKLKWEMQLPGASQGLXVPRVAPGIISAQQSPGSVPXAALPALEPLGPSCYQLCWAXAPERCLSDXPPKACLKPCWDCGSFLLPVIAPSCVDVAWPCLDASLAHHLIGGAGKAXPXHFSH

SEQ ID NO: 19432 - protein, 343 aa, Homo sapiens
  MOD_RES (18)..(18): Selenocysteine
  MOD_RES (56)..(56): Selenocysteine
  MOD_RES (73)..(73): Selenocysteine
  MOD_RES (106)..(106): Selenocysteine
  MOD_RES (110)..(110): Selenocysteine
  MOD_RES (132)..(132): Selenocysteine
  MOD_RES (146)..(146): Selenocysteine
  MOD_RES (153)..(153): Selenocysteine
  MOD_RES (157)..(157): Selenocysteine
  MOD_RES (161)..(161): Selenocysteine
  MOD_RES (167)..(167): Selenocysteine
  MOD_RES (197)..(197): Selenocysteine
  MOD_RES (199)..(199): Selenocysteine
  MOD_RES (205)..(205): Selenocysteine
  MOD_RES (237)..(237): Selenocysteine
  MOD_RES (257)..(257): Selenocysteine
  MOD_RES (277)..(277): Selenocysteine
  MOD_RES (286)..(286): Selenocysteine
MNQLGGLFVNGRPLPLDXRQQIVRLAVSGMRPCDISRILKVSNGCVSKILGRYYRXGVLEPKGIGGSKPRLAXPPVVARIAQLKGECPALFAWEIQRQLCAEGLCXQDKXPSVSSINRVLRALQEDQGLPCXRLRSPAVLAPAVLXPHSGSEXPRGXHPGXGHRNRXIFSPSQAEALEKEFQRGQYPDSVARGKLAXAXSLPEDXVRVWFSNRRAKWRRQEKLKWEMQLPGASQGLXVPRVAPGIISAQQSPGSVPXAALPALEPLGPSCYQLCWAXAPERCLSDXPPKACLKPCWGHLPPQPNSLDSGLLCLPCPSSHCHLASLSGSQALLWPGCPLLYGLE

SEQ ID NO: 19433 - protein, 218 aa, Homo sapiens
  MOD_RES (2)..(2): Selenocysteine
  MOD_RES (38)..(38): Selenocysteine
  MOD_RES (59)..(61): Selenocysteine
  MOD_RES (88)..(89): Selenocysteine
  MOD_RES (112)..(112): Selenocysteine
  MOD_RES (130)..(130): Selenocysteine
  MOD_RES (137)..(138): Selenocysteine
  MOD_RES (158)..(158): Selenocysteine
  MOD_RES (160)..(160): Selenocysteine
  MOD_RES (213)..(213): Selenocysteine
DXNKRKRDEGIQESPVPNGHSLPGRDFLRKQMRGDLFXQQQLEVLDRVFERQHYSDIFXXXEPIKPEQWCPVLMRQYLVQPQAVLFQXXEYSAMASLAGGLDDMKANLASPXPADIGSSVPGPQSYPIVXGRDLASXXLPGYPPHVPPAGQGSYSAPXLXGMVPGSEFSGSPYSHPQYSSYNDSWRFPNPGLLGSPYYYSAAARGAAPPAAAXAYDRH

SEQ ID NO: 19434 - protein, 291 aa, Homo sapiens
  MOD_RES (9)..(9): Selenocysteine
  MOD_RES (12)..(12): Selenocysteine
  MOD_RES (15)..(15): Selenocysteine
  MOD_RES (75)..(75): Selenocysteine
  MOD_RES (95)..(95): Selenocysteine
  MOD_RES (99)..(99): Selenocysteine
  MOD_RES (106)..(106): Selenocysteine
  MOD_RES (122)..(122): Selenocysteine
  MOD_RES (128)..(128): Selenocysteine
  MOD_RES (164)..(164): Selenocysteine
  MOD_RES (185)..(187): Selenocysteine
  MOD_RES (195)..(196): Selenocysteine
  MOD_RES (219)..(219): Selenocysteine
  MOD_RES (237)..(237): Selenocysteine
  MOD_RES (286)..(286): Selenocysteine
MDLEKNYPXPRXSRXGHGGVNQLGGVFVNGRPLPDVVRQRIVELAHQGVRPCDISRQLRVSHGCVSKILGRIIRXKVQQPPNQPVPASSHSIVSXGSVXQVSSVSXDSAGSSYSISGILGIXSPSADXNKRKRDEGIQESPVPNGHSLPGRDFLRKQMRGDLFXQQQLEVLDRVFERQHYSDIFXXXEPIKPEQXXEYSAMASLAGGLDDMKANLASPXPADIGSSVPGPQSYPIVXGSEFSGSPYSHPQYSSYNDSWRFPNPGLLGSPYYYSAAARGAAPPAAAXAYDRH

SEQ ID NO: 19435 - protein, 319 aa, Homo sapiens
  MOD_RES (9)..(9): Selenocysteine
  MOD_RES (12)..(12): Selenocysteine
  MOD_RES (15)..(15): Selenocysteine
  MOD_RES (75)..(75): Selenocysteine
  MOD_RES (92)..(92): Selenocysteine
  MOD_RES (108)..(108): Selenocysteine
  MOD_RES (128)..(128): Selenocysteine
  MOD_RES (141)..(141): Selenocysteine
  MOD_RES (187)..(187): Selenocysteine
  MOD_RES (208)..(210): Selenocysteine
  MOD_RES (218)..(219): Selenocysteine
  MOD_RES (242)..(242): Selenocysteine
  MOD_RES (260)..(260): Selenocysteine
  MOD_RES (267)..(268): Selenocysteine
  MOD_RES (288)..(288): Selenocysteine
  MOD_RES (290)..(290): Selenocysteine
  MOD_RES (314)..(314): Selenocysteine
MDLEKNYPXPRXSRXGHGGVNQLGGVFVNGRPLPDVVRQRIVELAHQGVRPCDISRQLRVSHGCVSKILGRYYEXGSIKPGVIGGSKPKVAXPKVVEKIAEYKRQNPXMFAWEIRDRLLAERVCDNDXVPSVSSINRIIRXKVQQPPNQPVPASSHSIGIQESPVPNGHSLPGRDFLRKQMRGDLFXQQQLEVLDRVFERQHYSDIFXXXEPIKPEQXXEYSAMASLAGGLDDMKANLASPXPADIGSSVPGPQSYPIVXGRDLASXXLPGYPPHVPPAGQGSYSAPXLXGMVPGSPYYYSAAARGAAPPAAAXAYDRH

SEQ ID NO: 19436 - protein, 348 aa, Homo sapiens
  MOD_RES (9)..(9): Selenocysteine
  MOD_RES (12)..(12): Selenocysteine
  MOD_RES (15)..(15): Selenocysteine
  MOD_RES (75)..(75): Selenocysteine
  MOD_RES (92)..(92): Selenocysteine
  MOD_RES (108)..(108): Selenocysteine
  MOD_RES (128)..(128): Selenocysteine
  MOD_RES (141)..(141): Selenocysteine
  MOD_RES (187)..(187): Selenocysteine
  MOD_RES (208)..(210): Selenocysteine
  MOD_RES (218)..(219): Selenocysteine
  MOD_RES (242)..(242): Selenocysteine
  MOD_RES (260)..(260): Selenocysteine
  MOD_RES (267)..(268): Selenocysteine
  MOD_RES (288)..(288): Selenocysteine
  MOD_RES (290)..(290): Selenocysteine
  MOD_RES (343)..(343): Selenocysteine
MDLEKNYPXPRXSRXGHGGVNQLGGVFVNGRPLPDVVRQRIVELAHQGVRPCDISRQLRVSHGCVSKILGRYYEXGSIKPGVIGGSKPKVAXPKVVEKIAEYKRQNPXMFAWEIRDRLLAERVCDNDXVPSVSSINRIIRXKVQQPPNQPVPASSHSIGIQESPVPNGHSLPGRDFLRKQMRGDLFXQQQLEVLDRVFERQHYSDIFXXXEPIKPEQXXEYSAMASLAGGLDDMKANLASPXPADIGSSVPGPQSYPIVXGRDLASXXLPGYPPHVPPAGQGSYSAPXLXGMVPGSEFSGSPYSHPQYSSYNDSWRFPNPGLLGSPYYYSAAARGAAPPAAAXAYDRH

SEQ ID NO: 19437 - protein, 288 aa, Homo sapiens
  MOD_RES (9)..(9): Selenocysteine
  MOD_RES (12)..(12): Selenocysteine
  MOD_RES (15)..(15): Selenocysteine
  MOD_RES (75)..(75): Selenocysteine
  MOD_RES (92)..(92): Selenocysteine
  MOD_RES (108)..(108): Selenocysteine
  MOD_RES (128)..(128): Selenocysteine
  MOD_RES (141)..(141): Selenocysteine
  MOD_RES (161)..(161): Selenocysteine
  MOD_RES (165)..(165): Selenocysteine
  MOD_RES (172)..(172): Selenocysteine
  MOD_RES (188)..(188): Selenocysteine
  MOD_RES (194)..(194): Selenocysteine
  MOD_RES (230)..(230): Selenocysteine
  MOD_RES (251)..(253): Selenocysteine
  MOD_RES (263)..(263): Selenocysteine
  MOD_RES (272)..(272): Selenocysteine
  MOD_RES (275)..(275): Selenocysteine
  MOD_RES (284)..(284): Selenocysteine
MDLEKNYPXPRXSRXGHGGVNQLGGVFVNGRPLPDVVRQRIVELAHQGVRPCDISRQLRVSHGCVSKILGRYYEXGSIKPGVIGGSKPKVAXPKVVEKIAEYKRQNPXMFAWEIRDRLLAERVCDNDXVPSVSSINRIIRXKVQQPPNQPVPASSHSIVSXGSVXQVSSVSXDSAGSSYSISGILGIXSPSADXNKRKRDEGIQESPVPNGHSLPGRDFLRKQMRGDLFXQQQLEVLDRVFERQHYSDIFXXXEPIKPEQAVXWRARPSPGXLHXSPPLDRAAXQHRR

SEQ ID NO: 19438 - protein, 295 aa, Homo sapiens
  MOD_RES (9)..(9): Selenocysteine
  MOD_RES (12)..(12): Selenocysteine
  MOD_RES (15)..(15): Selenocysteine
  MOD_RES (75)..(75): Selenocysteine
  MOD_RES (92)..(92): Selenocysteine
  MOD_RES (108)..(108): Selenocysteine
  MOD_RES (128)..(128): Selenocysteine
  MOD_RES (141)..(141): Selenocysteine
  MOD_RES (161)..(161): Selenocysteine
  MOD_RES (165)..(165): Selenocysteine
  MOD_RES (172)..(172): Selenocysteine
  MOD_RES (188)..(188): Selenocysteine
  MOD_RES (194)..(194): Selenocysteine
  MOD_RES (230)..(230): Selenocysteine
  MOD_RES (251)..(253): Selenocysteine
  MOD_RES (264)..(264): Selenocysteine
  MOD_RES (283)..(283): Selenocysteine
  MOD_RES (285)..(285): Selenocysteine
  MOD_RES (293)..(293): Selenocysteine
MDLEKNYPXPRXSRXGHGGVNQLGGVFVNGRPLPDVVRQRIVELAHQGVRPCDISRQLRVSHGCVSKILGRYYEXGSIKPGVIGGSKPKVAXPKVVEKIAEYKRQNPXMFAWEIRDRLLAERVCDNDXVPSVSSINRIIRXKVQQPPNQPVPASSHSIVSXGSVXQVSSVSXDSAGSSYSISGILGIXSPSADXNKRKRDEGIQESPVPNGHSLPGRDFLRKQMRGDLFXQQQLEVLDRVFERQHYSDIFXXXEPIKPEQAPPXIIALPPEEPPHLQPPLPMXVXDPWSQAGXKH

SEQ ID NO: 19439 - protein, 307 aa, Homo sapiens
  MOD_RES (9)..(9): Selenocysteine
  MOD_RES (12)..(12): Selenocysteine
  MOD_RES (15)..(15): Selenocysteine
  MOD_RES (75)..(75): Selenocysteine
  MOD_RES (92)..(92): Selenocysteine
  MOD_RES (108)..(108): Selenocysteine
  MOD_RES (128)..(128): Selenocysteine
  MOD_RES (141)..(141): Selenocysteine
  MOD_RES (161)..(161): Selenocysteine
  MOD_RES (165)..(165): Selenocysteine
  MOD_RES (172)..(172): Selenocysteine
  MOD_RES (188)..(188): Selenocysteine
  MOD_RES (194)..(194): Selenocysteine
  MOD_RES (230)..(230): Selenocysteine
  MOD_RES (251)..(253): Selenocysteine
  MOD_RES (282)..(282): Selenocysteine
  MOD_RES (291)..(291): Selenocysteine
  MOD_RES (294)..(294): Selenocysteine
  MOD_RES (303)..(303): Selenocysteine
MDLEKNYPXPRXSRXGHGGVNQLGGVFVNGRPLPDVVRQRIVELAHQGVRPCDISRQLRVSHGCVSKILGRYYEXGSIKPGVIGGSKPKVAXPKVVEKIAEYKRQNPXMFAWEIRDRLLAERVCDNDXVPSVSSINRIIRXKVQQPPNQPVPASSHSIVSXGSVXQVSSVSXDSAGSSYSISGILGIXSPSADXNKRKRDEGIQESPVPNGHSLPGRDFLRKQMRGDLFXQQQLEVLDRVFERQHYSDIFXXXEPIKPEQWCPVLMRQYLVQPQAVLFQAVXWRARPSPGXLHXSPPLDRAAXQHRR

SEQ ID NO: 19440 - protein, 324 aa, Homo sapiens
  MOD_RES (9)..(9): Selenocysteine
  MOD_RES (12)..(12): Selenocysteine
  MOD_RES (15)..(15): Selenocysteine
  MOD_RES (75)..(75): Selenocysteine
  MOD_RES (92)..(92): Selenocysteine
  MOD_RES (108)..(108): Selenocysteine
  MOD_RES (128)..(128): Selenocysteine
  MOD_RES (141)..(141): Selenocysteine
  MOD_RES (161)..(161): Selenocysteine
  MOD_RES (165)..(165): Selenocysteine
  MOD_RES (172)..(172): Selenocysteine
  MOD_RES (188)..(188): Selenocysteine
  MOD_RES (194)..(194): Selenocysteine
  MOD_RES (230)..(230): Selenocysteine
  MOD_RES (251)..(253): Selenocysteine
  MOD_RES (269)..(269): Selenocysteine
  MOD_RES (271)..(271): Selenocysteine
  MOD_RES (277)..(279): Selenocysteine
  MOD_RES (285)..(285): Selenocysteine
  MOD_RES (293)..(293): Selenocysteine
  MOD_RES (312)..(312): Selenocysteine
  MOD_RES (314)..(314): Selenocysteine
  MOD_RES (322)..(322): Selenocysteine
MDLEKNYPXPRXSRXGHGGVNQLGGVFVNGRPLPDVVRQRIVELAHQGVRPCDISRQLRVSHGCVSKILGRYYEXGSIKPGVIGGSKPKVAXPKVVEKIAEYKRQNPXMFAWEIRDRLLAERVCDNDXVPSVSSINRIIRXKVQQPPNQPVPASSHSIVSXGSVXQVSSVSXDSAGSSYSISGILGIXSPSADXNKRKRDEGIQESPVPNGHSLPGRDFLRKQMRGDLFXQQQLEVLDRVFERQHYSDIFXXXEPIKPEQGVSFPGVPXAXLSIPRXXXPGGSPXRGCLAPPXIIALPPEEPPHLQPPLPMXVXDPWSQAGXKH

SEQ ID NO: 19441 - protein, 328 aa, Homo sapiens
  MOD_RES (9)..(9): Selenocysteine
  MOD_RES (12)..(12): Selenocysteine
  MOD_RES (15)..(15): Selenocysteine
  MOD_RES (75)..(75): Selenocysteine
  MOD_RES (92)..(92): Selenocysteine
  MOD_RES (108)..(108): Selenocysteine
  MOD_RES (128)..(128): Selenocysteine
  MOD_RES (141)..(141): Selenocysteine
  MOD_RES (161)..(161): Selenocysteine
  MOD_RES (165)..(165): Selenocysteine
  MOD_RES (172)..(172): Selenocysteine
  MOD_RES (188)..(188): Selenocysteine
  MOD_RES (194)..(194): Selenocysteine
  MOD_RES (230)..(230): Selenocysteine
  MOD_RES (251)..(253): Selenocysteine
  MOD_RES (261)..(262): Selenocysteine
  MOD_RES (285)..(285): Selenocysteine
  MOD_RES (303)..(303): Selenocysteine
  MOD_RES (323)..(323): Selenocysteine
MDLEKNYPXPRXSRXGHGGVNQLGGVFVNGRPLPDVVRQRIVELAHQGVRPCDISRQLRVSHGCVSKILGRYYEXGSIKPGVIGGSKPKVAXPKVVEKIAEYKRQNPXMFAWEIRDRLLAERVCDNDXVPSVSSINRIIRXKVQQPPNQPVPASSHSIVSXGSVXQVSSVSXDSAGSSYSISGILGIXSPSADXNKRKRDEGIQESPVPNGHSLPGRDFLRKQMRGDLFXQQQLEVLDRVFERQHYSDIFXXXEPIKPEQXXEYSAMASLAGGLDDMKANLASPXPADIGSSVPGPQSYPIVXGSPYYYSAAARGAAPPAAAXAYDRH

SEQ ID NO: 19442 - protein, 357 aa, Homo sapiens
  MOD_RES (9)..(9): Selenocysteine
  MOD_RES (12)..(12): Selenocysteine
  MOD_RES (15)..(15): Selenocysteine
  MOD_RES (75)..(75): Selenocysteine
  MOD_RES (92)..(92): Selenocysteine
  MOD_RES (108)..(108): Selenocysteine
  MOD_RES (128)..(128): Selenocysteine
  MOD_RES (141)..(141): Selenocysteine
  MOD_RES (161)..(161): Selenocysteine
  MOD_RES (165)..(165): Selenocysteine
  MOD_RES (172)..(172): Selenocysteine
  MOD_RES (188)..(188): Selenocysteine
  MOD_RES (194)..(194): Selenocysteine
  MOD_RES (230)..(230): Selenocysteine
  MOD_RES (251)..(253): Selenocysteine
  MOD_RES (261)..(262): Selenocysteine
  MOD_RES (285)..(285): Selenocysteine
  MOD_RES (303)..(303): Selenocysteine
  MOD_RES (352)..(352): Selenocysteine
MDLEKNYPXPRXSRXGHGGVNQLGGVFVNGRPLPDVVRQRIVELAHQGVRPCDISRQLRVSHGCVSKILGRYYEXGSIKPGVIGGSKPKVAXPKVVEKIAEYKRQNPXMFAWEIRDRLLAERVCDNDXVPSVSSINRIIRXKVQQPPNQPVPASSHSIVSXGSVXQVSSVSXDSAGSSYSISGILGIXSPSADXNKRKRDEGIQESPVPNGHSLPGRDFLRKQMRGDLFXQQQLEVLDRVFERQHYSDIFXXXEPIKPEQXXEYSAMASLAGGLDDMKANLASPXPADIGSSVPGPQSYPIVXGSEFSGSPYSHPQYSSYNDSWRFPNPGLLGSPYYYSAAARGAAPPAAAXAYDRH

SEQ ID NO: 19443 - protein, 362 aa, Homo sapiens
  MOD_RES (9)..(9): Selenocysteine
  MOD_RES (12)..(12): Selenocysteine
  MOD_RES (15)..(15): Selenocysteine
  MOD_RES (75)..(75): Selenocysteine
  MOD_RES (92)..(92): Selenocysteine
  MOD_RES (108)..(108): Selenocysteine
  MOD_RES (128)..(128): Selenocysteine
  MOD_RES (141)..(141): Selenocysteine
  MOD_RES (161)..(161): Selenocysteine
  MOD_RES (165)..(165): Selenocysteine
  MOD_RES (172)..(172): Selenocysteine
  MOD_RES (188)..(188): Selenocysteine
  MOD_RES (194)..(194): Selenocysteine
  MOD_RES (230)..(230): Selenocysteine
  MOD_RES (251)..(253): Selenocysteine
  MOD_RES (261)..(262): Selenocysteine
  MOD_RES (285)..(285): Selenocysteine
  MOD_RES (303)..(303): Selenocysteine
  MOD_RES (310)..(311): Selenocysteine
  MOD_RES (331)..(331): Selenocysteine
  MOD_RES (333)..(333): Selenocysteine
  MOD_RES (357)..(357): Selenocysteine
MDLEKNYPXPRXSRXGHGGVNQLGGVFVNGRPLPDVVRQRIVELAHQGVRPCDISRQLRVSHGCVSKILGRYYEXGSIKPGVIGGSKPKVAXPKVVEKIAEYKRQNPXMFAWEIRDRLLAERVCDNDXVPSVSSINRIIRXKVQQPPNQPVPASSHSIVSXGSVXQVSSVSXDSAGSSYSISGILGIXSPSADXNKRKRDEGIQESPVPNGHSLPGRDFLRKQMRGDLFXQQQLEVLDRVFERQHYSDIFXXXEPIKPEQXXEYSAMASLAGGLDDMKANLASPXPADIGSSVPGPQSYPIVXGRDLASXXLPGYPPHVPPAGQGSYSAPXLXGMVPGSPYYYSAAARGAAPPAAAXAYDRH

SEQ ID NO: 19444 - protein, 391 aa, Homo sapiens
  MOD_RES (9)..(9): Selenocysteine
  MOD_RES (12)..(12): Selenocysteine
  MOD_RES (15)..(15): Selenocysteine
  MOD_RES (75)..(75): Selenocysteine
  MOD_RES (92)..(92): Selenocysteine
  MOD_RES (108)..(108): Selenocysteine
  MOD_RES (128)..(128): Selenocysteine
  MOD_RES (141)..(141): Selenocysteine
  MOD_RES (161)..(161): Selenocysteine
  MOD_RES (165)..(165): Selenocysteine
  MOD_RES (172)..(172): Selenocysteine
  MOD_RES (188)..(188): Selenocysteine
  MOD_RES (194)..(194): Selenocysteine
  MOD_RES (230)..(230): Selenocysteine
  MOD_RES (251)..(253): Selenocysteine
  MOD_RES (261)..(262): Selenocysteine
  MOD_RES (285)..(285): Selenocysteine
  MOD_RES (303)..(303): Selenocysteine
  MOD_RES (310)..(311): Selenocysteine
  MOD_RES (331)..(331): Selenocysteine
  MOD_RES (333)..(333): Selenocysteine
  MOD_RES (386)..(386): Selenocysteine
MDLEKNYPXPRXSRXGHGGVNQLGGVFVNGRPLPDVVRQRIVELAHQGVRPCDISRQLRVSHGCVSKILGRYYEXGSIKPGVIGGSKPKVAXPKVVEKIAEYKRQNPXMFAWEIRDRLLAERVCDNDXVPSVSSINRIIRXKVQQPPNQPVPASSHSIVSXGSVXQVSSVSXDSAGSSYSISGILGIXSPSADXNKRKRDEGIQESPVPNGHSLPGRDFLRKQMRGDLFXQQQLEVLDRVFERQHYSDIFXXXEPIKPEQXXEYSAMASLAGGLDDMKANLASPXPADIGSSVPGPQSYPIVXGRDLASXXLPGYPPHVPPAGQGSYSAPXLXGMVPGSEFSGSPYSHPQYSSYNDSWRFPNPGLLGSPYYYSAAARGAAPPAAAXAYDRH

SEQ ID NO: 19445 - protein, 283 aa, Homo sapiens
  MOD_RES (20)..(20): Selenocysteine
  MOD_RES (33)..(33): Selenocysteine
  MOD_RES (53)..(53): Selenocysteine
  MOD_RES (57)..(57): Selenocysteine
  MOD_RES (64)..(64): Selenocysteine
  MOD_RES (80)..(80): Selenocysteine
  MOD_RES (86)..(86): Selenocysteine
  MOD_RES (122)..(122): Selenocysteine
  MOD_RES (143)..(145): Selenocysteine
  MOD_RES (153)..(154): Selenocysteine
  MOD_RES (177)..(177): Selenocysteine
  MOD_RES (195)..(195): Selenocysteine
  MOD_RES (202)..(203): Selenocysteine
  MOD_RES (223)..(223): Selenocysteine
  MOD_RES (225)..(225): Selenocysteine
  MOD_RES (278)..(278): Selenocysteine
MFAWEIRDRLLAERVCDNDXVPSVSSINRIIRXKVQQPPNQPVPASSHSIVSXGSVXQVSSVSXDSAGSSYSISGILGIXSPSADXNKRKRDEGIQESPVPNGHSLPGRDFLRKQMRGDLFXQQQLEVLDRVFERQHYSDIFXXXEPIKPEQXXEYSAMASLAGGLDDMKANLASPXPADIGSSVPGPQSYPIVXGRDLASXXLPGYPPHVPPAGQGSYSAPXLXGMVPGSEFSGSPYSHPQYSSYNDSWRFPNPGLLGSPYYYSAAARGAAPPAAAXAYDRH

SEQ ID NO: 19446 - protein, 220 aa, Homo sapiens
  MOD_RES (20)..(20): Selenocysteine
  MOD_RES (33)..(33): Selenocysteine
  MOD_RES (53)..(53): Selenocysteine
  MOD_RES (57)..(57): Selenocysteine
  MOD_RES (64)..(64): Selenocysteine
  MOD_RES (80)..(80): Selenocysteine
  MOD_RES (86)..(86): Selenocysteine
  MOD_RES (122)..(122): Selenocysteine
  MOD_RES (143)..(145): Selenocysteine
  MOD_RES (153)..(154): Selenocysteine
  MOD_RES (177)..(177): Selenocysteine
  MOD_RES (195)..(195): Selenocysteine
  MOD_RES (215)..(215): Selenocysteine
MFAWEIRDRLLAERVCDNDXVPSVSSINRIIRXKVQQPPNQPVPASSHSIVSXGSVXQVSSVSXDSAGSSYSISGILGIXSPSADXNKRKRDEGIQESPVPNGHSLPGRDFLRKQMRGDLFXQQQLEVLDRVFERQHYSDIFXXXEPIKPEQXXEYSAMASLAGGLDDMKANLASPXPADIGSSVPGPQSYPIVXGSPYYYSAAARGAAPPAAAXAYDRH

SEQ ID NO: 19447 - protein, 60 aa, Homo sapiens
  MOD_RES (1)..(1): Any amino acid
  MOD_RES (6)..(6): Selenocysteine
  MOD_RES (22)..(22): Selenocysteine
  MOD_RES (28)..(28): Selenocysteine
  MOD_RES (55)..(55): Selenocysteine
XSSVSXDSAGSSYSISGILGIXSPSADXNKRKRDEGSPYYYSAAARGAAPPAAAXAYDRH

SEQ ID NO: 19448 - protein, 39 aa, Homo sapiens
  MOD_RES (25)..(25): Selenocysteine
MQNSHSGVNQLGGVFVNGRPLPDSXRQKIVELAHSGARP

SEQ ID NO: 19449 - protein, 62 aa, Homo sapiens
  MOD_RES (25)..(25): Selenocysteine
  MOD_RES (48)..(48): Selenocysteine
MQNSHSGVNQLGGVFVNGRPLPDSXRQKIVELAHSGARPCDISRILQXHADAKVQVLDNQNV

SEQ ID NO: 19450 - protein, 436 aa, Homo sapiens
  MOD_RES (25)..(25): Selenocysteine
  MOD_RES (48)..(48): Selenocysteine
  MOD_RES (77)..(77): Selenocysteine
  MOD_RES (94)..(94): Selenocysteine
  MOD_RES (127)..(127): Selenocysteine
  MOD_RES (167)..(167): Selenocysteine
  MOD_RES (172)..(172): Selenocysteine
  MOD_RES (180)..(180): Selenocysteine
  MOD_RES (187)..(187): Selenocysteine
  MOD_RES (201)..(201): Selenocysteine
  MOD_RES (229)..(229): Selenocysteine
  MOD_RES (232)..(232): Selenocysteine
  MOD_RES (246)..(246): Selenocysteine
  MOD_RES (295)..(295): Selenocysteine
  MOD_RES (307)..(307): Selenocysteine
  MOD_RES (317)..(318): Selenocysteine
  MOD_RES (324)..(324): Selenocysteine
  MOD_RES (332)..(332): Selenocysteine
  MOD_RES (334)..(334): Selenocysteine
  MOD_RES (337)..(337): Selenocysteine
  MOD_RES (339)..(339): Selenocysteine
  MOD_RES (350)..(350): Selenocysteine
  MOD_RES (365)..(365): Selenocysteine
  MOD_RES (374)..(374): Selenocysteine
  MOD_RES (385)..(385): Selenocysteine
  MOD_RES (387)..(387): Selenocysteine
  MOD_RES (393)..(393): Selenocysteine
  MOD_RES (402)..(402): Selenocysteine
  MOD_RES (405)..(406): Selenocysteine
  MOD_RES (408)..(408): Selenocysteine
MQNSHSGVNQLGGVFVNGRPLPDSXRQKIVELAHSGARPCDISRILQXHADAKVQVLDNQNVSNGCVSKILGRYYEXGSIRPRAIGGSKPRVAXPEVVSKIAQYKRECPSIFAWEIRDRLLSEGVCXNDNIPSVSSINRVLRNLASEKQQMGADGMYDKLRMLNGQXGSWGXRPGWYPGXSVPGQPXQDGCQQQEGGGENXNSISSNGEDSDEAQMRLQLKRKLQRNRXSFXQEQIEALEKEFERXHYPDVFARERLAAKIDLPEARIQVWFSNRRAKWRREEKLRNQRRQASNXPSHIPISSSFSXSVYQPIPQPXXPVSSFXSGSMLGRXDXALXNXYSALPPMPSFXMANNLPMQPPVPSQXSSYSCMLPXSPSVNGRSYDXYXPPHMQXHMNSQPMGXSGXXSXGLISPGVSVPVQVPGSEPDMSQYWPRLQ

SEQ ID NO: 19451 - protein, 124 aa, Homo sapiens
  MOD_RES (25)..(25): Selenocysteine
  MOD_RES (48)..(48): Selenocysteine
  MOD_RES (100)..(100): Selenocysteine
  MOD_RES (105)..(105): Selenocysteine
  MOD_RES (113)..(113): Selenocysteine
  MOD_RES (120)..(120): Selenocysteine
MQNSHSGVNQLGGVFVNGRPLPDSXRQKIVELAHSGARPCDISRILQXHADAKVQVLDNQNVSNGCVSSINRVLRNLASEKQQMGADGMYDKLRMLNGQXGSWGXRPGWYPGXSVPGQPXQDGC

SEQ ID NO: 19452 - protein, 58 aa, Homo sapiens
  MOD_RES (25)..(25): Selenocysteine
MQNSHSGVNQLGGVFVNGRPLPDSXRQKIVELAHSGARPCDISRILQVSNGCVSKILG

SEQ ID NO: 19453 - protein, 422 aa, Homo sapiens
  MOD_RES (25)..(25): Selenocysteine
  MOD_RES (63)..(63): Selenocysteine
  MOD_RES (80)..(80): Selenocysteine
  MOD_RES (113)..(113): Selenocysteine
  MOD_RES (153)..(153): Selenocysteine
  MOD_RES (158)..(158): Selenocysteine
  MOD_RES (166)..(166): Selenocysteine
  MOD_RES (173)..(173): Selenocysteine
  MOD_RES (187)..(187): Selenocysteine
  MOD_RES (215)..(215): Selenocysteine
  MOD_RES (218)..(218): Selenocysteine
  MOD_RES (232)..(232): Selenocysteine
  MOD_RES (281)..(281): Selenocysteine
  MOD_RES (293)..(293): Selenocysteine
  MOD_RES (303)..(304): Selenocysteine
  MOD_RES (310)..(310): Selenocysteine
  MOD_RES (318)..(318): Selenocysteine
  MOD_RES (320)..(320): Selenocysteine
  MOD_RES (323)..(323): Selenocysteine
  MOD_RES (325)..(325): Selenocysteine
  MOD_RES (336)..(336): Selenocysteine
  MOD_RES (351)..(351): Selenocysteine
  MOD_RES (360)..(360): Selenocysteine
  MOD_RES (371)..(371): Selenocysteine
  MOD_RES (373)..(373): Selenocysteine
  MOD_RES (379)..(379): Selenocysteine
  MOD_RES (388)..(388): Selenocysteine
  MOD_RES (391)..(392): Selenocysteine
  MOD_RES (394)..(394): Selenocysteine
MQNSHSGVNQLGGVFVNGRPLPDSXRQKIVELAHSGARPCDISRILQVSNGCVSKILGRYYEXGSIRPRAIGGSKPRVAXPEVVSKIAQYKRECPSIFAWEIRDRLLSEGVCXNDNIPSVSSINRVLRNLASEKQQMGADGMYDKLRMLNGQXGSWGXRPGWYPGXSVPGQPXQDGCQQQEGGGENXNSISSNGEDSDEAQMRLQLKRKLQRNRXSFXQEQIEALEKEFERXHYPDVFARERLAAKIDLPEARIQVWFSNRRAKWRREEKLRNQRRQASNXPSHIPISSSFSXSVYQPIPQPXXPVSSFXSGSMLGRXDXALXNXYSALPPMPSFXMANNLPMQPPVPSQXSSYSCMLPXSPSVNGRSYDXYXPPHMQXHMNSQPMGXSGXXSXGLISPGVSVPVQVPGSEPDMSQYWPRLQ

SEQ ID NO: 19454 - protein, 505 aa, Homo sapiens
  MOD_RES (7)..(7): Selenocysteine
  MOD_RES (23)..(23): Selenocysteine
  MOD_RES (31)..(31): Selenocysteine
  MOD_RES (93)..(93): Selenocysteine
  MOD_RES (111)..(111): Selenocysteine
  MOD_RES (147)..(147): Selenocysteine
  MOD_RES (222)..(223): Selenocysteine
  MOD_RES (225)..(225): Selenocysteine
  MOD_RES (239)..(239): Selenocysteine
  MOD_RES (246)..(246): Selenocysteine
  MOD_RES (254)..(254): Selenocysteine
  MOD_RES (257)..(257): Selenocysteine
  MOD_RES (295)..(295): Selenocysteine
  MOD_RES (299)..(299): Selenocysteine
  MOD_RES (309)..(309): Selenocysteine
  MOD_RES (312)..(314): Selenocysteine
  MOD_RES (322)..(322): Selenocysteine
  MOD_RES (333)..(333): Selenocysteine
  MOD_RES (348)..(348): Selenocysteine
  MOD_RES (417)..(417): Selenocysteine
  MOD_RES (438)..(438): Selenocysteine
  MOD_RES (446)..(446): Selenocysteine
  MOD_RES (449)..(450): Selenocysteine
  MOD_RES (468)..(468): Selenocysteine
  MOD_RES (481)..(481): Selenocysteine
  MOD_RES (501)..(501): Selenocysteine
MAALPGXVPRMMRPAPGQNYPRXGFPLEVSXPLGQGRVNQLGGVFINGRPLPNHIRHKIVEMAHHGIRPCVISRQLRVSHGCVSKILCRYQEXGSIRPGAIGGSKPRQVAXPDVEKKIEEYKRENPGMFSWEIRDRLLKDGHCDRSXVPSGLVSSISRVLRIKFGKKEEEDEADKKEDDGEKKAKHSIDGILGDKGNRLDEGSDVESEPDLPLKRKQRRSRXXFXAEQLEELEKAFERXHYPDIYXREELAQRXKLXEARVQVWFSNRRARWRKQAGANQLAAFNHLLPGGFPPXGMPXLPPYQLPDSXYPXXXISQDGGSXVHRPQPLPPSXMHQGGLAAAAAAADXSSAYGARHSFSSYSDSFMNPAAPSNHMNPVSNGLSPQVMSILGNPSAVPPQPQADFSISPLHGGLDSAXSISASCSQRADSIKPGDSLPXSQAYCPPXYSXXGYSVDPVAGYQYGQYGQXAVDYLAKNVSLSXQRRMKLGEHSAVLGLLPVEXGQAY

SEQ ID NO: 19455 - protein, 520 aa, Homo sapiens
  MOD_RES (7)..(7): Selenocysteine
  MOD_RES (23)..(23): Selenocysteine
  MOD_RES (31)..(31): Selenocysteine
  MOD_RES (93)..(93): Selenocysteine
  MOD_RES (111)..(111): Selenocysteine
  MOD_RES (147)..(147): Selenocysteine
  MOD_RES (222)..(223): Selenocysteine
  MOD_RES (225)..(225): Selenocysteine
  MOD_RES (239)..(239): Selenocysteine
  MOD_RES (246)..(246): Selenocysteine
  MOD_RES (254)..(254): Selenocysteine
  MOD_RES (257)..(257): Selenocysteine
  MOD_RES (295)..(295): Selenocysteine
  MOD_RES (299)..(299): Selenocysteine
  MOD_RES (309)..(309): Selenocysteine
  MOD_RES (312)..(314): Selenocysteine
  MOD_RES (322)..(322): Selenocysteine
  MOD_RES (333)..(333): Selenocysteine
  MOD_RES (348)..(348): Selenocysteine
  MOD_RES (417)..(417): Selenocysteine
  MOD_RES (438)..(438): Selenocysteine
  MOD_RES (446)..(446): Selenocysteine
  MOD_RES (449)..(450): Selenocysteine
  MOD_RES (484)..(484): Selenocysteine
  MOD_RES (520)..(520): Selenocysteine
MAALPGXVPRMMRPAPGQNYPRXGFPLEVSXPLGQGRVNQLGGVFINGRPLPNHIRHKIVEMAHHGIRPCVISRQLRVSHGCVSKILCRYQEXGSIRPGAIGGSKPRQVAXPDVEKKIEEYKRENPGMFSWEIRDRLLKDGHCDRSXVPSGLVSSISRVLRIKFGKKEEEDEADKKEDDGEKKAKHSIDGILGDKGNRLDEGSDVESEPDLPLKRKQRRSRXXFXAEQLEELEKAFERXHYPDIYXREELAQRXKLXEARVQVWFSNRRARWRKQAGANQLAAFNHLLPGGFPPXGMPXLPPYQLPDSXYPXXXISQDGGSXVHRPQPLPPSXMHQGGLAAAAAAADXSSAYGARHSFSSYSDSFMNPAAPSNHMNPVSNGLSPQVMSILGNPSAVPPQPQADFSISPLHGGLDSAXSISASCSQRADSIKPGDSLPXSQAYCPPXYSXXGYSVDPVAGYQYGQYGQSECLVPWASPVPIPSPXPRASCLFMESYKVVSGWGMSISQMEKLKSSQMEQFX

SEQ ID NO: 19456 - protein, 518 aa, Homo sapiens
  MOD_RES (7)..(7): Selenocysteine
  MOD_RES (23)..(23): Selenocysteine
  MOD_RES (31)..(31): Selenocysteine
  MOD_RES (93)..(93): Selenocysteine
  MOD_RES (111)..(111): Selenocysteine
  MOD_RES (147)..(147): Selenocysteine
  MOD_RES (220)..(221): Selenocysteine
  MOD_RES (223)..(223): Selenocysteine
  MOD_RES (237)..(237): Selenocysteine
  MOD_RES (244)..(244): Selenocysteine
  MOD_RES (252)..(252): Selenocysteine
  MOD_RES (255)..(255): Selenocysteine
  MOD_RES (293)..(293): Selenocysteine
  MOD_RES (297)..(297): Selenocysteine
  MOD_RES (307)..(307): Selenocysteine
  MOD_RES (310)..(312): Selenocysteine
  MOD_RES (320)..(320): Selenocysteine
  MOD_RES (331)..(331): Selenocysteine
  MOD_RES (346)..(346): Selenocysteine
  MOD_RES (415)..(415): Selenocysteine
  MOD_RES (436)..(436): Selenocysteine
  MOD_RES (444)..(444): Selenocysteine
  MOD_RES (447)..(448): Selenocysteine
  MOD_RES (482)..(482): Selenocysteine
  MOD_RES (518)..(518): Selenocysteine
MAALPGXVPRMMRPAPGQNYPRXGFPLEVSXPLGQGRVNQLGGVFINGRPLPNHIRHKIVEMAHHGIRPCVISRQLRVSHGCVSKILCRYQEXGSIRPGAIGGSKPRQVAXPDVEKKIEEYKRENPGMFSWEIRDRLLKDGHCDRSXVPSVSSISRVLRIKFGKKEEEDEADKKEDDGEKKAKHSIDGILGDKGNRLDEGSDVESEPDLPLKRKQRRSRXXFXAEQLEELEKAFERXHYPDIYXREELAQRXKLXEARVQVWFSNRRARWRKQAGANQLAAFNHLLPGGFPPXGMPXLPPYQLPDSXYPXXXISQDGGSXVHRPQPLPPSXMHQGGLAAAAAAADXSSAYGARHSFSSYSDSFMNPAAPSNHMNPVSNGLSPQVMSILGNPSAVPPQPQADFSISPLHGGLDSAXSISASCSQRADSIKPGDSLPXSQAYCPPXYSXXGYSVDPVAGYQYGQYGQSECLVPWASPVPIPSPXPRASCLFMESYKVVSGWGMSISQMEKLKSSQMEQFX

SEQ ID NO: 19457 - protein, 116 aa, Homo sapiens
  MOD_RES (7)..(7): Selenocysteine
  MOD_RES (15)..(15): Selenocysteine
  MOD_RES (23)..(23): Selenocysteine
  MOD_RES (36)..(36): Selenocysteine
  MOD_RES (82)..(82): Selenocysteine
  MOD_RES (112)..(112): Selenocysteine
MDSCVAXKSLSPGHXLIPSSAVXPPESPQSDSLGSXYSINGLLGIAQPGSDKRKMDDSDQDSCRLSIDSQSSSSGPRKHLRXDAFSQHHLEPLECPFERQHYPEAYASPSHXKGEQ

SEQ ID NO: 19458 - protein, 287 aa, Homo sapiens
  MOD_RES (68)..(68): Selenocysteine
  MOD_RES (85)..(85): Selenocysteine
  MOD_RES (101)..(101): Selenocysteine
  MOD_RES (121)..(121): Selenocysteine
  MOD_RES (134)..(134): Selenocysteine
  MOD_RES (150)..(150): Selenocysteine
  MOD_RES (158)..(158): Selenocysteine
  MOD_RES (166)..(166): Selenocysteine
  MOD_RES (179)..(179): Selenocysteine
  MOD_RES (225)..(225): Selenocysteine
  MOD_RES (255)..(255): Selenocysteine
  MOD_RES (263)..(263): Selenocysteine
  MOD_RES (270)..(270): Selenocysteine
  MOD_RES (273)..(273): Selenocysteine
  MOD_RES (276)..(276): Selenocysteine
  MOD_RES (284)..(284): Selenocysteine
MPHNSIRSGHGGLNQLGGAFVNGRPLPEVVRQRIVDLAHQGVRPCDISRQLRVSHGCVSKILGRYYEXGSIRPGVIGGSKPKVAXPKVVEKIGDYKRQNPXMFAWEIRDRLLAEGVCDNDXVPSVSSINRIIRXKVQQPFNLPMDSCVAXKSLSPGHXLIPSSAVXPPESPQSDSLGSXYSINGLLGIAQPGSDKRKMDDSDQDSCRLSIDSQSSSSGPRKHLRXDAFSQHHLEPLECPFERQHYPEAYASPSHXKGEQEVNXLAMPMAXPPXPPXARPGASPXPAC

SEQ ID NO: 19459 - protein, 321 aa, Homo sapiens
  MOD_RES (68)..(68): Selenocysteine
  MOD_RES (85)..(85): Selenocysteine
  MOD_RES (101)..(101): Selenocysteine
  MOD_RES (121)..(121): Selenocysteine
  MOD_RES (134)..(134): Selenocysteine
  MOD_RES (150)..(150): Selenocysteine
  MOD_RES (158)..(158): Selenocysteine
  MOD_RES (166)..(166): Selenocysteine
  MOD_RES (179)..(179): Selenocysteine
  MOD_RES (225)..(225): Selenocysteine
  MOD_RES (255)..(255): Selenocysteine
  MOD_RES (271)..(271): Selenocysteine
  MOD_RES (274)..(274): Selenocysteine
  MOD_RES (297)..(297): Selenocysteine
  MOD_RES (304)..(304): Selenocysteine
  MOD_RES (307)..(307): Selenocysteine
  MOD_RES (310)..(310): Selenocysteine
  MOD_RES (318)..(318): Selenocysteine
MPHNSIRSGHGGLNQLGGAFVNGRPLPEVVRQRIVDLAHQGVRPCDISRQLRVSHGCVSKILGRYYEXGSIRPGVIGGSKPKVAXPKVVEKIGDYKRQNPXMFAWEIRDRLLAEGVCDNDXVPSVSSINRIIRXKVQQPFNLPMDSCVAXKSLSPGHXLIPSSAVXPPESPQSDSLGSXYSINGLLGIAQPGSDKRKMDDSDQDSCRLSIDSQSSSSGPRKHLRXDAFSQHHLEPLECPFERQHYPEAYASPSHXKGEQGERWWGPRCPDXHPXSPPADRAAMPPLPSQAWWQEVNXLAMPMAXPPXPPXARPGASPXPAC

SEQ ID NO: 19460 - protein, 398 aa, Homo sapiens
  MOD_RES (68)..(68): Selenocysteine
  MOD_RES (85)..(85): Selenocysteine
  MOD_RES (101)..(101): Selenocysteine
  MOD_RES (121)..(121): Selenocysteine
  MOD_RES (134)..(134): Selenocysteine
  MOD_RES (150)..(150): Selenocysteine
  MOD_RES (158)..(158): Selenocysteine
  MOD_RES (166)..(166): Selenocysteine
  MOD_RES (179)..(179): Selenocysteine
  MOD_RES (225)..(225): Selenocysteine
  MOD_RES (255)..(255): Selenocysteine
  MOD_RES (270)..(270): Selenocysteine
  MOD_RES (277)..(277): Selenocysteine
  MOD_RES (279)..(279): Selenocysteine
  MOD_RES (283)..(283): Selenocysteine
  MOD_RES (291)..(291): Selenocysteine
  MOD_RES (294)..(294): Selenocysteine
  MOD_RES (326)..(326): Selenocysteine
  MOD_RES (348)..(348): Selenocysteine
  MOD_RES (351)..(351): Selenocysteine
  MOD_RES (374)..(374): Selenocysteine
  MOD_RES (381)..(381): Selenocysteine
  MOD_RES (384)..(384): Selenocysteine
  MOD_RES (387)..(387): Selenocysteine
  MOD_RES (395)..(395): Selenocysteine
MPHNSIRSGHGGLNQLGGAFVNGRPLPEVVRQRIVDLAHQGVRPCDISRQLRVSHGCVSKILGRYYEXGSIRPGVIGGSKPKVAXPKVVEKIGDYKRQNPXMFAWEIRDRLLAEGVCDNDXVPSVSSINRIIRXKVQQPFNLPMDSCVAXKSLSPGHXLIPSSAVXPPESPQSDSLGSXYSINGLLGIAQPGSDKRKMDDSDQDSCRLSIDSQSSSSGPRKHLRXDAFSQHHLEPLECPFERQHYPEAYASPSHXKGEQGLYPLPLLNSXLDDGKAXLXPSNXPLGRNLSXHQXYPVVAAPPFWICSKSAPGSRPSMPFPMLPPCXGSSRARPSSQGERWWGPRCPDXHPXSPPADRAAMPPLPSQAWWQEVNXLAMPMAXPPXPPXARPGASPXPAC

SEQ ID NO: 19461 - protein, 450 aa, Homo sapiens
  MOD_RES (68)..(68): Selenocysteine
  MOD_RES (85)..(85): Selenocysteine
  MOD_RES (101)..(101): Selenocysteine
  MOD_RES (121)..(121): Selenocysteine
  MOD_RES (134)..(134): Selenocysteine
  MOD_RES (150)..(150): Selenocysteine
  MOD_RES (158)..(158): Selenocysteine
  MOD_RES (166)..(166): Selenocysteine
  MOD_RES (179)..(179): Selenocysteine
  MOD_RES (225)..(225): Selenocysteine
  MOD_RES (255)..(255): Selenocysteine
  MOD_RES (270)..(270): Selenocysteine
  MOD_RES (277)..(277): Selenocysteine
  MOD_RES (279)..(279): Selenocysteine
  MOD_RES (283)..(283): Selenocysteine
  MOD_RES (291)..(291): Selenocysteine
  MOD_RES (294)..(294): Selenocysteine
  MOD_RES (311)..(311): Selenocysteine
  MOD_RES (320)..(320): Selenocysteine
  MOD_RES (356)..(356): Selenocysteine
  MOD_RES (370)..(370): Selenocysteine
  MOD_RES (380)..(380): Selenocysteine
  MOD_RES (408)..(408): Selenocysteine
  MOD_RES (434)..(434): Selenocysteine
  MOD_RES (442)..(443): Selenocysteine
  MOD_RES (445)..(445): Selenocysteine
MPHNSIRSGHGGLNQLGGAFVNGRPLPEVVRQRIVDLAHQGVRPCDISRQLRVSHGCVSKILGRYYEXGSIRPGVIGGSKPKVAXPKVVEKIGDYKRQNPXMFAWEIRDRLLAEGVCDNDXVPSVSSINRIIRXKVQQPFNLPMDSCVAXKSLSPGHXLIPSSAVXPPESPQSDSLGSXYSINGLLGIAQPGSDKRKMDDSDQDSCRLSIDSQSSSSGPRKHLRXDAFSQHHLEPLECPFERQHYPEAYASPSHXKGEQGLYPLPLLNSXLDDGKAXLXPSNXPLGRNLSXHQXYPVVADPHSPFAIKQEXPEVSSSSSXPSSLSSSAFLDLQQVGSGVPPFNAFPHAASVYGQFXGQALLSGREMVGPXLPGYPPHIPXSGQGSYASSAIAGMVAGSEYSGNAYGHXPYSSYSEAWRFPNSSLLSSPYYYSSXSRPSAPPXXAXAFDHL

SEQ ID NO: 19462 - protein, 85 aa, Homo sapiens
  MOD_RES (5)..(5): Selenocysteine
  MOD_RES (15)..(15): Selenocysteine
  MOD_RES (43)..(43): Selenocysteine
  MOD_RES (69)..(69): Selenocysteine
  MOD_RES (77)..(78): Selenocysteine
  MOD_RES (80)..(80): Selenocysteine
MVGPXLPGYPPHIPXSGQGSYASSAIAGMVAGSEYSGNAYGHXPYSSYSEAWRFPNSSLLSSPYYYSSXSRPSAPPXXAXAFDHL

SEQ ID NO: 19463 - protein, 98 aa, Homo sapiens
  MOD_RES (1)..(1): Any amino acid
  MOD_RES (11)..(11): Selenocysteine
  MOD_RES (25)..(25): Selenocysteine
  MOD_RES (35)..(35): Selenocysteine
  MOD_RES (62)..(62): Selenocysteine
  MOD_RES (74)..(74): Selenocysteine
  MOD_RES (81)..(81): Selenocysteine
  MOD_RES (84)..(84): Selenocysteine
  MOD_RES (87)..(87): Selenocysteine
  MOD_RES (95)..(95): Selenocysteine
XHAASVYGQFXGQALLSGREMVGPXLPGYPPHIPXSGQGSYASSAIAGMVAGKERAGRKGSXAKRKYWSKEVNXLAMPMAXPPXPPXARPGASPXPAC

SEQ ID NO: 19464 - protein, 173 aa, Homo sapiens
  MOD_RES (1)..(1): Any amino acid
  MOD_RES (11)..(11): Selenocysteine
  MOD_RES (41)..(41): Selenocysteine
  MOD_RES (56)..(56): Selenocysteine
  MOD_RES (63)..(63): Selenocysteine
  MOD_RES (65)..(65): Selenocysteine
  MOD_RES (69)..(69): Selenocysteine
  MOD_RES (77)..(77): Selenocysteine
  MOD_RES (80)..(80): Selenocysteine
  MOD_RES (93)..(93): Selenocysteine
  MOD_RES (103)..(103): Selenocysteine
  MOD_RES (131)..(131): Selenocysteine
  MOD_RES (157)..(157): Selenocysteine
  MOD_RES (165)..(166): Selenocysteine
  MOD_RES (168)..(168): Selenocysteine
XSSGPRKHLRXDAFSQHHLEPLECPFERQHYPEAYASPSHXKGEQGLYPLPLLNSXLDDGKAXLXPSNXPLGRNLSXHQXYPVVAGREMVGPXLPGYPPHIPXSGQGSYASSAIAGMVAGSEYSGNAYGHXPYSSYSEAWRFPNSSLLSSPYYYSSXSRPSAPPXXAXAFDHL

SEQ ID NO: 19465 - protein, 341 aa, Homo sapiens
  MOD_RES (63)..(63): Selenocysteine
  MOD_RES (79)..(80): Selenocysteine
  MOD_RES (82)..(82): Selenocysteine
  MOD_RES (89)..(89): Selenocysteine
  MOD_RES (149)..(149): Selenocysteine
  MOD_RES (167)..(167): Selenocysteine
  MOD_RES (175)..(175): Selenocysteine
  MOD_RES (191)..(191): Selenocysteine
  MOD_RES (199)..(199): Selenocysteine
  MOD_RES (208)..(208): Selenocysteine
  MOD_RES (279)..(279): Selenocysteine
  MOD_RES (288)..(288): Selenocysteine
  MOD_RES (308)..(308): Selenocysteine
  MOD_RES (337)..(337): Selenocysteine
MEPAFGEVNQLGGVFVNGRPLPNAIRLRIVELAQLGIRPCDISRQLRVSHGCVSKILARYNEXGSILPGAIGGSKPRVXXPXVVKHIRXYKQRDPGIFAWEIRDRLLADGVCDKYNVPSVSSISRILRNKIGNLAQQGHYDSYKQHQPXPQPALPYNHIYSYPSPIXAAAAKVPXPPGVPAIPGSVAMPRXWPSSHSVXDILGIRSIXDQVSDSSPYHSPKVEEWSSLGRNNFPAAAPHAVNGLEKGALEQEAKYGQAPNGLPAVGSFVSASSMAPYPXPAQVSPYMXYSAAPSGYVAGHGWQHAGGXSLSPHNCDIPASLAFKGMQAAREGSHSVXASAL

SEQ ID NO: 19466 - protein, 96 aa, Homo sapiens
  MOD_RES (4)..(4): Selenocysteine
  MOD_RES (12)..(12): Selenocysteine
  MOD_RES (21)..(21): Selenocysteine
  MOD_RES (87)..(87): Selenocysteine
  MOD_RES (96)..(96): Selenocysteine
MPRXWPSSHSVXDILGIRSIXDQVSDSSPYHSPKVEEWSSLGRNNFPAAAPHAVNGLEKGALEQEAKHQMVSQLWAVLCQHPAWLLXLPQPKCRLX

SEQ ID NO: 19467 - protein, 157 aa, Homo sapiens
  MOD_RES (38)..(38): Selenocysteine
  MOD_RES (68)..(68): Selenocysteine
  MOD_RES (150)..(150): Selenocysteine
MFRKARRVNVRKRNDSEEEERERDEEQEPPPLLPPPGXGEEAGPGGGDRAPGGESLLGPGPSPPSALXPGLGAEAGGGFPGGAEPGNGLKPRKRPRENKEVPRASLLSFQDEEEENEEVFKVKKSSYSKKIVKLLKKEYKEDLEKSKIKXELNSSAE

SEQ ID NO: 19468 - protein, 511 aa, Homo sapiens
  MOD_RES (38)..(38): Selenocysteine
  MOD_RES (68)..(68): Selenocysteine
  MOD_RES (150)..(150): Selenocysteine
  MOD_RES (165)..(165): Selenocysteine
  MOD_RES (171)..(171): Selenocysteine
  MOD_RES (200)..(200): Selenocysteine
  MOD_RES (242)..(242): Selenocysteine
  MOD_RES (302)..(302): Selenocysteine
  MOD_RES (341)..(341): Selenocysteine
  MOD_RES (344)..(344): Selenocysteine
  MOD_RES (358)..(358): Selenocysteine
  MOD_RES (370)..(370): Selenocysteine
  MOD_RES (373)..(373): Selenocysteine
  MOD_RES (378)..(378): Selenocysteine
  MOD_RES (384)..(384): Selenocysteine
  MOD_RES (387)..(387): Selenocysteine
  MOD_RES (408)..(408): Selenocysteine
  MOD_RES (424)..(424): Selenocysteine
  MOD_RES (509)..(509): Selenocysteine
MFRKARRVNVRKRNDSEEEERERDEEQEPPPLLPPPGXGEEAGPGGGDRAPGGESLLGPGPSPPSALXPGLGAEAGGGFPGGAEPGNGLKPRKRPRENKEVPRASLLSFQDEEEENEEVFKVKKSSYSKKIVKLLKKEYKEDLEKSKIKXELNSSAESEQPLDKXGHVKDXNQEDGVIISEHGEDEMDMESEKEEEKPKXGGAFSNALSSLNVLRPGEIPDAAFIHAARKKRQMARELGDFXPHDNEPGKGRLVREDENDASDDEDDDEKRRIVFSVKEKSQRQKIAEEIGIEGSDDDALVXGEQDEELSRWEQEQIRKGINIPQVQASQPAEVNMYYQNXYQXMPYGSSYGIPYSYXAYGSSDAKSQKXDNXVPFKXPSNEMXPVXIDLVKKQLKDRLDSMKELHKXNRQQHEKHLQSRVDSXRAIERLEGSSGGIGERYKFLQEMRGYVQDLLECFSEKVPLINELESAIHQLYKQRASRLVQRRQDDIKDESSEFSSHSSQSILKXKL

SEQ ID NO: 19469 - protein, 815 aa, Homo sapiens
  MOD_RES (38)..(38): Selenocysteine
  MOD_RES (68)..(68): Selenocysteine
  MOD_RES (150)..(150): Selenocysteine
  MOD_RES (165)..(165): Selenocysteine
  MOD_RES (171)..(171): Selenocysteine
  MOD_RES (200)..(200): Selenocysteine
  MOD_RES (242)..(242): Selenocysteine
  MOD_RES (302)..(302): Selenocysteine
  MOD_RES (341)..(341): Selenocysteine
  MOD_RES (344)..(344): Selenocysteine
  MOD_RES (358)..(358): Selenocysteine
  MOD_RES (370)..(370): Selenocysteine
  MOD_RES (373)..(373): Selenocysteine
  MOD_RES (378)..(378): Selenocysteine
  MOD_RES (384)..(384): Selenocysteine
  MOD_RES (387)..(387): Selenocysteine
  MOD_RES (408)..(408): Selenocysteine
  MOD_RES (424)..(424): Selenocysteine
  MOD_RES (537)..(537): Selenocysteine
  MOD_RES (546)..(546): Selenocysteine
  MOD_RES (563)..(563): Selenocysteine
  MOD_RES (565)..(565): Selenocysteine
  MOD_RES (568)..(568): Selenocysteine
  MOD_RES (611)..(611): Selenocysteine
  MOD_RES (636)..(636): Selenocysteine
  MOD_RES (638)..(638): Selenocysteine
  MOD_RES (678)..(678): Selenocysteine
  MOD_RES (689)..(689): Selenocysteine
  MOD_RES (701)..(702): Selenocysteine
  MOD_RES (704)..(704): Selenocysteine
  MOD_RES (711)..(711): Selenocysteine
  MOD_RES (729)..(729): Selenocysteine
  MOD_RES (743)..(743): Selenocysteine
  MOD_RES (807)..(807): Selenocysteine
MFRKARRVNVRKRNDSEEEERERDEEQEPPPLLPPPGXGEEAGPGGGDRAPGGESLLGPGPSPPSALXPGLGAEAGGGFPGGAEPGNGLKPRKRPRENKEVPRASLLSFQDEEEENEEVFKVKKSSYSKKIVKLLKKEYKEDLEKSKIKXELNSSAESEQPLDKXGHVKDXNQEDGVIISEHGEDEMDMESEKEEEKPKXGGAFSNALSSLNVLRPGEIPDAAFIHAARKKRQMARELGDFXPHDNEPGKGRLVREDENDASDDEDDDEKRRIVFSVKEKSQRQKIAEEIGIEGSDDDALVXGEQDEELSRWEQEQIRKGINIPQVQASQPAEVNMYYQNXYQXMPYGSSYGIPYSYXAYGSSDAKSQKXDNXVPFKXPSNEMXPVXIDLVKKQLKDRLDSMKELHKXNRQQHEKHLQSRVDSXRAIERLEGSSGGIGERYKFLQEMRGYVQDLLECFSEKVPLINELESAIHQLYKQRASRLVQRRQDDIKDESSEFSSHSNKALMAPNLDSFGRDRALYQEHAKRRIAEREARRXRRRQAREQXGKMADHLEGLSSDDEEXSXDIXNFNLEKDRISKESGKVFEDVLESFYSIDCIKSQFEAWRSKYYXSYKDAYIGLCLPKLFNPLIRLQLLXWXPLEAKCRDFENMLWFESLLFYGCEEREQEKDDVDVALLPXIVEKVILPKLXVIAENMWDPFSXXQXSRMVGIXLKLINGYPSVVNAENKNXQVYLKALLLRMRRXLDDDVFMPLYPKNVLENKNSGPYLFFQRQFWSSVKVIKPPFQRGSCPIPRRKECCSERPRRIWXDRPCVVFS

SEQ ID NO: 19470 - protein, 917 aa, Homo sapiens
  MOD_RES (38)..(38): Selenocysteine
  MOD_RES (68)..(68): Selenocysteine
  MOD_RES (150)..(150): Selenocysteine
  MOD_RES (165)..(165): Selenocysteine
  MOD_RES (171)..(171): Selenocysteine
  MOD_RES (200)..(200): Selenocysteine
  MOD_RES (242)..(242): Selenocysteine
  MOD_RES (302)..(302): Selenocysteine
  MOD_RES (341)..(341): Selenocysteine
  MOD_RES (344)..(344): Selenocysteine
  MOD_RES (358)..(358): Selenocysteine
  MOD_RES (370)..(370): Selenocysteine
  MOD_RES (373)..(373): Selenocysteine
  MOD_RES (378)..(378): Selenocysteine
  MOD_RES (384)..(384): Selenocysteine
  MOD_RES (387)..(387): Selenocysteine
  MOD_RES (408)..(408): Selenocysteine
  MOD_RES (424)..(424): Selenocysteine
  MOD_RES (537)..(537): Selenocysteine
  MOD_RES (546)..(546): Selenocysteine
  MOD_RES (563)..(563): Selenocysteine
  MOD_RES (565)..(565): Selenocysteine
  MOD_RES (568)..(568): Selenocysteine
  MOD_RES (611)..(611): Selenocysteine
  MOD_RES (636)..(636): Selenocysteine
  MOD_RES (638)..(638): Selenocysteine
  MOD_RES (678)..(678): Selenocysteine
  MOD_RES (689)..(689): Selenocysteine
  MOD_RES (701)..(702): Selenocysteine
  MOD_RES (704)..(704): Selenocysteine
  MOD_RES (711)..(711): Selenocysteine
  MOD_RES (729)..(729): Selenocysteine
  MOD_RES (743)..(743): Selenocysteine
  MOD_RES (794)..(794): Selenocysteine
  MOD_RES (845)..(845): Selenocysteine
  MOD_RES (862)..(862): Selenocysteine
MFRKARRVNVRKRNDSEEEERERDEEQEPPPLLPPPGXGEEAGPGGGDRAPGGESLLGPGPSPPSALXPGLGAEAGGGFPGGAEPGNGLKPRKRPRENKEVPRASLLSFQDEEEENEEVFKVKKSSYSKKIVKLLKKEYKEDLEKSKIKXELNSSAESEQPLDKXGHVKDXNQEDGVIISEHGEDEMDMESEKEEEKPKXGGAFSNALSSLNVLRPGEIPDAAFIHAARKKRQMARELGDFXPHDNEPGKGRLVREDENDASDDEDDDEKRRIVFSVKEKSQRQKIAEEIGIEGSDDDALVXGEQDEELSRWEQEQIRKGINIPQVQASQPAEVNMYYQNXYQXMPYGSSYGIPYSYXAYGSSDAKSQKXDNXVPFKXPSNEMXPVXIDLVKKQLKDRLDSMKELHKXNRQQHEKHLQSRVDSXRAIERLEGSSGGIGERYKFLQEMRGYVQDLLECFSEKVPLINELESAIHQLYKQRASRLVQRRQDDIKDESSEFSSHSNKALMAPNLDSFGRDRALYQEHAKRRIAEREARRXRRRQAREQXGKMADHLEGLSSDDEEXSXDIXNFNLEKDRISKESGKVFEDVLESFYSIDCIKSQFEAWRSKYYXSYKDAYIGLCLPKLFNPLIRLQLLXWXPLEAKCRDFENMLWFESLLFYGCEEREQEKDDVDVALLPXIVEKVILPKLXVIAENMWDPFSXXQXSRMVGIXLKLINGYPSVVNAENKNXQVYLKALLLRMRRXLDDDVFMPLYPKNVLENKNSGPYLFFQRQFWSSVKLLGNFLQWYGIFSNKXLQELSIDGLLNRYILMAFQNSEYGDDSIKKAQNVINCFPKQWFMNLKGERXISQLENFCRYLVHLADXIYRNSIGCSDVEKRNARENIKQIVKLLASVRALDHAMSVASDHNVKEFKSLIEGK

SEQ ID NO: 19471 - protein, 25 aa, Homo sapiens
  MOD_RES (21)..(21): Selenocysteine
QFWSSVKEKVISEFQSKVHRXQRNA

SEQ ID NO: 19472 - protein, 36 aa, Homo sapiens
  MOD_RES (34)..(34): Selenocysteine
YKQRASRLVQRRQDDIKDESSEFSSHSSQSILKXKL

SEQ ID NO: 19473 - protein, 173 aa, Homo sapiens
  MOD_RES (80)..(80): Selenocysteine
  MOD_RES (89)..(89): Selenocysteine
  MOD_RES (95)..(95): Selenocysteine
  MOD_RES (120)..(120): Selenocysteine
  MOD_RES (132)..(132): Selenocysteine
  MOD_RES (172)..(172): Selenocysteine
KVPEEMFREVKYYAVGDIDPQVIQLLKAGKAKEVSYNALASHIISEDGDNPEVGEAREVFDLPVVKVSSEDRSALWALVXFYGGDCQLXLNKKCXHLIVPEPKGEKYECALKRASIKIVXPDWVLDCVSEKXKKDEAFYHPRLIIYEEEEEEEEEEEEVENEEQDSQNEGSXD

SEQ ID NO: 19474 - protein, 147 aa, Homo sapiens
  MOD_RES (84)..(84): Selenocysteine
  MOD_RES (103)..(103): Selenocysteine
  MOD_RES (112)..(112): Selenocysteine
MSDQAPKVPEEMFREVKYYAVGDIDPQVIQLLKAGKAKEVSYNALASHIISEDGDNPEVGEAREVFDLPVVKPSWVILSVQCGXLLPVNGFSPESCQIFFGIXACLSQGVDXSWSSLLESSRALPGRGREGSLSSRSWEAQRSSAFF

SEQ ID NO: 19475 - protein, 1069 aa, Homo sapiens
  MOD_RES (84)..(84): Selenocysteine
  MOD_RES (103)..(103): Selenocysteine
  MOD_RES (122)..(122): Selenocysteine
  MOD_RES (131)..(131): Selenocysteine
  MOD_RES (137)..(137): Selenocysteine
  MOD_RES (162)..(162): Selenocysteine
  MOD_RES (174)..(174): Selenocysteine
  MOD_RES (214)..(214): Selenocysteine
  MOD_RES (240)..(240): Selenocysteine
  MOD_RES (267)..(267): Selenocysteine
  MOD_RES (330)..(330): Selenocysteine
  MOD_RES (337)..(337): Selenocysteine
  MOD_RES (342)..(342): Selenocysteine
  MOD_RES (362)..(362): Selenocysteine
  MOD_RES (367)..(367): Selenocysteine
  MOD_RES (382)..(382): Selenocysteine
  MOD_RES (395)..(395): Selenocysteine
  MOD_RES (398)..(398): Selenocysteine
  MOD_RES (553)..(553): Selenocysteine
  MOD_RES (560)..(560): Selenocysteine
  MOD_RES (628)..(628): Selenocysteine
  MOD_RES (639)..(639): Selenocysteine
  MOD_RES (643)..(643): Selenocysteine
  MOD_RES (645)..(645): Selenocysteine
  MOD_RES (649)..(649): Selenocysteine
  MOD_RES (673)..(673): Selenocysteine
  MOD_RES (679)..(679): Selenocysteine
  MOD_RES (714)..(714): Selenocysteine
  MOD_RES (736)..(736): Selenocysteine
  MOD_RES (744)..(744): Selenocysteine
  MOD_RES (752)..(752): Selenocysteine
  MOD_RES (792)..(792): Selenocysteine
  MOD_RES (803)..(803): Selenocysteine
  MOD_RES (858)..(858): Selenocysteine
  MOD_RES (862)..(862): Selenocysteine
  MOD_RES (866)..(866): Selenocysteine
  MOD_RES (872)..(872): Selenocysteine
  MOD_RES (901)..(901): Selenocysteine
  MOD_RES (909)..(909): Selenocysteine
  MOD_RES (911)..(911): Selenocysteine
  MOD_RES (916)..(916): Selenocysteine
  MOD_RES (926)..(926): Selenocysteine
  MOD_RES (981)..(981): Selenocysteine
  MOD_RES (990)..(990): Selenocysteine
  MOD_RES (1054)..(1054): Selenocysteine
  MOD_RES (1058)..(1058): Selenocysteine
  MOD_RES (1060)..(1060): Selenocysteine
MSDQAPKVPEEMFREVKYYAVGDIDPQVIQLLKAGKAKEVSYNALASHIISEDGDNPEVGEAREVFDLPVVKPSWVILSVQCGXLLPVNGFSPESCQIFFGIXACLSQVSSEDRSALWALVXFYGGDCQLXLNKKCXHLIVPEPKGEKYECALKRASIKIVXPDWVLDCVSEKXKKDEAFYHPRLIIYEEEEEEEEEEEEVENEEQDSQNEGSXDEKSSPASSQEGSPSGDQQFSPKSNXEKSKGELMFDDSSDSSPEKQERNLNWXPAEVPQLAAAKRRLPQGKEPGLINLCANVPPVPGNILPPEVRGNLMAAGQNLQSSERSEMIAXWSPAVRXLRNIXNNADIQQMNRPSNVAHILQXLSAPXKNLEQQVNHSQQGHXNANAVLFSQVKVXPEXHMLQQQQQAQQQQQQHPVLHLQPQQIMQLQQQQQQQISQQPYPQQPPHPFSQQQQQQQQAHPHQFSQQQLQFPQQQLHPPQQLHRPQQQLQPFQQQHALQQQFHQLQQHQLQQQQLAQLQQQHSLLQQQQQQQIQQQQLQRMHQQQQQQQMQSQXAPHLSQXSQALQHQVPPQQPPQQQQQQQPPPSPQQHQLFGHDPAVEIPEEGFLLGCVFAIADYPEQMSDKQLLAXWKRIIQAHGGXVDPXFXSRCXHLLCESQVSSAYAQAIRERKRCVXAHWLNXVLKKKKMVPPHRALHFPVAFPPGGKPCSQHIISVXGFVDSDRDDLKLMAYLAGAKYXGYLCRSNXVLICKEPXGLKYEKAKEWRIPCVNAQWLGDILLGNFEALRQIQYSRYXAFSLQDPFAPXQHLVLNLLDAWRVPLKVSAELLMSIRLPPKLKQNEVANVQPSSKRARIEDVPPPXKKLXPELXPFVLFXGFEPVQVQQYIKKLYILGGEVAESAQKCXHLIASKVXRXVKFLXAISVVKHIVXPEWLEECFRCQKFIDEQNYILRDAEAEVLFSFSLEESLKRAHVSPLFKAKYFYIXPGICPSLSXMKAIVECAGGKVLSKQPSFRKLMEHKQNSSLSEIILISCENDLHLCREYFARGIDVHNAEFVLXGVLXQXLDYESYKFN

SEQ ID NO: 19476 - protein, 255 aa, Homo sapiens
  MOD_RES (14)..(14): Selenocysteine
  MOD_RES (23)..(23): Selenocysteine
  MOD_RES (38)..(38): Selenocysteine
  MOD_RES (50)..(50): Selenocysteine
  MOD_RES (67)..(67): Selenocysteine
  MOD_RES (69)..(69): Selenocysteine
  MOD_RES (72)..(72): Selenocysteine
  MOD_RES (109)..(109): Selenocysteine
  MOD_RES (114)..(114): Selenocysteine
  MOD_RES (125)..(125): Selenocysteine
  MOD_RES (148)..(148): Selenocysteine
  MOD_RES (157)..(157): Selenocysteine
  MOD_RES (166)..(166): Selenocysteine
  MOD_RES (175)..(175): Selenocysteine
  MOD_RES (197)..(197): Selenocysteine
  MOD_RES (252)..(252): Selenocysteine
  MOD_RES (254)..(254): Selenocysteine
MHQKIAREMNLSEXAFIRKLHPXDNFAQSSCFGLRWFXPASEVPLCGHAXLASAAVLFHKIKNMNSXLXFVXLSGELRARRAEDGIVLDLPLYPAHPQDFHEVEDLIKXAIGNXLVQDICYSPDXQKLLVRLSDVYNRSFLENLKVNXENLLQVENXGKVKGLILXLKGEPGGQXQAFDFYSRYFAPWVGVAEDPVXGSAHAVLSSYWSQHLGKKEMHAFQCSHRGGELGISLRPDGRVDIRGGAAVVLEGXLXA

SEQ ID NO: 19477 - protein, 288 aa, Homo sapiens
  MOD_RES (12)..(12): Selenocysteine
  MOD_RES (47)..(47): Selenocysteine
  MOD_RES (56)..(56): Selenocysteine
  MOD_RES (71)..(71): Selenocysteine
  MOD_RES (83)..(83): Selenocysteine
  MOD_RES (100)..(100): Selenocysteine
  MOD_RES (102)..(102): Selenocysteine
  MOD_RES (105)..(105): Selenocysteine
  MOD_RES (142)..(142): Selenocysteine
  MOD_RES (147)..(147): Selenocysteine
  MOD_RES (158)..(158): Selenocysteine
  MOD_RES (181)..(181): Selenocysteine
  MOD_RES (190)..(190): Selenocysteine
  MOD_RES (199)..(199): Selenocysteine
  MOD_RES (208)..(208): Selenocysteine
  MOD_RES (230)..(230): Selenocysteine
  MOD_RES (285)..(285): Selenocysteine
  MOD_RES (287)..(287): Selenocysteine
MKLPIFIADAFXARAFRGNPAAVCLLENELDEDMHQKIAREMNLSEXAFIRKLHPXDNFAQSSCFGLRWFXPASEVPLCGHAXLASAAVLFHKIKNMNSXLXFVXLSGELRARRAEDGIVLDLPLYPAHPQDFHEVEDLIKXAIGNXLVQDICYSPDXQKLLVRLSDVYNRSFLENLKVNXENLLQVENXGKVKGLILXLKGEPGGQXQAFDFYSRYFAPWVGVAEDPVXGSAHAVLSSYWSQHLGKKEMHAFQCSHRGGELGISLRPDGRVDIRGGAAVVLEGXLXA

SEQ ID NO: 19478 - protein, 280 aa, Homo sapiens
  MOD_RES (12)..(12): Selenocysteine
  MOD_RES (47)..(47): Selenocysteine
  MOD_RES (56)..(56): Selenocysteine
  MOD_RES (71)..(71): Selenocysteine
  MOD_RES (83)..(83): Selenocysteine
  MOD_RES (100)..(100): Selenocysteine
  MOD_RES (102)..(102): Selenocysteine
  MOD_RES (105)..(105): Selenocysteine
  MOD_RES (142)..(142): Selenocysteine
  MOD_RES (147)..(147): Selenocysteine
  MOD_RES (158)..(158): Selenocysteine
  MOD_RES (181)..(181): Selenocysteine
  MOD_RES (190)..(190): Selenocysteine
  MOD_RES (199)..(199): Selenocysteine
  MOD_RES (208)..(208): Selenocysteine
  MOD_RES (230)..(230): Selenocysteine
  MOD_RES (254)..(254): Selenocysteine
  MOD_RES (275)..(275): Selenocysteine
MKLPIFIADAFXARAFRGNPAAVCLLENELDEDMHQKIAREMNLSEXAFIRKLHPXDNFAQSSCFGLRWFXPASEVPLCGHAXLASAAVLFHKIKNMNSXLXFVXLSGELRARRAEDGIVLDLPLYPAHPQDFHEVEDLIKXAIGNXLVQDICYSPDXQKLLVRLSDVYNRSFLENLKVNXENLLQVENXGKVKGLILXLKGEPGGQXQAFDFYSRYFAPWVGVAEDPVXGSAHAVLSSYWSQHLGKKEMHGRXALYQFLFYLPNSKLVFLLICXIPLKM

SEQ ID NO: 19479 - protein, 90 aa, Homo sapiens
  MOD_RES (1)..(1): Any amino acid
  MOD_RES (22)..(22): Selenocysteine
  MOD_RES (31)..(31): Selenocysteine
  MOD_RES (40)..(40): Selenocysteine
  MOD_RES (49)..(49): Selenocysteine
  MOD_RES (71)..(71): Selenocysteine
  MOD_RES (73)..(73): Selenocysteine
  MOD_RES (75)..(75): Selenocysteine
  MOD_RES (85)..(85): Selenocysteine
XLLVRLSDVYNRSFLENLKVNXENLLQVENXGKVKGLILXLKGEPGGQXQAFDFYSRYFAPWVGVAEDPVXGXKXKNQDESRKLXQKSMY

SEQ ID NO: 19480 - protein, 1085 aa, Homo sapiens
  MOD_RES (57)..(57): Selenocysteine
  MOD_RES (91)..(91): Selenocysteine
  MOD_RES (116)..(116): Selenocysteine
  MOD_RES (118)..(118): Selenocysteine
  MOD_RES (141)..(141): Selenocysteine
  MOD_RES (176)..(176): Selenocysteine
  MOD_RES (205)..(205): Selenocysteine
  MOD_RES (245)..(245): Selenocysteine
  MOD_RES (255)..(255): Selenocysteine
  MOD_RES (271)..(271): Selenocysteine
  MOD_RES (290)..(290): Selenocysteine
  MOD_RES (321)..(321): Selenocysteine
  MOD_RES (336)..(336): Selenocysteine
  MOD_RES (379)..(379): Selenocysteine
  MOD_RES (388)..(388): Selenocysteine
  MOD_RES (448)..(448): Selenocysteine
  MOD_RES (451)..(451): Selenocysteine
  MOD_RES (460)..(460): Selenocysteine
  MOD_RES (615)..(615): Selenocysteine
  MOD_RES (632)..(632): Selenocysteine
  MOD_RES (658)..(658): Selenocysteine
  MOD_RES (696)..(696): Selenocysteine
  MOD_RES (718)..(718): Selenocysteine
  MOD_RES (734)..(734): Selenocysteine
  MOD_RES (780)..(780): Selenocysteine
  MOD_RES (816)..(816): Selenocysteine
  MOD_RES (853)..(854): Selenocysteine
  MOD_RES (904)..(904): Selenocysteine
  MOD_RES (962)..(962): Selenocysteine
  MOD_RES (967)..(967): Selenocysteine
  MOD_RES (1025)..(1025): Selenocysteine
  MOD_RES (1035)..(1035): Selenocysteine
  MOD_RES (1071)..(1071): Selenocysteine
IRDYKDEQGRLLCELFIRAPKRRNQPDYYEVVSQPIDLMKIQQKLKMEEYDDVNLLXADFQLLFNNAKSYYKPDSPEYKAACKLWDLYLRXRNEFVQKGEADDEDDDEDGQDNQGXVXEGSSPAYLKEILEQLLEAIVVAXNPSGRLISELFQKLPSKVQYPDYYAIIKEPIDLKXIAQRIQNGSYKSIHAMAKDIDLLAKNAKXYNEPGSQVFKDANSIKKIFYMKKAEIEHHEMAKSSLRMRXPSNLAAARLXGPSHSKGSLGEERNPXSKYYRNKRAVQGGRLSAIXMALQYGSESEEDAALAAARYEEGESEAESIXSFMDVSNPFYQLYDXVRSCRNNQGQLIAEPFYHLPSKKKYPDYYQQIKMPISLQQIRXKLKNQEYEXLDHLECDLNLMFENAKRYNVPNSAIYKRVLKLQQVMQAKKKELARRDDIEDGDSMISSAXSDXGSAKRKRNXHDSEMLGLRRLSSKKNIRKQRMKILFNVVLEAREPGSGRRLCDLFMVKPSKKDYPDYYKIILEPMDLKIIEHNIRNDKYAGEEGMIEDMKLMFRNARHYNEEGSQVYNDAHILEKLLKEKRKELGPLPDDDDMASPKLKLSRKSGISPKKSKYMXPMQQKLNEVYEAVKNYXDKRGRRLSAIFLRLPSRSELPDYYLXIKKPMDMEKIRSHMMANKYQDIDSMVEDFVMMFNNACXYNEPESLIYKDALVLHKVLLEXRRDLEGDEDSHVPNVXLLIQELIHNLFVSVMSHQDDEGRCYSDSLAEIPAVDPNFPNKPPLXFDIIRKNVENNRYRRLDLFQEHMFEVLERARRMNRXDSEIYEDAVELQQFFIKIRDELCKNGEILLSPALSYXXKHLHNDVEKERKEKLPKEIEEDKLKREEEKRAEKSEDSSGAAGLSGLHRXYSQDCSFKNSMYHVGDYVYVEPAEANLQPHIVCIERLWEDSAGEKWLYGCWFYRPNEXFHLAXRKFLEKEVFKSDYYNKVPVSKILGKCVVMFVKEYFKLCPENFRDEDVFVCESRYSAKXKSFKKIKLWXMPISSVRFVPRDVPLPVVRVASVFANADKGDDEKNXDNSEDSRAEDNFNL

SEQ ID NO: 19481 - protein, 26 aa, Homo sapiens
  MOD_RES (9)..(9): Selenocysteine
MGSKRRRAXSPSSSVSGDFDDGHHSV

SEQ ID NO: 19482 - protein, 43 aa, Homo sapiens
  MOD_RES (9)..(9): Selenocysteine
  MOD_RES (28)..(28): Selenocysteine
  MOD_RES (43)..(43): Selenocysteine
MGSKRRRAXSPSSSVSGDFDDGHHSVSXPGPSRKRRRLSNLPX

SEQ ID NO: 19483 - protein, 87 aa, Homo sapiens
  MOD_RES (9)..(9): Selenocysteine
  MOD_RES (28)..(28): Selenocysteine
  MOD_RES (43)..(43): Selenocysteine
  MOD_RES (56)..(56): Selenocysteine
MGSKRRRAXSPSSSVSGDFDDGHHSVSXPGPSRKRRRLSNLPXVDPIAVCHELYNXIRDYKDEQGRLLCELFIRAPKRRNQPDYYEV

SEQ ID NO: 19484 - protein, 118 aa, Homo sapiens
  MOD_RES (9)..(9): Selenocysteine
  MOD_RES (28)..(28): Selenocysteine
  MOD_RES (43)..(43): Selenocysteine
  MOD_RES (56)..(56): Selenocysteine
  MOD_RES (113)..(113): Selenocysteine
MGSKRRRAXSPSSSVSGDFDDGHHSVSXPGPSRKRRRLSNLPXVDPIAVCHELYNXIRDYKDEQGRLLCELFIRAPKRRNQPDYYEVVSQPIDLMKIQQKLKMEEYDDVNLLXADFQL

SEQ ID NO: 19485 - protein, 152 aa, Homo sapiens
  MOD_RES (9)..(9): Selenocysteine
  MOD_RES (28)..(28): Selenocysteine
  MOD_RES (43)..(43): Selenocysteine
  MOD_RES (56)..(56): Selenocysteine
  MOD_RES (113)..(113): Selenocysteine
  MOD_RES (147)..(147): Selenocysteine
MGSKRRRAXSPSSSVSGDFDDGHHSVSXPGPSRKRRRLSNLPXVDPIAVCHELYNXIRDYKDEQGRLLCELFIRAPKRRNQPDYYEVVSQPIDLMKIQQKLKMEEYDDVNLLXADFQLLFNNAKSYYKPDSPEYKAACKLWDLYLRXRNEFV

SEQ ID NO: 19486 - protein, 230 aa, Homo sapiens
  MOD_RES (9)..(9): Selenocysteine
  MOD_RES (28)..(28): Selenocysteine
  MOD_RES (43)..(43): Selenocysteine
  MOD_RES (56)..(56): Selenocysteine
  MOD_RES (113)..(113): Selenocysteine
  MOD_RES (147)..(147): Selenocysteine
  MOD_RES (172)..(172): Selenocysteine
  MOD_RES (174)..(174): Selenocysteine
  MOD_RES (197)..(197): Selenocysteine
MGSKRRRAXSPSSSVSGDFDDGHHSVSXPGPSRKRRRLSNLPXVDPIAVCHELYNXIRDYKDEQGRLLCELFIRAPKRRNQPDYYEVVSQPIDLMKIQQKLKMEEYDDVNLLXADFQLLFNNAKSYYKPDSPEYKAACKLWDLYLRXRNEFVQKGEADDEDDDEDGQDNQGXVXEGSSPAYLKEILEQLLEAIVVAXNPSGRLISELFQKLPSKVQYPDYYAIIKEPIDL

SEQ ID NO: 19487 - protein, 856 aa, Homo sapiens
  MOD_RES (9)..(9): Selenocysteine
  MOD_RES (28)..(28): Selenocysteine
  MOD_RES (43)..(43): Selenocysteine
  MOD_RES (56)..(56): Selenocysteine
  MOD_RES (113)..(113): Selenocysteine
  MOD_RES (147)..(147): Selenocysteine
  MOD_RES (172)..(172): Selenocysteine
  MOD_RES (174)..(174): Selenocysteine
  MOD_RES (197)..(197): Selenocysteine
  MOD_RES (232)..(232): Selenocysteine
  MOD_RES (261)..(261): Selenocysteine
  MOD_RES (301)..(301): Selenocysteine
  MOD_RES (311)..(311): Selenocysteine
  MOD_RES (327)..(327): Selenocysteine
  MOD_RES (346)..(346): Selenocysteine
  MOD_RES (377)..(377): Selenocysteine
  MOD_RES (392)..(392): Selenocysteine
  MOD_RES (435)..(435): Selenocysteine
  MOD_RES (444)..(444): Selenocysteine
  MOD_RES (504)..(504): Selenocysteine
  MOD_RES (507)..(507): Selenocysteine
  MOD_RES (656)..(656): Selenocysteine
  MOD_RES (673)..(673): Selenocysteine
  MOD_RES (699)..(699): Selenocysteine
  MOD_RES (737)..(737): Selenocysteine
  MOD_RES (759)..(759): Selenocysteine
  MOD_RES (775)..(775): Selenocysteine
  MOD_RES (821)..(821): Selenocysteine
MGSKRRRAXSPSSSVSGDFDDGHHSVSXPGPSRKRRRLSNLPXVDPIAVCHELYNXIRDYKDEQGRLLCELFIRAPKRRNQPDYYEVVSQPIDLMKIQQKLKMEEYDDVNLLXADFQLLFNNAKSYYKPDSPEYKAACKLWDLYLRXRNEFVQKGEADDEDDDEDGQDNQGXVXEGSSPAYLKEILEQLLEAIVVAXNPSGRLISELFQKLPSKVQYPDYYAIIKEPIDLKXIAQRIQNGSYKSIHAMAKDIDLLAKNAKXYNEPGSQVFKDANSIKKIFYMKKAEIEHHEMAKSSLRMRXPSNLAAARLXGPSHSKGSLGEERNPXSKYYRNKRAVQGGRLSAIXMALQYGSESEEDAALAAARYEEGESEAESIXSFMDVSNPFYQLYDXVRSCRNNQGQLIAEPFYHLPSKKKYPDYYQQIKMPISLQQIRXKLKNQEYEXLDHLECDLNLMFENAKRYNVPNSAIYKRVLKLQQVMQAKKKELARRDDIEDGDSMISSAXSDXGSAKRKSKKNIRKQRMKILFNVVLEAREPGSGRRLCDLFMVKPSKKDYPDYYKIILEPMDLKIIEHNIRNDKYAGEEGMIEDMKLMFRNARHYNEEGSQVYNDAHILEKLLKEKRKELGPLPDDDDMASPKLKLSRKSGISPKKSKYMXPMQQKLNEVYEAVKNYXDKRGRRLSAIFLRLPSRSELPDYYLXIKKPMDMEKIRSHMMANKYQDIDSMVEDFVMMFNNACXYNEPESLIYKDALVLHKVLLEXRRDLEGDEDSHVPNVXLLIQELIHNLFVSVMSHQDDEGRCYSDSLAEIPAVDPNFPNKPPLXFDIIRKNVENNRYRRLDLFQEHMFEVLERARRMNR

SEQ ID NO: 19488 - protein, 1461 aa, Homo sapiens
  MOD_RES (9)..(9): Selenocysteine
  MOD_RES (28)..(28): Selenocysteine
  MOD_RES (43)..(43): Selenocysteine
  MOD_RES (56)..(56): Selenocysteine
  MOD_RES (113)..(113): Selenocysteine
  MOD_RES (147)..(147): Selenocysteine
  MOD_RES (172)..(172): Selenocysteine
  MOD_RES (174)..(174): Selenocysteine
  MOD_RES (197)..(197): Selenocysteine
  MOD_RES (232)..(232): Selenocysteine
  MOD_RES (261)..(261): Selenocysteine
  MOD_RES (301)..(301): Selenocysteine
  MOD_RES (311)..(311): Selenocysteine
  MOD_RES (327)..(327): Selenocysteine
  MOD_RES (346)..(346): Selenocysteine
  MOD_RES (377)..(377): Selenocysteine
  MOD_RES (392)..(392): Selenocysteine
  MOD_RES (435)..(435): Selenocysteine
  MOD_RES (444)..(444): Selenocysteine
  MOD_RES (504)..(504): Selenocysteine
  MOD_RES (507)..(507): Selenocysteine
  MOD_RES (656)..(656): Selenocysteine
  MOD_RES (673)..(673): Selenocysteine
  MOD_RES (699)..(699): Selenocysteine
  MOD_RES (737)..(737): Selenocysteine
  MOD_RES (759)..(759): Selenocysteine
  MOD_RES (775)..(775): Selenocysteine
  MOD_RES (821)..(821): Selenocysteine
  MOD_RES (857)..(857): Selenocysteine
  MOD_RES (894)..(895): Selenocysteine
  MOD_RES (945)..(945): Selenocysteine
  MOD_RES (1003)..(1003): Selenocysteine
  MOD_RES (1008)..(1008): Selenocysteine
  MOD_RES (1066)..(1066): Selenocysteine
  MOD_RES (1076)..(1076): Selenocysteine
  MOD_RES (1112)..(1112): Selenocysteine
  MOD_RES (1201)..(1201): Selenocysteine
  MOD_RES (1206)..(1206): Selenocysteine
  MOD_RES (1222)..(1222): Selenocysteine
  MOD_RES (1226)..(1226): Selenocysteine
  MOD_RES (1246)..(1246): Selenocysteine
  MOD_RES (1346)..(1346): Selenocysteine
  MOD_RES (1358)..(1358): Selenocysteine
  MOD_RES (1363)..(1363): Selenocysteine
  MOD_RES (1414)..(1414): Selenocysteine
  MOD_RES (1421)..(1421): Selenocysteine
MGSKRRRAXSPSSSVSGDFDDGHHSVSXPGPSRKRRRLSNLPXVDPIAVCHELYNXIRDYKDEQGRLLCELFIRAPKRRNQPDYYEVVSQPIDLMKIQQKLKMEEYDDVNLLXADFQLLFNNAKSYYKPDSPEYKAACKLWDLYLRXRNEFVQKGEADDEDDDEDGQDNQGXVXEGSSPAYLKEILEQLLEAIVVAXNPSGRLISELFQKLPSKVQYPDYYAIIKEPIDLKXIAQRIQNGSYKSIHAMAKDIDLLAKNAKXYNEPGSQVFKDANSIKKIFYMKKAEIEHHEMAKSSLRMRXPSNLAAARLXGPSHSKGSLGEERNPXSKYYRNKRAVQGGRLSAIXMALQYGSESEEDAALAAARYEEGESEAESIXSFMDVSNPFYQLYDXVRSCRNNQGQLIAEPFYHLPSKKKYPDYYQQIKMPISLQQIRXKLKNQEYEXLDHLECDLNLMFENAKRYNVPNSAIYKRVLKLQQVMQAKKKELARRDDIEDGDSMISSAXSDXGSAKRKSKKNIRKQRMKILFNVVLEAREPGSGRRLCDLFMVKPSKKDYPDYYKIILEPMDLKIIEHNIRNDKYAGEEGMIEDMKLMFRNARHYNEEGSQVYNDAHILEKLLKEKRKELGPLPDDDDMASPKLKLSRKSGISPKKSKYMXPMQQKLNEVYEAVKNYXDKRGRRLSAIFLRLPSRSELPDYYLXIKKPMDMEKIRSHMMANKYQDIDSMVEDFVMMFNNACXYNEPESLIYKDALVLHKVLLEXRRDLEGDEDSHVPNVXLLIQELIHNLFVSVMSHQDDEGRCYSDSLAEIPAVDPNFPNKPPLXFDIIRKNVENNRYRRLDLFQEHMFEVLERARRMNRXDSEIYEDAVELQQFFIKIRDELCKNGEILLSPALSYXXKHLHNDVEKERKEKLPKEIEEDKLKREEEKRAEKSEDSSGAAGLSGLHRXYSQDCSFKNSMYHVGDYVYVEPAEANLQPHIVCIERLWEDSAGEKWLYGCWFYRPNEXFHLAXRKFLEKEVFKSDYYNKVPVSKILGKCVVMFVKEYFKLCPENFRDEDVFVCESRYSAKXKSFKKIKLWXMPISSVRFVPRDVPLPVVRVASVFANADKGDDEKNXDNSEDSRAEDNFNLEKEKEDVPVEMSNGEPGCHYFEQLHYNDMWLKVGDCVFIKSHGLVRPRVGRIEKVWVRDGAAYFYGPIFIHPEEXEHEPXKMFYKKEVFLSNLEEXCPMXCILGKCAVLSFKDFLSCRPXEIPENDILLCESRYNESDKQMKKFKGLKRFSLSAKVVDDEIYYFRKPIVPQKEPSPLLEKKIQLLEAKFAELEGGDDDIEEMGEEDSEVIEPPSLPQLQXPLASELDLMPYXPPQSXPKSAKGSAKKEGSKRKINMSGYILFSSEMRAVIKAQHPDYSFGELSRLVGXEWRNLEXAKKAEYEGMMGGYPPGLPPLQGPVDGLVSMGSMQPLHPGG

SEQ ID NO: 19489 - protein, 1582 aa, Homo sapiens
  MOD_RES (9)..(9): Selenocysteine
  MOD_RES (28)..(28): Selenocysteine
  MOD_RES (43)..(43): Selenocysteine
  MOD_RES (56)..(56): Selenocysteine
  MOD_RES (113)..(113): Selenocysteine
  MOD_RES (147)..(147): Selenocysteine
  MOD_RES (172)..(172): Selenocysteine
  MOD_RES (174)..(174): Selenocysteine
  MOD_RES (197)..(197): Selenocysteine
  MOD_RES (232)..(232): Selenocysteine
  MOD_RES (261)..(261): Selenocysteine
  MOD_RES (301)..(301): Selenocysteine
  MOD_RES (311)..(311): Selenocysteine
  MOD_RES (327)..(327): Selenocysteine
  MOD_RES (346)..(346): Selenocysteine
  MOD_RES (377)..(377): Selenocysteine
  MOD_RES (392)..(392): Selenocysteine
  MOD_RES (435)..(435): Selenocysteine
  MOD_RES (444)..(444): Selenocysteine
  MOD_RES (504)..(504): Selenocysteine
  MOD_RES (507)..(507): Selenocysteine
  MOD_RES (656)..(656): Selenocysteine
  MOD_RES (673)..(673): Selenocysteine
  MOD_RES (699)..(699): Selenocysteine
  MOD_RES (737)..(737): Selenocysteine
  MOD_RES (759)..(759): Selenocysteine
  MOD_RES (775)..(775): Selenocysteine
  MOD_RES (821)..(821): Selenocysteine
  MOD_RES (857)..(857): Selenocysteine
  MOD_RES (894)..(895): Selenocysteine
  MOD_RES (946)..(946): Selenocysteine
  MOD_RES (1004)..(1004): Selenocysteine
  MOD_RES (1009)..(1009): Selenocysteine
  MOD_RES (1067)..(1067): Selenocysteine
  MOD_RES (1077)..(1077): Selenocysteine
  MOD_RES (1113)..(1113): Selenocysteine
  MOD_RES (1202)..(1202): Selenocysteine
  MOD_RES (1207)..(1207): Selenocysteine
  MOD_RES (1223)..(1223): Selenocysteine
  MOD_RES (1227)..(1227): Selenocysteine
  MOD_RES (1247)..(1247): Selenocysteine
  MOD_RES (1347)..(1347): Selenocysteine
  MOD_RES (1359)..(1359): Selenocysteine
  MOD_RES (1364)..(1364): Selenocysteine
  MOD_RES (1415)..(1415): Selenocysteine
  MOD_RES (1422)..(1422): Selenocysteine
  MOD_RES (1442)..(1442): Selenocysteine
  MOD_RES (1483)..(1484): Selenocysteine
  MOD_RES (1494)..(1494): Selenocysteine
  MOD_RES (1523)..(1523): Selenocysteine
  MOD_RES (1553)..(1554): Selenocysteine
  MOD_RES (1570)..(1570): Selenocysteine
MGSKRRRAXSPSSSVSGDFDDGHHSVSXPGPSRKRRRLSNLPXVDPIAVCHELYNXIRDYKDEQGRLLCELFIRAPKRRNQPDYYEVVSQPIDLMKIQQKLKMEEYDDVNLLXADFQLLFNNAKSYYKPDSPEYKAACKLWDLYLRXRNEFVQKGEADDEDDDEDGQDNQGXVXEGSSPAYLKEILEQLLEAIVVAXNPSGRLISELFQKLPSKVQYPDYYAIIKEPIDLKXIAQRIQNGSYKSIHAMAKDIDLLAKNAKXYNEPGSQVFKDANSIKKIFYMKKAEIEHHEMAKSSLRMRXPSNLAAARLXGPSHSKGSLGEERNPXSKYYRNKRAVQGGRLSAIXMALQYGSESEEDAALAAARYEEGESEAESIXSFMDVSNPFYQLYDXVRSCRNNQGQLIAEPFYHLPSKKKYPDYYQQIKMPISLQQIRXKLKNQEYEXLDHLECDLNLMFENAKRYNVPNSAIYKRVLKLQQVMQAKKKELARRDDIEDGDSMISSAXSDXGSAKRKSKKNIRKQRMKILFNVVLEAREPGSGRRLCDLFMVKPSKKDYPDYYKIILEPMDLKIIEHNIRNDKYAGEEGMIEDMKLMFRNARHYNEEGSQVYNDAHILEKLLKEKRKELGPLPDDDDMASPKLKLSRKSGISPKKSKYMXPMQQKLNEVYEAVKNYXDKRGRRLSAIFLRLPSRSELPDYYLXIKKPMDMEKIRSHMMANKYQDIDSMVEDFVMMFNNACXYNEPESLIYKDALVLHKVLLEXRRDLEGDEDSHVPNVXLLIQELIHNLFVSVMSHQDDEGRCYSDSLAEIPAVDPNFPNKPPLXFDIIRKNVENNRYRRLDLFQEHMFEVLERARRMNRXDSEIYEDAVELQQFFIKIRDELCKNGEILLSPALSYXXKHLHNDVEKERKEKLPKEIEEDKLKREEEKREAEKSEDSSGAAGLSGLHRXYSQDCSFKNSMYHVGDYVYVEPAEANLQPHIVCIERLWEDSAGEKWLYGCWFYRPNEXFHLAXRKFLEKEVFKSDYYNKVPVSKILGKCVVMFVKEYFKLCPENFRDEDVFVCESRYSAKXKSFKKIKLWXMPISSVRFVPRDVPLPVVRVASVFANADKGDDEKNXDNSEDSRAEDNFNLEKEKEDVPVEMSNGEPGCHYFEQLHYNDMWLKVGDCVFIKSHGLVRPRVGRIEKVWVRDGAAYFYGPIFIHPEEXEHEPXKMFYKKEVFLSNLEEXCPMXCILGKCAVLSFKDFLSCRPXEIPENDILLCESRYNESDKQMKKFKGLKRFSLSAKVVDDEIYYFRKPIVPQKEPSPLLEKKIQLLEAKFAELEGGDDDIEEMGEEDSEVIEPPSLPQLQXPLASELDLMPYXPPQSXPKSAKGSAKKEGSKRKINMSGYILFSSEMRAVIKAQHPDYSFGELSRLVGXEWRNLEXAKKAEYEGVMNQGVAPMVGXPAPGGSPYGQQVGVLGPPGQQAPPPYPGPHPAGPPVIQQPXXPMFVAPPPKXQRLLHSEAYLKYIEGLSAESNSISKWDQXLAARRRDVHLSKEQESRLPSHWLKSKGAHXXMADALWRLRDLMLRDXLNIRQAYNLENV

SEQ ID NO: 19490 - protein, 1582 aa, Homo sapiens
  MOD_RES (9)..(9): Selenocysteine
  MOD_RES (28)..(28): Selenocysteine
  MOD_RES (43)..(43): Selenocysteine
  MOD_RES (56)..(56): Selenocysteine
  MOD_RES (113)..(113): Selenocysteine
  MOD_RES (147)..(147): Selenocysteine
  MOD_RES (172)..(172): Selenocysteine
  MOD_RES (174)..(174): Selenocysteine
  MOD_RES (197)..(197): Selenocysteine
  MOD_RES (232)..(232): Selenocysteine
  MOD_RES (261)..(261): Selenocysteine
  MOD_RES (301)..(301): Selenocysteine
  MOD_RES (311)..(311): Selenocysteine
  MOD_RES (327)..(327): Selenocysteine
  MOD_RES (346)..(346): Selenocysteine
  MOD_RES (377)..(377): Selenocysteine
  MOD_RES (392)..(392): Selenocysteine
  MOD_RES (435)..(435): Selenocysteine
  MOD_RES (444)..(444): Selenocysteine
  MOD_RES (504)..(504): Selenocysteine
  MOD_RES (507)..(507): Selenocysteine
  MOD_RES (656)..(656): Selenocysteine
  MOD_RES (673)..(673): Selenocysteine
  MOD_RES (699)..(699): Selenocysteine
  MOD_RES (737)..(737): Selenocysteine
  MOD_RES (759)..(759): Selenocysteine
  MOD_RES (775)..(775): Selenocysteine
  MOD_RES (821)..(821): Selenocysteine
  MOD_RES (857)..(857): Selenocysteine
  MOD_RES (894)..(895): Selenocysteine
  MOD_RES (946)..(946): Selenocysteine
  MOD_RES (1042)..(1042): Selenocysteine
  MOD_RES (1052)..(1052): Selenocysteine
  MOD_RES (1088)..(1088): Selenocysteine
  MOD_RES (1177)..(1177): Selenocysteine
  MOD_RES (1182)..(1182): Selenocysteine
  MOD_RES (1198)..(1198): Selenocysteine
  MOD_RES (1202)..(1202): Selenocysteine
  MOD_RES (1222)..(1222): Selenocysteine
  MOD_RES (1312)..(1312): Selenocysteine
  MOD_RES (1363)..(1363): Selenocysteine
  MOD_RES (1370)..(1370): Selenocysteine
  MOD_RES (1442)..(1442): Selenocysteine
  MOD_RES (1483)..(1484): Selenocysteine
  MOD_RES (1494)..(1494): Selenocysteine
  MOD_RES (1523)..(1523): Selenocysteine
  MOD_RES (1553)..(1554): Selenocysteine
  MOD_RES (1570)..(1570): Selenocysteine
MGSKRRRAXSPSSSVSGDFDDGHHSVSXPGPSRKRRRLSNLPXVDPIAVCHELYNXIRDYKDEQGRLLCELFIRAPKRRNQPDYYEVVSQPIDLMKIQQKLKMEEYDDVNLLXADFQLLFNNAKSYYKPDSPEYKAACKLWDLYLRXRNEFVQKGEADDEDDDEDGQDNQGXVXEGSSPAYLKEILEQLLEAIVVAXNPSGRLISELFQKLPSKVQYPDYYAIIKEPIDLKXIAQRIQNGSYKSIHAMAKDIDLLAKNAKXYNEPGSQVFKDANSIKKIFYMKKAEIEHHEMAKSSLRMRXPSNLAAARLXGPSHSKGSLGEERNPXSKYYRNKRAVQGGRLSAIXMALQYGSESEEDAALAAARYEEGESEAESIXSFMDVSNPFYQLYDXVRSCRNNQGQLIAEPFYHLPSKKKYPDYYQQIKMPISLQQIRXKLKNQEYEXLDHLECDLNLMFENAKRYNVPNSAIYKRVLKLQQVMQAKKKELARRDDIEDGDSMISSAXSDXGSAKRKSKKNIRKQRMKILFNVVLEAREPGSGRRLCDLFMVKPSKKDYPDYYKIILEPMDLKIIEHNIRNDKYAGEEGMIEDMKLMFRNARHYNEEGSQVYNDAHILEKLLKEKRKELGPLPDDDDMASPKLKLSRKSGISPKKSKYMXPMQQKLNEVYEAVKNYXDKRGRRLSAIFLRLPSRSELPDYYLXIKKPMDMEKIRSHMMANKYQDIDSMVEDFVMMFNNACXYNEPESLIYKDALVLHKVLLEXRRDLEGDEDSHVPNVXLLIQELIHNLFVSVMSHQDDEGRCYSDSLAEIPAVDPNFPNKPPLXFDIIRKNVENNRYRRLDLFQEHMFEVLERARRMNRXDSEIYEDAVELQQFFIKIRDELCKNGEILLSPALSYXXKHLHNDVEKERKEKLPKEIEEDKLKREEEKREAEKSEDSSGAAGLSGLHRXYSQDCSFKNSMYHVGDYVYVEPAEANLQPHIVCIERLWEDSAEKEVFKSDYYNKVPVSKILGKCVVMFVKEYFKLCPENFRDEDVFVCESRYSAKXKSFKKIKLWXMPISSVRFVPRDVPLPVVRVASVFANADKGDDEKNXDNSEDSRAEDNFNLEKEKEDVPVEMSNGEPGCHYFEQLHYNDMWLKVGDCVFIKSHGLVRPRVGRIEKVWVRDGAAYFYGPIFIHPEEXEHEPXKMFYKKEVFLSNLEEXCPMXCILGKCAVLSFKDFLSCRPXEIPENDILLCESRYNESDKQMKKFKGLKRFSLSAKVVDDEIYYFRKPIVPQKEPSPLLEKKIQLLEAKFAELEGGDDDIEEMGEEDSESXPKSAKGSAKKEGSKRKINMSGYILFSSEMRAVIKAQHPDYSFGELSRLVGXEWRNLEXAKKAEYEGMMGGYPPGLPPLQGPVDGLVSMGSMQPLHPGGPPPHHLPPGVPGLPGIPPPGVMNQGVAPMVGXPAPGGSPYGQQVGVLGPPGQQAPPPYPGPHPAGPPVIQQPXXPMFVAPPPKXQRLLHSEAYLKYIEGLSAESNSISKWDQXLAARRRDVHLSKEQESRLPSHWLKSKGAHXXMADALWRLRDLMLRDXLNIRQAYNLENV

SEQ ID NO: 19491 - protein, 1597 aa, Homo sapiens
  MOD_RES (9)..(9): Selenocysteine
  MOD_RES (28)..(28): Selenocysteine
  MOD_RES (43)..(43): Selenocysteine
  MOD_RES (56)..(56): Selenocysteine
  MOD_RES (113)..(113): Selenocysteine
  MOD_RES (147)..(147): Selenocysteine
  MOD_RES (172)..(172): Selenocysteine
  MOD_RES (174)..(174): Selenocysteine
  MOD_RES (197)..(197): Selenocysteine
  MOD_RES (232)..(232): Selenocysteine
  MOD_RES (261)..(261): Selenocysteine
  MOD_RES (301)..(301): Selenocysteine
  MOD_RES (311)..(311): Selenocysteine
  MOD_RES (327)..(327): Selenocysteine
  MOD_RES (346)..(346): Selenocysteine
  MOD_RES (377)..(377): Selenocysteine
  MOD_RES (392)..(392): Selenocysteine
  MOD_RES (435)..(435): Selenocysteine
  MOD_RES (444)..(444): Selenocysteine
  MOD_RES (504)..(504): Selenocysteine
  MOD_RES (507)..(507): Selenocysteine
  MOD_RES (516)..(516): Selenocysteine
  MOD_RES (671)..(671): Selenocysteine
  MOD_RES (688)..(688): Selenocysteine
  MOD_RES (714)..(714): Selenocysteine
  MOD_RES (752)..(752): Selenocysteine
  MOD_RES (774)..(774): Selenocysteine
  MOD_RES (790)..(790): Selenocysteine
  MOD_RES (836)..(836): Selenocysteine
  MOD_RES (872)..(872): Selenocysteine
  MOD_RES (909)..(910): Selenocysteine
  MOD_RES (961)..(961): Selenocysteine
  MOD_RES (1019)..(1019): Selenocysteine
  MOD_RES (1024)..(1024): Selenocysteine
  MOD_RES (1082)..(1082): Selenocysteine
  MOD_RES (1092)..(1092): Selenocysteine
  MOD_RES (1128)..(1128): Selenocysteine
  MOD_RES (1217)..(1217): Selenocysteine
  MOD_RES (1222)..(1222): Selenocysteine
  MOD_RES (1238)..(1238): Selenocysteine
  MOD_RES (1242)..(1242): Selenocysteine
  MOD_RES (1262)..(1262): Selenocysteine
  MOD_RES (1362)..(1362): Selenocysteine
  MOD_RES (1374)..(1374): Selenocysteine
  MOD_RES (1379)..(1379): Selenocysteine
  MOD_RES (1430)..(1430): Selenocysteine
  MOD_RES (1437)..(1437): Selenocysteine
  MOD_RES (1457)..(1457): Selenocysteine
  MOD_RES (1498)..(1499): Selenocysteine
  MOD_RES (1509)..(1509): Selenocysteine
  MOD_RES (1538)..(1538): Selenocysteine
  MOD_RES (1568)..(1569): Selenocysteine
  MOD_RES (1585)..(1585): Selenocysteine
MGSKRRRAXSPSSSVSGDFDDGHHSVSXPGPSRKRRRLSNLPXVDPIAVCHELYNXIRDYKDEQGRLLCELFIRAPKRRNQPDYYEVVSQPIDLMKIQQKLKMEEYDDVNLLXADFQLLFNNAKSYYKPDSPEYKAACKLWDLYLRXRNEFVQKGEADDEDDDEDGQDNQGXVXEGSSPAYLKEILEQLLEAIVVAXNPSGRLISELFQKLPSKVQYPDYYAIIKEPIDLKXIAQRIQNGSYKSIHAMAKDIDLLAKNAKXYNEPGSQVFKDANSIKKIFYMKKAEIEHHEMAKSSLRMRXPSNLAAARLXGPSHSKGSLGEERNPXSKYYRNKRAVQGGRLSAIXMALQYGSESEEDAALAAARYEEGESEAESIXSFMDVSNPFYQLYDXVRSCRNNQGQLIAEPFYHLPSKKKYPDYYQQIKMPISLQQIRXKLKNQEYEXLDHLECDLNLMFENAKRYNVPNSAIYKRVLKLQQVMQAKKKELARRDDIEDGDSMISSAXSDXGSAKRKRNXHDSEMLGLRRLSSKKNIRKQRMKILFNVVLEAREPGSGRRLCDLFMVKPSKKDYPDYYKIILEPMDLKIIEHNIRNDKYAGEEGMIEDMKLMFRNARHYNEEGSQVYNDAHILEKLLKEKRKELGPLPDDDDMASPKLKLSRKSGISPKKSKYMXPMQQKLNEVYEAVKNYXDKRGRRLSAIFLRLPSRSELPDYYLXIKKPMDMEKIRSHMMANKYQDIDSMVEDFVMMFNNACXYNEPESLIYKDALVLHKVLLEXRRDLEGDEDSHVPNVXLLIQELIHNLFVSVMSHQDDEGRCYSDSLAEIPAVDPNFPNKPPLXFDIIRKNVENNRYRRLDLFQEHMFEVLERARRMNRXDSEIYEDAVELQQFFIKIRDELCKNGEILLSPALSYXXKHLHNDVEKERKEKLPKEIEEDKLKREEEKREAEKSEDSSGAAGLSGLHRXYSQDCSFKNSMYHVGDYVYVEPAEANLQPHIVCIERLWEDSAGEKWLYGCWFYRPNEXFHLAXRKFLEKEVFKSDYYNKVPVSKILGKCVVMFVKEYFKLCPENFRDEDVFVCESRYSAKXKSFKKIKLWXMPISSVRFVPRDVPLPVVRVASVFANADKGDDEKNXDNSEDSRAEDNFNLEKEKEDVPVEMSNGEPGCHYFEQLHYNDMWLKVGDCVFIKSHGLVRPRVGRIEKVWVRDGAAYFYGPIFIHPEEXEHEPXKMFYKKEVFLSNLEEXCPMXCILGKCAVLSFKDFLSCRPXEIPENDILLCESRYNESDKQMKKFKGLKRFSLSAKVVDDEIYYFRKPIVPQKEPSPLLEKKIQLLEAKFAELEGGDDDIEEMGEEDSEVIEPPSLPQLQXPLASELDLMPYXPPQSXPKSAKGSAKKEGSKRKINMSGYILFSSEMRAVIKAQHPDYSFGELSRLVGXEWRNLEXAKKAEYEGVMNQGVAPMVGXPAPGGSPYGQQVGVLGPPGQQAPPPYPGPHPAGPPVIQQPXXPMFVAPPPKXQRLLHSEAYLKYIEGLSAESNSISKWDQXLAARRRDVHLSKEQESRLPSHWLKSKGAHXXMADALWRLRDLMLRDXLNIRQAYNLENV

SEQ ID NO: 19492 - protein, 1602 aa, Homo sapiens
  MOD_RES (9)..(9): Selenocysteine
  MOD_RES (28)..(28): Selenocysteine
  MOD_RES (43)..(43): Selenocysteine
  MOD_RES (56)..(56): Selenocysteine
  MOD_RES (113)..(113): Selenocysteine
  MOD_RES (147)..(147): Selenocysteine
  MOD_RES (172)..(172): Selenocysteine
  MOD_RES (174)..(174): Selenocysteine
  MOD_RES (197)..(197): Selenocysteine
  MOD_RES (232)..(232): Selenocysteine
  MOD_RES (261)..(261): Selenocysteine
  MOD_RES (314)..(314): Selenocysteine
  MOD_RES (345)..(345): Selenocysteine
  MOD_RES (360)..(360): Selenocysteine
  MOD_RES (403)..(403): Selenocysteine
  MOD_RES (412)..(412): Selenocysteine
  MOD_RES (472)..(472): Selenocysteine
  MOD_RES (475)..(475): Selenocysteine
  MOD_RES (624)..(624): Selenocysteine
  MOD_RES (641)..(641): Selenocysteine
  MOD_RES (667)..(667): Selenocysteine
  MOD_RES (705)..(705): Selenocysteine
  MOD_RES (727)..(727): Selenocysteine
  MOD_RES (743)..(743): Selenocysteine
  MOD_RES (789)..(789): Selenocysteine
  MOD_RES (825)..(825): Selenocysteine
  MOD_RES (862)..(863): Selenocysteine
  MOD_RES (914)..(914): Selenocysteine
  MOD_RES (972)..(972): Selenocysteine
  MOD_RES (977)..(977): Selenocysteine
  MOD_RES (1035)..(1035): Selenocysteine
  MOD_RES (1045)..(1045): Selenocysteine
  MOD_RES (1081)..(1081): Selenocysteine
  MOD_RES (1170)..(1170): Selenocysteine
  MOD_RES (1175)..(1175): Selenocysteine
  MOD_RES (1191)..(1191): Selenocysteine
  MOD_RES (1195)..(1195): Selenocysteine
  MOD_RES (1215)..(1215): Selenocysteine
  MOD_RES (1315)..(1315): Selenocysteine
  MOD_RES (1327)..(1327): Selenocysteine
  MOD_RES (1332)..(1332): Selenocysteine
  MOD_RES (1383)..(1383): Selenocysteine
  MOD_RES (1390)..(1390): Selenocysteine
  MOD_RES (1462)..(1462): Selenocysteine
  MOD_RES (1503)..(1504): Selenocysteine
  MOD_RES (1514)..(1514): Selenocysteine
  MOD_RES (1543)..(1543): Selenocysteine
  MOD_RES (1573)..(1574): Selenocysteine
  MOD_RES (1590)..(1590): Selenocysteine
MGSKRRRAXSPSSSVSGDFDDGHHSVSXPGPSRKRRRLSNLPXVDPIAVCHELYNXIRDYKDEQGRLLCELFIRAPKRRNQPDYYEVVSQPIDLMKIQQKLKMEEYDDVNLLXADFQLLFNNAKSYYKPDSPEYKAACKLWDLYLRXRNEFVQKGEADDEDDDEDGQDNQGXVXEGSSPAYLKEILEQLLEAIVVAXNPSGRLISELFQKLPSKVQYPDYYAIIKEPIDLKXIAQRIQNGSYKSIHAMAKDIDLLAKNAKXYNEPGSQVFKDANSIKKIFYMKKAEIEHHEMAKSSLRMSNKRAVQGGRLSAIXMALQYGSESEEDAALAAARYEEGESEAESIXSFMDVSNPFYQLYDXVRSCRNNQGQLIAEPFYHLPSKKKYPDYYQQIKMPISLQQIRXKLKNQEYEXLDHLECDLNLMFENAKRYNVPNSAIYKRVLKLQQVMQAKKKELARRDDIEDGDSMISSAXSDXGSAKRKSKKNIRKQRMKILFNVVLEAREPGSGRRLCDLFMVKPSKKDYPDYYKIILEPMDLKIIEHNIRNDKYAGEEGMIEDMKLMFRNARHYNEEGSQVYNDAHILEKLLKEKRKELGPLPDDDDMASPKLKLSRKSGISPKKSKYMXPMQQKLNEVYEAVKNYXDKRGRRLSAIFLRLPSRSELPDYYLXIKKPMDMEKIRSHMMANKYQDIDSMVEDFVMMFNNACXYNEPESLIYKDALVLHKVLLEXRRDLEGDEDSHVPNVXLLIQELIHNLFVSVMSHQDDEGRCYSDSLAEIPAVDPNFPNKPPLXFDIIRKNVENNRYRRLDLFQEHMFEVLERARRMNRXDSEIYEDAVELQQFFIKIRDELCKNGEILLSPALSYXXKHLHNDVEKERKEKLPKEIEEDKLKREEEKREAEKSEDSSGAAGLSGLHRXYSQDCSFKNSMYHVGDYVYVEPAEANLQPHIVCIERLWEDSAGEKWLYGCWFYRPNEXFHLAXRKFLEKEVFKSDYYNKVPVSKILGKCVVMFVKEYFKLCPENFRDEDVFVCESRYSAKXKSFKKIKLWXMPISSVRFVPRDVPLPVVRVASVFANADKGDDEKNXDNSEDSRAEDNFNLEKEKEDVPVEMSNGEPGCHYFEQLHYNDMWLKVGDCVFIKSHGLVRPRVGRIEKVWVRDGAAYFYGPIFIHPEEXEHEPXKMFYKKEVFLSNLEEXCPMXCILGKCAVLSFKDFLSCRPXEIPENDILLCESRYNESDKQMKKFKGLKRFSLSAKVVDDEIYYFRKPIVPQKEPSPLLEKKIQLLEAKFAELEGGDDDIEEMGEEDSEVIEPPSLPQLQXPLASELDLMPYXPPQSXPKSAKGSAKKEGSKRKINMSGYILFSSEMRAVIKAQHPDYSFGELSRLVGXEWRNLEXAKKAEYEGMMGGYPPGLPPLQGPVDGLVSMGSMQPLHPGGPPPHHLPPGVPGLPGIPPPGVMNQGVAPMVGXPAPGGSPYGQQVGVLGPPGQQAPPPYPGPHPAGPPVIQQPXXPMFVAPPPKXQRLLHSEAYLKYIEGLSAESNSISKWDQXLAARRRDVHLSKEQESRLPSHWLKSKGAHXXMADALWRLRDLMLRDXLNIRQAYNLENV

SEQ ID NO: 19493 - protein, 1609 aa, Homo sapiens
  MOD_RES (9)..(9): Selenocysteine
  MOD_RES (28)..(28): Selenocysteine
  MOD_RES (43)..(43): Selenocysteine
  MOD_RES (56)..(56): Selenocysteine
  MOD_RES (113)..(113): Selenocysteine
  MOD_RES (147)..(147): Selenocysteine
  MOD_RES (172)..(172): Selenocysteine
  MOD_RES (174)..(174): Selenocysteine
  MOD_RES (197)..(197): Selenocysteine
  MOD_RES (232)..(232): Selenocysteine
  MOD_RES (261)..(261): Selenocysteine
  MOD_RES (301)..(301): Selenocysteine
  MOD_RES (311)..(311): Selenocysteine
  MOD_RES (327)..(327): Selenocysteine
  MOD_RES (346)..(346): Selenocysteine
  MOD_RES (377)..(377): Selenocysteine
  MOD_RES (392)..(392): Selenocysteine
  MOD_RES (435)..(435): Selenocysteine
  MOD_RES (444)..(444): Selenocysteine
  MOD_RES (504)..(504): Selenocysteine
  MOD_RES (507)..(507): Selenocysteine
  MOD_RES (656)..(656): Selenocysteine
  MOD_RES (673)..(673): Selenocysteine
  MOD_RES (699)..(699): Selenocysteine
  MOD_RES (737)..(737): Selenocysteine
  MOD_RES (759)..(759): Selenocysteine
  MOD_RES (775)..(775): Selenocysteine
  MOD_RES (821)..(821): Selenocysteine
  MOD_RES (857)..(857): Selenocysteine
  MOD_RES (894)..(895): Selenocysteine
  MOD_RES (946)..(946): Selenocysteine
  MOD_RES (1042)..(1042): Selenocysteine
  MOD_RES (1052)..(1052): Selenocysteine
  MOD_RES (1088)..(1088): Selenocysteine
  MOD_RES (1177)..(1177): Selenocysteine
  MOD_RES (1182)..(1182): Selenocysteine
  MOD_RES (1198)..(1198): Selenocysteine
  MOD_RES (1202)..(1202): Selenocysteine
  MOD_RES (1222)..(1222): Selenocysteine
  MOD_RES (1322)..(1322): Selenocysteine
  MOD_RES (1334)..(1334): Selenocysteine
  MOD_RES (1339)..(1339): Selenocysteine
  MOD_RES (1390)..(1390): Selenocysteine
  MOD_RES (1397)..(1397): Selenocysteine
  MOD_RES (1469)..(1469): Selenocysteine
  MOD_RES (1510)..(1511): Selenocysteine
  MOD_RES (1521)..(1521): Selenocysteine
  MOD_RES (1550)..(1550): Selenocysteine
  MOD_RES (1580)..(1581): Selenocysteine
  MOD_RES (1597)..(1597): Selenocysteine
MGSKRRRAXSPSSSVSGDFDDGHHSVSXPGPSRKRRRLSNLPXVDPIAVCHELYNXIRDYKDEQGRLLCELFIRAPKRRNQPDYYEVVSQPIDLMKIQQKLKMEEYDDVNLLXADFQLLFNNAKSYYKPDSPEYKAACKLWDLYLRXRNEFVQKGEADDEDDDEDGQDNQGXVXEGSSPAYLKEILEQLLEAIVVAXNPSGRLISELFQKLPSKVQYPDYYAIIKEPIDLKXIAQRIQNGSYKSIHAMAKDIDLLAKNAKXYNEPGSQVFKDANSIKKIFYMKKAEIEHHEMAKSSLRMRXPSNLAAARLXGPSHSKGSLGEERNPXSKYYRNKRAVQGGRLSAIXMALQYGSESEEDAALAAARYEEGESEAESIXSFMDVSNPFYQLYDXVRSCRNNQGQLIAEPFYHLPSKKKYPDYYQQIKMPISLQQIRXKLKNQEYEXLDHLECDLNLMFENAKRYNVPNSAIYKRVLKLQQVMQAKKKELARRDDIEDGDSMISSAXSDXGSAKRKSKKNIRKQRMKILFNVVLEAREPGSGRRLCDLFMVKPSKKDYPDYYKIILEPMDLKIIEHNIRNDKYAGEEGMIEDMKLMFRNARHYNEEGSQVYNDAHILEKLLKEKRKELGPLPDDDDMASPKLKLSRKSGISPKKSKYMXPMQQKLNEVYEAVKNYXDKRGRRLSAIFLRLPSRSELPDYYLXIKKPMDMEKIRSHMMANKYQDIDSMVEDFVMMFNNACXYNEPESLIYKDALVLHKVLLEXRRDLEGDEDSHVPNVXLLIQELIHNLFVSVMSHQDDEGRCYSDSLAEIPAVDPNFPNKPPLXFDIIRKNVENNRYRRLDLFQEHMFEVLERARRMNRXDSEIYEDAVELQQFFIKIRDELCKNGEILLSPALSYXXKHLHNDVEKERKEKLPKEIEEDKLKREEEKREAEKSEDSSGAAGLSGLHRXYSQDCSFKNSMYHVGDYVYVEPAEANLQPHIVCIERLWEDSAEKEVFKSDYYNKVPVSKILGKCVVMFVKEYFKLCPENFRDEDVFVCESRYSAKXKSFKKIKLWXMPISSVRFVPRDVPLPVVRVASVFANADKGDDEKNXDNSEDSRAEDNFNLEKEKEDVPVEMSNGEPGCHYFEQLHYNDMWLKVGDCVFIKSHGLVRPRVGRIEKVWVRDGAAYFYGPIFIHPEEXEHEPXKMFYKKEVFLSNLEEXCPMXCILGKCAVLSFKDFLSCRPXEIPENDILLCESRYNESDKQMKKFKGLKRFSLSAKVVDDEIYYFRKPIVPQKEPSPLLEKKIQLLEAKFAELEGGDDDIEEMGEEDSEVIEPPSLPQLQXPLASELDLMPYXPPQSXPKSAKGSAKKEGSKRKINMSGYILFSSEMRAVIKAQHPDYSFGELSRLVGXEWRNLEXAKKAEYEGMMGGYPPGLPPLQGPVDGLVSMGSMQPLHPGGPPPHHLPPGVPGLPGIPPPGVMNQGVAPMVGXPAPGGSPYGQQVGVLGPPGQQAPPPYPGPHPAGPPVIQQPXXPMFVAPPPKXQRLLHSEAYLKYIEGLSAESNSISKWDQXLAARRRDVHLSKEQESRLPSHWLKSKGAHXXMADALWRLRDLMLRDXLNIRQAYNLENV

SEQ ID NO: 19494 - protein, 1634 aa, Homo sapiens
  MOD_RES (9)..(9): Selenocysteine
  MOD_RES (28)..(28): Selenocysteine
  MOD_RES (43)..(43): Selenocysteine
  MOD_RES (56)..(56): Selenocysteine
  MOD_RES (113)..(113): Selenocysteine
  MOD_RES (147)..(147): Selenocysteine
  MOD_RES (172)..(172): Selenocysteine
  MOD_RES (174)..(174): Selenocysteine
  MOD_RES (197)..(197): Selenocysteine
  MOD_RES (232)..(232): Selenocysteine
  MOD_RES (261)..(261): Selenocysteine
  MOD_RES (301)..(301): Selenocysteine
  MOD_RES (311)..(311): Selenocysteine
  MOD_RES (327)..(327): Selenocysteine
  MOD_RES (346)..(346): Selenocysteine
  MOD_RES (377)..(377): Selenocysteine
  MOD_RES (392)..(392): Selenocysteine
  MOD_RES (435)..(435): Selenocysteine
  MOD_RES (444)..(444): Selenocysteine
  MOD_RES (504)..(504): Selenocysteine
  MOD_RES (507)..(507): Selenocysteine
  MOD_RES (656)..(656): Selenocysteine
  MOD_RES (673)..(673): Selenocysteine
  MOD_RES (699)..(699): Selenocysteine
  MOD_RES (737)..(737): Selenocysteine
  MOD_RES (759)..(759): Selenocysteine
  MOD_RES (775)..(775): Selenocysteine
  MOD_RES (821)..(821): Selenocysteine
  MOD_RES (857)..(857): Selenocysteine
  MOD_RES (894)..(895): Selenocysteine
  MOD_RES (946)..(946): Selenocysteine
  MOD_RES (1004)..(1004): Selenocysteine
  MOD_RES (1009)..(1009): Selenocysteine
  MOD_RES (1067)..(1067): Selenocysteine
  MOD_RES (1077)..(1077): Selenocysteine
  MOD_RES (1113)..(1113): Selenocysteine
  MOD_RES (1202)..(1202): Selenocysteine
  MOD_RES (1207)..(1207): Selenocysteine
  MOD_RES (1223)..(1223): Selenocysteine
  MOD_RES (1227)..(1227): Selenocysteine
  MOD_RES (1247)..(1247): Selenocysteine
  MOD_RES (1347)..(1347): Selenocysteine
  MOD_RES (1359)..(1359): Selenocysteine
  MOD_RES (1364)..(1364): Selenocysteine
  MOD_RES (1415)..(1415): Selenocysteine
  MOD_RES (1422)..(1422): Selenocysteine
  MOD_RES (1494)..(1494): Selenocysteine
  MOD_RES (1535)..(1536): Selenocysteine
  MOD_RES (1546)..(1546): Selenocysteine
  MOD_RES (1575)..(1575): Selenocysteine
  MOD_RES (1605)..(1606): Selenocysteine
  MOD_RES (1622)..(1622): Selenocysteine
MGSKRRRAXSPSSSVSGDFDDGHHSVSXPGPSRKRRRLSNLPXVDPIAVCHELYNXIRDYKDEQGRLLCELFIRAPKRRNQPDYYEVVSQPIDLMKIQQKLKMEEYDDVNLLXADFQLLFNNAKSYYKPDSPEYKAACKLWDLYLRXRNEFVQKGEADDEDDDEDGQDNQGXVXEGSSPAYLKEILEQLLEAIVVAXNPSGRLISELFQKLPSKVQYPDYYAIIKEPIDLKXIAQRIQNGSYKSIHAMAKDIDLLAKNAKXYNEPGSQVFKDANSIKKIFYMKKAEIEHHEMAKSSLRMRXPSNLAAARLXGPSHSKGSLGEERNPXSKYYRNKRAVQGGRLSAIXMALQYGSESEEDAALAAARYEEGESEAESIXSFMDVSNPFYQLYDXVRSCRNNQGQLIAEPFYHLPSKKKYPDYYQQIKMPISLQQIRXKLKNQEYEXLDHLECDLNLMFENAKRYNVPNSAIYKRVLKLQQVMQAKKKELARRDDIEDGDSMISSAXSDXGSAKRKSKKNIRKQRMKILFNVVLEAREPGSGRRLCDLFMVKPSKKDYPDYYKIILEPMDLKIIEHNIRNDKYAGEEGMIEDMKLMFRNARHYNEEGSQVYNDAHILEKLLKEKRKELGPLPDDDDMASPKLKLSRKSGISPKKSKYMXPMQQKLNEVYEAVKNYXDKRGRRLSAIFLRLPSRSELPDYYLXIKKPMDMEKIRSHMMANKYQDIDSMVEDFVMMFNNACXYNEPESLIYKDALVLHKVLLEXRRDLEGDEDSHVPNVXLLIQELIHNLFVSVMSHQDDEGRCYSDSLAEIPAVDPNFPNKPPLXFDIIRKNVENNRYRRLDLFQEHMFEVLERARRMNRXDSEIYEDAVELQQFFIKIRDELCKNGEILLSPALSYXXKHLHNDVEKERKEKLPKEIEEDKLKREEEKREAEKSEDSSGAAGLSGLHRXYSQDCSFKNSMYHVGDYVYVEPAEANLQPHIVCIERLWEDSAGEKWLYGCWFYRPNEXFHLAXRKFLEKEVFKSDYYNKVPVSKILGKCVVMFVKEYFKLCPENFRDEDVFVCESRYSAKXKSFKKIKLWXMPISSVRFVPRDVPLPVVRVASVFANADKGDDEKNXDNSEDSRAEDNFNLEKEKEDVPVEMSNGEPGCHYFEQLHYNDMWLKVGDCVFIKSHGLVRPRVGRIEKVWVRDGAAYFYGPIFIHPEEXEHEPXKMFYKKEVFLSNLEEXCPMXCILGKCAVLSFKDFLSCRPXEIPENDILLCESRYNESDKQMKKFKGLKRFSLSAKVVDDEIYYFRKPIVPQKEPSPLLEKKIQLLEAKFAELEGGDDDIEEMGEEDSEVIEPPSLPQLQXPLASELDLMPYXPPQSXPKSAKGSAKKEGSKRKINMSGYILFSSEMRAVIKAQHPDYSFGELSRLVGXEWRNLEXAKKAEYEGMMGGYPPGLPPLQGPVDGLVSMGSMQPLHPGGPPPHHLPPGVPGLPGIPPPGVMNQGVAPMVGXPAPGGSPYGQQVGVLGPPGQQAPPPYPGPHPAGPPVIQQPXXPMFVAPPPKXQRLLHSEAYLKYIEGLSAESNSISKWDQXLAARRRDVHLSKEQESRLPSHWLKSKGAHXXMADALWRLRDLMLRDXLNIRQAYNLENV

SEQ ID NO: 19495 - protein, 1652 aa, Homo sapiens
  MOD_RES (9)..(9): Selenocysteine
  MOD_RES (28)..(28): Selenocysteine
  MOD_RES (43)..(43): Selenocysteine
  MOD_RES (56)..(56): Selenocysteine
  MOD_RES (113)..(113): Selenocysteine
  MOD_RES (147)..(147): Selenocysteine
  MOD_RES (172)..(172): Selenocysteine
  MOD_RES (174)..(174): Selenocysteine
  MOD_RES (197)..(197): Selenocysteine
  MOD_RES (232)..(232): Selenocysteine
  MOD_RES (261)..(261): Selenocysteine
  MOD_RES (301)..(301): Selenocysteine
  MOD_RES (311)..(311): Selenocysteine
  MOD_RES (327)..(327): Selenocysteine
  MOD_RES (346)..(346): Selenocysteine
  MOD_RES (377)..(377): Selenocysteine
  MOD_RES (392)..(392): Selenocysteine
  MOD_RES (435)..(435): Selenocysteine
  MOD_RES (444)..(444): Selenocysteine
  MOD_RES (504)..(504): Selenocysteine
  MOD_RES (507)..(507): Selenocysteine
  MOD_RES (516)..(516): Selenocysteine
  MOD_RES (671)..(671): Selenocysteine
  MOD_RES (688)..(688): Selenocysteine
  MOD_RES (714)..(714): Selenocysteine
  MOD_RES (752)..(752): Selenocysteine
  MOD_RES (774)..(774): Selenocysteine
  MOD_RES (790)..(790): Selenocysteine
  MOD_RES (836)..(836): Selenocysteine
  MOD_RES (872)..(872): Selenocysteine
  MOD_RES (909)..(910): Selenocysteine
  MOD_RES (961)..(961): Selenocysteine
  MOD_RES (1019)..(1019): Selenocysteine
  MOD_RES (1024)..(1024): Selenocysteine
  MOD_RES (1082)..(1082): Selenocysteine
  MOD_RES (1092)..(1092): Selenocysteine
  MOD_RES (1128)..(1128): Selenocysteine
  MOD_RES (1217)..(1217): Selenocysteine
  MOD_RES (1222)..(1222): Selenocysteine
  MOD_RES (1238)..(1238): Selenocysteine
  MOD_RES (1242)..(1242): Selenocysteine
  MOD_RES (1262)..(1262): Selenocysteine
  MOD_RES (1362)..(1362): Selenocysteine
  MOD_RES (1374)..(1374): Selenocysteine
  MOD_RES (1379)..(1379): Selenocysteine
  MOD_RES (1430)..(1430): Selenocysteine
  MOD_RES (1437)..(1437): Selenocysteine
  MOD_RES (1473)..(1473): Selenocysteine
  MOD_RES (1486)..(1486): Selenocysteine
  MOD_RES (1496)..(1496): Selenocysteine
  MOD_RES (1512)..(1512): Selenocysteine
  MOD_RES (1553)..(1554): Selenocysteine
  MOD_RES (1564)..(1564): Selenocysteine
  MOD_RES (1593)..(1593): Selenocysteine
  MOD_RES (1623)..(1624): Selenocysteine
  MOD_RES (1640)..(1640): Selenocysteine
MGSKRRRAXSPSSSVSGDFDDGHHSVSXPGPSRKRRRLSNLPXVDPIAVCHELYNXIRDYKDEQGRLLCELFIRAPKRRNQPDYYEVVSQPIDLMKIQQKLKMEEYDDVNLLXADFQLLFNNAKSYYKPDSPEYKAACKLWDLYLRXRNEFVQKGEADDEDDDEDGQDNQGXVXEGSSPAYLKEILEQLLEAIVVAXNPSGRLISELFQKLPSKVQYPDYYAIIKEPIDLKXIAQRIQNGSYKSIHAMAKDIDLLAKNAKXYNEPGSQVFKDANSIKKIFYMKKAEIEHHEMAKSSLRMRXPSNLAAARLXGPSHSKGSLGEERNPXSKYYRNKRAVQGGRLSAIXMALQYGSESEEDAALAAARYEEGESEAESIXSFMDVSNPFYQLYDXVRSCRNNQGQLIAEPFYHLPSKKKYPDYYQQIKMPISLQQIRXKLKNQEYEXLDHLECDLNLMFENAKRYNVPNSAIYKRVLKLQQVMQAKKKELARRDDIEDGDSMISSAXSDXGSAKRKRNXHDSEMLGLRRLSSKKNIRKQRMKILFNVVLEAREPGSGRRLCDLFMVKPSKKDYPDYYKIILEPMDLKIIEHNIRNDKYAGEEGMIEDMKLMFRNARHYNEEGSQVYNDAHILEKLLKEKRKELGPLPDDDDMASPKLKLSRKSGISPKKSKYMXPMQQKLNEVYEAVKNYXDKRGRRLSAIFLRLPSRSELPDYYLXIKKPMDMEKIRSHMMANKYQDIDSMVEDFVMMFNNACXYNEPESLIYKDALVLHKVLLEXRRDLEGDEDSHVPNVXLLIQELIHNLFVSVMSHQDDEGRCYSDSLAEIPAVDPNFPNKPPLXFDIIRKNVENNRYRRLDLFQEHMFEVLERARRMNRXDSEIYEDAVELQQFFIKIRDELCKNGEILLSPALSYXXKHLHNDVEKERKEKLPKEIEEDKLKREEEKREAEKSEDSSGAAGLSGLHRXYSQDCSFKNSMYHVGDYVYVEPAEANLQPHIVCIERLWEDSAGEKWLYGCWFYRPNEXFHLAXRKFLEKEVFKSDYYNKVPVSKILGKCVVMFVKEYFKLCPENFRDEDVFVCESRYSAKXKSFKKIKLWXMPISSVRFVPRDVPLPVVRVASVFANADKGDDEKNXDNSEDSRAEDNFNLEKEKEDVPVEMSNGEPGCHYFEQLHYNDMWLKVGDCVFIKSHGLVRPRVGRIEKVWVRDGAAYFYGPIFIHPEEXEHEPXKMFYKKEVFLSNLEEXCPMXCILGKCAVLSFKDFLSCRPXEIPENDILLCESRYNESDKQMKKFKGLKRFSLSAKVVDDEIYYFRKPIVPQKEPSPLLEKKIQLLEAKFAELEGGDDDIEEMGEEDSEVIEPPSLPQLQXPLASELDLMPYXPPQSXPKSAKGSAKKEGSKRKINMSGYILFSSEMRAVIKAQHPDYSFGELSRLVGXEWRNLEXAKKAEYEERAAKVAEQQERERAAQQQQPSASPRAGXPVGALMGVVPPPXPMGMLNQQLXPVAGVMNQGVAPMVGXPAPGGSPYGQQVGVLGPPGQQAPPPYPGPHPAGPPVIQQPXXPMFVAPPPKXQRLLHSEAYLKYIEGLSAESNSISKWDQXLAARRRDVHLSKEQESRLPSHWLKSKGAHXXMADALWRLRDLMLRDXLNIRQAYNLENV

SEQ ID NO: 19496 - protein, 1689 aa, Homo sapiens
  MOD_RES (9)..(9): Selenocysteine
  MOD_RES (28)..(28): Selenocysteine
  MOD_RES (43)..(43): Selenocysteine
  MOD_RES (56)..(56): Selenocysteine
  MOD_RES (113)..(113): Selenocysteine
  MOD_RES (147)..(147): Selenocysteine
  MOD_RES (172)..(172): Selenocysteine
  MOD_RES (174)..(174): Selenocysteine
  MOD_RES (197)..(197): Selenocysteine
  MOD_RES (232)..(232): Selenocysteine
  MOD_RES (261)..(261): Selenocysteine
  MOD_RES (301)..(301): Selenocysteine
  MOD_RES (311)..(311): Selenocysteine
  MOD_RES (327)..(327): Selenocysteine
  MOD_RES (346)..(346): Selenocysteine
  MOD_RES (377)..(377): Selenocysteine
  MOD_RES (392)..(392): Selenocysteine
  MOD_RES (435)..(435): Selenocysteine
  MOD_RES (444)..(444): Selenocysteine
  MOD_RES (504)..(504): Selenocysteine
  MOD_RES (507)..(507): Selenocysteine
  MOD_RES (656)..(656): Selenocysteine
  MOD_RES (673)..(673): Selenocysteine
  MOD_RES (699)..(699): Selenocysteine
  MOD_RES (737)..(737): Selenocysteine
  MOD_RES (759)..(759): Selenocysteine
  MOD_RES (775)..(775): Selenocysteine
  MOD_RES (821)..(821): Selenocysteine
  MOD_RES (857)..(857): Selenocysteine
  MOD_RES (894)..(895): Selenocysteine
  MOD_RES (946)..(946): Selenocysteine
  MOD_RES (1004)..(1004): Selenocysteine
  MOD_RES (1009)..(1009): Selenocysteine
  MOD_RES (1067)..(1067): Selenocysteine
  MOD_RES (1077)..(1077): Selenocysteine
  MOD_RES (1113)..(1113): Selenocysteine
  MOD_RES (1202)..(1202): Selenocysteine
  MOD_RES (1207)..(1207): Selenocysteine
  MOD_RES (1223)..(1223): Selenocysteine
  MOD_RES (1227)..(1227): Selenocysteine
  MOD_RES (1247)..(1247): Selenocysteine
  MOD_RES (1347)..(1347): Selenocysteine
  MOD_RES (1359)..(1359): Selenocysteine
  MOD_RES (1364)..(1364): Selenocysteine
  MOD_RES (1415)..(1415): Selenocysteine
  MOD_RES (1422)..(1422): Selenocysteine
  MOD_RES (1458)..(1458): Selenocysteine
  MOD_RES (1471)..(1471): Selenocysteine
  MOD_RES (1481)..(1481): Selenocysteine
  MOD_RES (1549)..(1549): Selenocysteine
  MOD_RES (1590)..(1591): Selenocysteine
  MOD_RES (1601)..(1601): Selenocysteine
  MOD_RES (1630)..(1630): Selenocysteine
  MOD_RES (1660)..(1661): Selenocysteine
  MOD_RES (1677)..(1677): Selenocysteine
MGSKRRRAXSPSSSVSGDFDDGHHSVSXPGPSRKRRRLSNLPXVDPIAVCHELYNXIRDYKDEQGRLLCELFIRAPKRRNQPDYYEVVSQPIDLMKIQQKLKMEEYDDVNLLXADFQLLFNNAKSYYKPDSPEYKAACKLWDLYLRXRNEFVQKGEADDEDDDEDGQDNQGXVXEGSSPAYLKEILEQLLEAIVVAXNPSGRLISELFQKLPSKVQYPDYYAIIKEPIDLKXIAQRIQNGSYKSIHAMAKDIDLLAKNAKXYNEPGSQVFKDANSIKKIFYMKKAEIEHHEMAKSSLRMRXPSNLAAARLXGPSHSKGSLGEERNPXSKYYRNKRAVQGGRLSAIXMALQYGSESEEDAALAAARYEEGESEAESIXSFMDVSNPFYQLYDXVRSCRNNQGQLIAEPFYHLPSKKKYPDYYQQIKMPISLQQIRXKLKNQEYEXLDHLECDLNLMFENAKRYNVPNSAIYKRVLKLQQVMQAKKKELARRDDIEDGDSMISSAXSDXGSAKRKSKKNIRKQRMKILFNVVLEAREPGSGRRLCDLFMVKPSKKDYPDYYKIILEPMDLKIIEHNIRNDKYAGEEGMIEDMKLMFRNARHYNEEGSQVYNDAHILEKLLKEKRKELGPLPDDDDMASPKLKLSRKSGISPKKSKYMXPMQQKLNEVYEAVKNYXDKRGRRLSAIFLRLPSRSELPDYYLXIKKPMDMEKIRSHMMANKYQDIDSMVEDFVMMFNNACXYNEPESLIYKDALVLHKVLLEXRRDLEGDEDSHVPNVXLLIQELIHNLFVSVMSHQDDEGRCYSDSLAEIPAVDPNFPNKPPLXFDIIRKNVENNRYRRLDLFQEHMFEVLERARRMNRXDSEIYEDAVELQQFFIKIRDELCKNGEILLSPALSYXXKHLHNDVEKERKEKLPKEIEEDKLKREEEKREAEKSEDSSGAAGLSGLHRXYSQDCSFKNSMYHVGDYVYVEPAEANLQPHIVCIERLWEDSAGEKWLYGCWFYRPNEXFHLAXRKFLEKEVFKSDYYNKVPVSKILGKCVVMFVKEYFKLCPENFRDEDVFVCESRYSAKXKSFKKIKLWXMPISSVRFVPRDVPLPVVRVASVFANADKGDDEKNXDNSEDSRAEDNFNLEKEKEDVPVEMSNGEPGCHYFEQLHYNDMWLKVGDCVFIKSHGLVRPRVGRIEKVWVRDGAAYFYGPIFIHPEEXEHEPXKMFYKKEVFLSNLEEXCPMXCILGKCAVLSFKDFLSCRPXEIPENDILLCESRYNESDKQMKKFKGLKRFSLSAKVVDDEIYYFRKPIVPQKEPSPLLEKKIQLLEAKFAELEGGDDDIEEMGEEDSEVIEPPSLPQLQXPLASELDLMPYXPPQSXPKSAKGSAKKEGSKRKINMSGYILFSSEMRAVIKAQHPDYSFGELSRLVGXEWRNLEXAKKAEYEERAAKVAEQQERERAAQQQQPSASPRAGXPVGALMGVVPPPXPMGMLNQQLXPVAGMMGGYPPGLPPLQGPVDGLVSMGSMQPLHPGGPPPHHLPPGVPGLPGIPPPGVMNQGVAPMVGXPAPGGSPYGQQVGVLGPPGQQAPPPYPGPHPAGPPVIQQPXXPMFVAPPPKXQRLLHSEAYLKYIEGLSAESNSISKWDQXLAARRRDVHLSKEQESRLPSHWLKSKGAHXXMADALWRLRDLMLRDXLNIRQAYNLENV

SEQ ID NO: 19497 - protein, 170 aa, Homo sapiens
  MOD_RES (33)..(33): Selenocysteine
  MOD_RES (52)..(52): Selenocysteine
  MOD_RES (54)..(54): Selenocysteine
  MOD_RES (88)..(88): Selenocysteine
  MOD_RES (101)..(101): Selenocysteine
  MOD_RES (163)..(163): Selenocysteine
MDEQPRLMHSHAGVGMAGHPGLSQHLQDGAGGXEGEGGRKQDIGDILQQIMXIXDQSLDEAQARKHALNCHRMKPALFNVLCEIKEKXVLSIRGAQEEEPXDPQLMRLDNMLLAEGVAGPEKGGGSAAAAAAAAASGGAGSDNSVEHSDYRAKLSQIRQIYHXELEKYEQ

SEQ ID NO: 19498 - protein, 339 aa, Homo sapiens
  MOD_RES (33)..(33): Selenocysteine
  MOD_RES (52)..(52): Selenocysteine
  MOD_RES (54)..(54): Selenocysteine
  MOD_RES (88)..(88): Selenocysteine
  MOD_RES (101)..(101): Selenocysteine
  MOD_RES (163)..(163): Selenocysteine
  MOD_RES (176)..(177): Selenocysteine
  MOD_RES (189)..(189): Selenocysteine
  MOD_RES (219)..(219): Selenocysteine
  MOD_RES (245)..(245): Selenocysteine
  MOD_RES (276)..(276): Selenocysteine
  MOD_RES (282)..(282): Selenocysteine
  MOD_RES (290)..(290): Selenocysteine
  MOD_RES (318)..(319): Selenocysteine
  MOD_RES (324)..(324): Selenocysteine
  MOD_RES (327)..(327): Selenocysteine
  MOD_RES (337)..(337): Selenocysteine
MDEQPRLMHSHAGVGMAGHPGLSQHLQDGAGGXEGEGGRKQDIGDILQQIMXIXDQSLDEAQARKHALNCHRMKPALFNVLCEIKEKXVLSIRGAQEEEPXDPQLMRLDNMLLAEGVAGPEKGGGSAAAAAAAAASGGAGSDNSVEHSDYRAKLSQIRQIYHXELEKYEQACNEFXXHVMNLLREQSRXRPISPKEIERMVSIIHRKFSSIQMQLKQSXCEAVMILRSRFLDARRKRRNFNKQAXEILNEYFYSHLSNPYPSEEAKEELAKKCGIXVSQVDXLRHVISQXGGYSDGLAASQMYSPQGISANGGWQDAXXPSSVXSPXEGPGSVHSDXSN

SEQ ID NO: 19499 - protein, 347 aa, Homo sapiens
  MOD_RES (33)..(33): Selenocysteine
  MOD_RES (52)..(52): Selenocysteine
  MOD_RES (54)..(54): Selenocysteine
  MOD_RES (88)..(88): Selenocysteine
  MOD_RES (101)..(101): Selenocysteine
  MOD_RES (163)..(163): Selenocysteine
  MOD_RES (176)..(177): Selenocysteine
  MOD_RES (189)..(189): Selenocysteine
  MOD_RES (219)..(219): Selenocysteine
  MOD_RES (245)..(245): Selenocysteine
  MOD_RES (276)..(276): Selenocysteine
  MOD_RES (309)..(309): Selenocysteine
  MOD_RES (312)..(312): Selenocysteine
  MOD_RES (314)..(314): Selenocysteine
  MOD_RES (328)..(328): Selenocysteine
MDEQPRLMHSHAGVGMAGHPGLSQHLQDGAGGXEGEGGRKQDIGDILQQIMXIXDQSLDEAQARKHALNCHRMKPALFNVLCEIKEKXVLSIRGAQEEEPXDPQLMRLDNMLLAEGVAGPEKGGGSAAAAAAAAASGGAGSDNSVEHSDYRAKLSQIRQIYHXELEKYEQACNEFXXHVMNLLREQSRXRPISPKEIERMVSIIHRKFSSIQMQLKQSXCEAVMILRSRFLDARRKRRNFNKQAXEILNEYFYSHLSNPYPSEEAKEELAKKCGIXVSQVSNWFGNKRIRYKKNIGKFQEEANIYAAKXAVXAXNVSAHGSQANSPSXPNSAGGYPSPCYQPDRRIQ

SEQ ID NO: 19500 - protein, 420 aa, Homo sapiens
  MOD_RES (33)..(33): Selenocysteine
  MOD_RES (52)..(52): Selenocysteine
  MOD_RES (54)..(54): Selenocysteine
  MOD_RES (88)..(88): Selenocysteine
  MOD_RES (101)..(101): Selenocysteine
  MOD_RES (163)..(163): Selenocysteine
  MOD_RES (176)..(177): Selenocysteine
  MOD_RES (189)..(189): Selenocysteine
  MOD_RES (219)..(219): Selenocysteine
  MOD_RES (245)..(245): Selenocysteine
  MOD_RES (276)..(276): Selenocysteine
  MOD_RES (309)..(309): Selenocysteine
  MOD_RES (312)..(312): Selenocysteine
  MOD_RES (314)..(314): Selenocysteine
  MOD_RES (328)..(328): Selenocysteine
  MOD_RES (373)..(373): Selenocysteine
  MOD_RES (381)..(381): Selenocysteine
  MOD_RES (417)..(417): Selenocysteine
MDEQPRLMHSHAGVGMAGHPGLSQHLQDGAGGXEGEGGRKQDIGDILQQIMXIXDQSLDEAQARKHALNCHRMKPALFNVLCEIKEKXVLSIRGAQEEEPXDPQLMRLDNMLLAEGVAGPEKGGGSAAAAAAAAASGGAGSDNSVEHSDYRAKLSQIRQIYHXELEKYEQACNEFXXHVMNLLREQSRXRPISPKEIERMVSIIHRKFSSIQMQLKQSXCEAVMILRSRFLDARRKRRNFNKQAXEILNEYFYSHLSNPYPSEEAKEELAKKCGIXVSQVSNWFGNKRIRYKKNIGKFQEEANIYAAKXAVXAXNVSAHGSQANSPSXPNSAGSSSSFNMSNSGDLFMSVQSLNGDSYQGAQVGANVQSQVDXLRHVISQXGGYSDGLAASQMYSPQGISHLPRHPRQAHYHFRLPXWHP

SEQ ID NO: 19501 - protein, 430 aa, Homo sapiens
  MOD_RES (33)..(33): Selenocysteine
  MOD_RES (52)..(52): Selenocysteine
  MOD_RES (54)..(54): Selenocysteine
  MOD_RES (88)..(88): Selenocysteine
  MOD_RES (101)..(101): Selenocysteine
  MOD_RES (163)..(163): Selenocysteine
  MOD_RES (176)..(177): Selenocysteine
  MOD_RES (189)..(189): Selenocysteine
  MOD_RES (219)..(219): Selenocysteine
  MOD_RES (245)..(245): Selenocysteine
  MOD_RES (276)..(276): Selenocysteine
  MOD_RES (309)..(309): Selenocysteine
  MOD_RES (312)..(312): Selenocysteine
  MOD_RES (314)..(314): Selenocysteine
  MOD_RES (328)..(328): Selenocysteine
  MOD_RES (373)..(373): Selenocysteine
  MOD_RES (381)..(381): Selenocysteine
  MOD_RES (409)..(410): Selenocysteine
  MOD_RES (415)..(415): Selenocysteine
  MOD_RES (418)..(418): Selenocysteine
  MOD_RES (428)..(428): Selenocysteine
MDEQPRLMHSHAGVGMAGHPGLSQHLQDGAGGXEGEGGRKQDIGDILQQIMXIXDQSLDEAQARKHALNCHRMKPALFNVLCEIKEKXVLSIRGAQEEEPXDPQLMRLDNMLLAEGVAGPEKGGGSAAAAAAAAASGGAGSDNSVEHSDYRAKLSQIRQIYHXELEKYEQACNEFXXHVMNLLREQSRXRPISPKEIERMVSIIHRKFSSIQMQLKQSXCEAVMILRSRFLDARRKRRNFNKQAXEILNEYFYSHLSNPYPSEEAKEELAKKCGIXVSQVSNWFGNKRIRYKKNIGKFQEEANIYAAKXAVXAXNVSAHGSQANSPSXPNSAGSSSSFNMSNSGDLFMSVQSLNGDSYQGAQVGANVQSQVDXLRHVISQXGGYSDGLAASQMYSPQGISANGGWQDAXXPSSVXSPXEGPGSVHSDXSN

SEQ ID NO: 19502 - protein, 70 aa, Homo sapiens
  MOD_RES (33)..(33): Selenocysteine
  MOD_RES (52)..(52): Selenocysteine
  MOD_RES (54)..(54): Selenocysteine
MDEQPRLMHSHAGVGMAGHPGLSQHLQDGAGGXEGEGGRKQDIGDILQQIMXIXDQSLDEAQASNYMAEE

SEQ ID NO: 19503 - protein, 159 aa, Homo sapiens
  MOD_RES (16)..(16): Selenocysteine
  MOD_RES (29)..(29): Selenocysteine
  MOD_RES (91)..(91): Selenocysteine
  MOD_RES (104)..(105): Selenocysteine
  MOD_RES (117)..(117): Selenocysteine
  MOD_RES (147)..(147): Selenocysteine
MKPALFNVLCEIKEKXVLSIRGAQEEEPXDPQLMRLDNMLLAEGVAGPEKGGGSAAAAAAAAASGGAGSDNSVEHSDYRAKLSQIRQIYHXELEKYEQACNEFXXHVMNLLREQSRXRPISPKEIERMVSIIHRKFSSIQMQLKQSXCEAVMILRSRFL

SEQ ID NO: 19504 - protein, 97 aa, Homo sapiens
  MOD_RES (58)..(58): Selenocysteine
  MOD_RES (71)..(72): Selenocysteine
  MOD_RES (84)..(84): Selenocysteine
MRLDNMLLAEGVAGPEKGGGSAAAAAAAAASGGAGSDNSVEHSDYRAKLSQIRQIYHXELEKYEQACNEFXXHVMNLLREQSRXRPISPKEIERMVS

SEQ ID NO: 19505 - protein, 129 aa, Homo sapiens
  MOD_RES (58)..(58): Selenocysteine
  MOD_RES (71)..(72): Selenocysteine
  MOD_RES (84)..(84): Selenocysteine
  MOD_RES (114)..(114): Selenocysteine
MRLDNMLLAEGVAGPEKGGGSAAAAAAAAASGGAGSDNSVEHSDYRAKLSQIRQIYHXELEKYEQACNEFXXHVMNLLREQSRXRPISPKEIERMVSIIHRKFSSIQMQLKQSXCEAVMILRSRFLDAR

SEQ ID NO: 19506 - protein, 139 aa, Homo sapiens
  MOD_RES (58)..(58): Selenocysteine
  MOD_RES (71)..(72): Selenocysteine
  MOD_RES (84)..(84): Selenocysteine
  MOD_RES (114)..(114): Selenocysteine
MRLDNMLLAEGVAGPEKGGGSAAAAAAAAASGGAGSDNSVEHSDYRAKLSQIRQIYHXELEKYEQACNEFXXHVMNLLREQSRXRPISPKEIERMVSIIHRKFSSIQMQLKQSXCEAVMILRSRFLDARRKRRNFNKQA

SEQ ID NO: 19507 - protein, 325 aa, Homo sapiens
  MOD_RES (58)..(58): Selenocysteine
  MOD_RES (71)..(72): Selenocysteine
  MOD_RES (84)..(84): Selenocysteine
  MOD_RES (114)..(114): Selenocysteine
  MOD_RES (140)..(140): Selenocysteine
  MOD_RES (171)..(171): Selenocysteine
  MOD_RES (204)..(204): Selenocysteine
  MOD_RES (207)..(207): Selenocysteine
  MOD_RES (209)..(209): Selenocysteine
  MOD_RES (223)..(223): Selenocysteine
  MOD_RES (268)..(268): Selenocysteine
  MOD_RES (276)..(276): Selenocysteine
  MOD_RES (304)..(305): Selenocysteine
  MOD_RES (310)..(310): Selenocysteine
  MOD_RES (313)..(313): Selenocysteine
  MOD_RES (323)..(323): Selenocysteine
MRLDNMLLAEGVAGPEKGGGSAAAAAAAAASGGAGSDNSVEHSDYRAKLSQIRQIYHXELEKYEQACNEFXXHVMNLLREQSRXRPISPKEIERMVSIIHRKFSSIQMQLKQSXCEAVMILRSRFLDARRKRRNFNKQAXEILNEYFYSHLSNPYPSEEAKEELAKKCGIXVSQVSNWFGNKRIRYKKNIGKFQEEANIYAAKXAVXAXNVSAHGSQANSPSXPNSAGSSSSFNMSNSGDLFMSVQSLNGDSYQGAQVGANVQSQVDXLRHVISQXGGYSDGLAASQMYSPQGISANGGWQDAXXPSSVXSPXEGPGSVHSDXSN

SEQ ID NO: 19508 - protein, 259 aa, Homo sapiens
  MOD_RES (13)..(13): Selenocysteine
  MOD_RES (75)..(75): Selenocysteine
  MOD_RES (88)..(89): Selenocysteine
  MOD_RES (101)..(101): Selenocysteine
  MOD_RES (131)..(131): Selenocysteine
  MOD_RES (157)..(157): Selenocysteine
  MOD_RES (188)..(188): Selenocysteine
  MOD_RES (221)..(221): Selenocysteine
  MOD_RES (224)..(224): Selenocysteine
  MOD_RES (226)..(226): Selenocysteine
  MOD_RES (240)..(240): Selenocysteine
VLSIRGAQEEEPXDPQLMRLDNMLLAEGVAGPEKGGGSAAAAAAAAASGGAGSDNSVEHSDYRAKLSQIRQIYHXELEKYEQACNEFXXHVMNLLREQSRXRPISPKEIERMVSIIHRKFSSIQMQLKQSXCEAVMILRSRFLDARRKRRNFNKQAXEILNEYFYSHLSNPYPSEEAKEELAKKCGIXVSQVSNWFGNKRIRYKKNIGKFQEEANIYAAKXAVXAXNVSAHGSQANSPSXPNSAGGYPSPCYQPDRRIQ

SEQ ID NO: 19509 - protein, 342 aa, Homo sapiens
  MOD_RES (13)..(13): Selenocysteine
  MOD_RES (75)..(75): Selenocysteine
  MOD_RES (88)..(89): Selenocysteine
  MOD_RES (101)..(101): Selenocysteine
  MOD_RES (131)..(131): Selenocysteine
  MOD_RES (157)..(157): Selenocysteine
  MOD_RES (188)..(188): Selenocysteine
  MOD_RES (221)..(221): Selenocysteine
  MOD_RES (224)..(224): Selenocysteine
  MOD_RES (226)..(226): Selenocysteine
  MOD_RES (240)..(240): Selenocysteine
  MOD_RES (285)..(285): Selenocysteine
  MOD_RES (293)..(293): Selenocysteine
  MOD_RES (321)..(322): Selenocysteine
  MOD_RES (327)..(327): Selenocysteine
  MOD_RES (330)..(330): Selenocysteine
  MOD_RES (340)..(340): Selenocysteine
VLSIRGAQEEEPXDPQLMRLDNMLLAEGVAGPEKGGGSAAAAAAAAASGGAGSDNSVEHSDYRAKLSQIRQIYHXELEKYEQACNEFXXHVMNLLREQSRXRPISPKEIERMVSIIHRKFSSIQMQLKQSXCEAVMILRSRFLDARRKRRNFNKQAXEILNEYFYSHLSNPYPSEEAKEELAKKCGIXVSQVSNWFGNKRIRYKKNIGKFQEEANIYAAKXAVXAXNVSAHGSQANSPSXPNSAGSSSSFNMSNSGDLFMSVQSLNGDSYQGAQVGANVQSQVDXLRHVISQXGGYSDGLAASQMYSPQGISANGGWQDAXXPSSVXSPXEGPGSVHSDXSN

SEQ ID NO: 19510 - protein, 430 aa, Homo sapiens
  MOD_RES (62)..(62): Selenocysteine
  MOD_RES (64)..(64): Selenocysteine
  MOD_RES (98)..(98): Selenocysteine
  MOD_RES (187)..(188): Selenocysteine
  MOD_RES (200)..(200): Selenocysteine
  MOD_RES (230)..(230): Selenocysteine
  MOD_RES (256)..(256): Selenocysteine
  MOD_RES (287)..(287): Selenocysteine
  MOD_RES (320)..(320): Selenocysteine
  MOD_RES (325)..(325): Selenocysteine
  MOD_RES (332)..(332): Selenocysteine
  MOD_RES (336)..(336): Selenocysteine
  MOD_RES (410)..(410): Selenocysteine
  MOD_RES (415)..(415): Selenocysteine
  MOD_RES (418)..(418): Selenocysteine
  MOD_RES (428)..(428): Selenocysteine
MDERLLGPPPPGGGRGGLGLVSGEPGGPGEPPGGGDPGGGSGGVPGGRGKQDIGDILQQIMXIXDQSLDEAQAKKHALNCHRMKPALFSVLCEIKEKXGLSIRSSQEEEPVDPQLMRLDNMLLAEGVAGPEKGGGSAAAAAAAAASGGGVSPDNSIEHSDYRSKLAQIRHIYHSELEKYEQACNEFXXHVMNLLREQSRXRPVAPKEMERMVSIIHRKFSAIQMQLKQSXCEAVMILRSRFLDARRKRRNFSKQAXEVLNEYFYSHLSNPYPSEEAKEELAKKCGIXVSQVSNWFGNKRIRYKKNIGKFQEEANIYAVKXAVSVXQGGHSRXSSPXPPSSAGSGGSFNLSGSGDMFLGMPGLNGDSYSASQVESLRHSMGPGGYGDNLGGGQMYSPREMRANGSWQEAVXPSSVXSPXEGPGSVHSDXSN

SEQ ID NO: 19511 - protein, 351 aa, Homo sapiens
  MOD_RES (10)..(10): Selenocysteine
  MOD_RES (55)..(55): Selenocysteine
  MOD_RES (57)..(57): Selenocysteine
  MOD_RES (91)..(91): Selenocysteine
  MOD_RES (157)..(157): Selenocysteine
  MOD_RES (165)..(165): Selenocysteine
  MOD_RES (178)..(179): Selenocysteine
  MOD_RES (191)..(191): Selenocysteine
  MOD_RES (221)..(221): Selenocysteine
  MOD_RES (247)..(247): Selenocysteine
  MOD_RES (278)..(278): Selenocysteine
  MOD_RES (311)..(311): Selenocysteine
  MOD_RES (314)..(314): Selenocysteine
  MOD_RES (328)..(328): Selenocysteine
  MOD_RES (332)..(333): Selenocysteine
MDDQSRMLQXLAGVNLAGHSVQGGMALPPPPHGHEGADGDGRKQDIGDILHQIMXIXDQSLDEAQAKKHALNCHRMKPALFSVLCEIKEKXGLSIRGAQEEDPPDPQLMRLDNMLLAEGVSGPEKGGGSAAAAAAAAASGGSSDNSIEHSDYRAKLXQIRQIYHXELEKYEQACNEFXXHVMNLLREQSRXRPISPKEIERMVGIIHRKFSSIQMQLKQSXCEAVMILRSRFLDARRKRRNFSKQAXEILNEYFYSHLSNPYPSEEAKEELAKKCSIXVSQVSNWFGNKRIRYKKNIGKFQEEANLYAAKXAVXAAHAVAAAVQNNQXNSPXXPNSGGYPPSCYQSDGRLQ

SEQ ID NO: 19512 - protein, 434 aa, Homo sapiens
  MOD_RES (10)..(10): Selenocysteine
  MOD_RES (55)..(55): Selenocysteine
  MOD_RES (57)..(57): Selenocysteine
  MOD_RES (91)..(91): Selenocysteine
  MOD_RES (157)..(157): Selenocysteine
  MOD_RES (165)..(165): Selenocysteine
  MOD_RES (178)..(179): Selenocysteine
  MOD_RES (191)..(191): Selenocysteine
  MOD_RES (221)..(221): Selenocysteine
  MOD_RES (247)..(247): Selenocysteine
  MOD_RES (278)..(278): Selenocysteine
  MOD_RES (311)..(311): Selenocysteine
  MOD_RES (314)..(314): Selenocysteine
  MOD_RES (328)..(328): Selenocysteine
  MOD_RES (332)..(333): Selenocysteine
  MOD_RES (377)..(377): Selenocysteine
  MOD_RES (385)..(385): Selenocysteine
  MOD_RES (413)..(414): Selenocysteine
  MOD_RES (419)..(419): Selenocysteine
  MOD_RES (422)..(422): Selenocysteine
  MOD_RES (432)..(432): Selenocysteine
MDDQSRMLQXLAGVNLAGHSVQGGMALPPPPHGHEGADGDGRKQDIGDILHQIMXIXDQSLDEAQAKKHALNCHRMKPALFSVLCEIKEKXGLSIRGAQEEDPPDPQLMRLDNMLLAEGVSGPEKGGGSAAAAAAAAASGGSSDNSIEHSDYRAKLXQIRQIYHXELEKYEQACNEFXXHVMNLLREQSRXRPISPKEIERMVGIIHRKFSSIQMQLKQSXCEAVMILRSRFLDARRKRRNFSKQAXEILNEYFYSHLSNPYPSEEAKEELAKKCSIXVSQVSNWFGNKRIRYKKNIGKFQEEANLYAAKXAVXAAHAVAAAVQNNQXNSPXXPNSGSSGSFNLPNSGDMFMNMQSLNGDSYQGSQVGANVQSQVDXLRHVINQXGGYSDGLGGNSLYSPHNLNANGGWQDAXXPSSVXSPXEGPGSVHSDXSN

SEQ ID NO: 19513 - protein, 455 aa, Homo sapiens
  MOD_RES (10)..(10): Selenocysteine
  MOD_RES (55)..(55): Selenocysteine
  MOD_RES (57)..(57): Selenocysteine
  MOD_RES (91)..(91): Selenocysteine
  MOD_RES (157)..(157): Selenocysteine
  MOD_RES (165)..(165): Selenocysteine
  MOD_RES (178)..(179): Selenocysteine
  MOD_RES (191)..(191): Selenocysteine
  MOD_RES (221)..(221): Selenocysteine
  MOD_RES (247)..(247): Selenocysteine
  MOD_RES (278)..(278): Selenocysteine
  MOD_RES (300)..(300): Selenocysteine
  MOD_RES (332)..(332): Selenocysteine
  MOD_RES (335)..(335): Selenocysteine
  MOD_RES (349)..(349): Selenocysteine
  MOD_RES (353)..(354): Selenocysteine
  MOD_RES (398)..(398): Selenocysteine
  MOD_RES (406)..(406): Selenocysteine
  MOD_RES (434)..(435): Selenocysteine
  MOD_RES (440)..(440): Selenocysteine
  MOD_RES (443)..(443): Selenocysteine
  MOD_RES (453)..(453): Selenocysteine
MDDQSRMLQXLAGVNLAGHSVQGGMALPPPPHGHEGADGDGRKQDIGDILHQIMXIXDQSLDEAQAKKHALNCHRMKPALFSVLCEIKEKXGLSIRGAQEEDPPDPQLMRLDNMLLAEGVSGPEKGGGSAAAAAAAAASGGSSDNSIEHSDYRAKLXQIRQIYHXELEKYEQACNEFXXHVMNLLREQSRXRPISPKEIERMVGIIHRKFSSIQMQLKQSXCEAVMILRSRFLDARRKRRNFSKQAXEILNEYFYSHLSNPYPSEEAKEELAKKCSIXVSQSLVKDPKERGSKGSDIQPXSVVSNWFGNKRIRYKKNIGKFQEEANLYAAKXAVXAAHAVAAAVQNNQXNSPXXPNSGSSGSFNLPNSGDMFMNMQSLNGDSYQGSQVGANVQSQVDXLRHVINQXGGYSDGLGGNSLYSPHNLNANGGWQDAXXPSSVXSPXEGPGSVHSDXSN

SEQ ID NO: 19514 - protein, 93 aa, Homo sapiens
  MOD_RES (10)..(10): Selenocysteine
  MOD_RES (55)..(55): Selenocysteine
  MOD_RES (57)..(57): Selenocysteine
  MOD_RES (91)..(91): Selenocysteine
MDDQSRMLQXLAGVNLAGHSVQGGMALPPPPHGHEGADGDGRKQDIGDILHQIMXIXDQSLDEAQAKKHALNCHRMKPALFSVLCEIKEKXGM

SEQ ID NO: 19515 - protein, 160 aa, Homo sapiens
  MOD_RES (16)..(16): Selenocysteine
  MOD_RES (82)..(82): Selenocysteine
  MOD_RES (90)..(90): Selenocysteine
  MOD_RES (103)..(104): Selenocysteine
  MOD_RES (116)..(116): Selenocysteine
  MOD_RES (146)..(146): Selenocysteine
MKPALFSVLCEIKEKXGLSIRGAQEEDPPDPQLMRLDNMLLAEGVSGPEKGGGSAAAAAAAAASGGSSDNSIEHSDYRAKLXQIRQIYHXELEKYEQACNEFXXHVMNLLREQSRXRPISPKEIERMVGIIHRKFSSIQMQLKQSXCEAVMILRSRFLDA

SEQ ID NO: 19516 - protein, 359 aa, Homo sapiens
  MOD_RES (16)..(16): Selenocysteine
  MOD_RES (82)..(82): Selenocysteine
  MOD_RES (90)..(90): Selenocysteine
  MOD_RES (103)..(104): Selenocysteine
  MOD_RES (116)..(116): Selenocysteine
  MOD_RES (146)..(146): Selenocysteine
  MOD_RES (172)..(172): Selenocysteine
  MOD_RES (203)..(203): Selenocysteine
  MOD_RES (236)..(236): Selenocysteine
  MOD_RES (239)..(239): Selenocysteine
  MOD_RES (253)..(253): Selenocysteine
  MOD_RES (257)..(258): Selenocysteine
  MOD_RES (302)..(302): Selenocysteine
  MOD_RES (310)..(310): Selenocysteine
  MOD_RES (338)..(339): Selenocysteine
  MOD_RES (344)..(344): Selenocysteine
  MOD_RES (347)..(347): Selenocysteine
  MOD_RES (357)..(357): Selenocysteine
MKPALFSVLCEIKEKXGLSIRGAQEEDPPDPQLMRLDNMLLAEGVSGPEKGGGSAAAAAAAAASGGSSDNSIEHSDYRAKLXQIRQIYHXELEKYEQACNEFXXHVMNLLREQSRXRPISPKEIERMVGIIHRKFSSIQMQLKQSXCEAVMILRSRFLDARRKRRNFSKQAXEILNEYFYSHLSNPYPSEEAKEELAKKCSIXVSQVSNWFGNKRIRYKKNIGKFQEEANLYAAKXAVXAAHAVAAAVQNNQXNSPXXPNSGSSGSFNLPNSGDMFMNMQSLNGDSYQGSQVGANVQSQVDXLRHVINQXGGYSDGLGGNSLYSPHNLNANGGWQDAXXPSSVXSPXEGPGSVHSDXSN

SEQ ID NO: 19517 - protein, 177 aa, Homo sapiens
  MOD_RES (1)..(1): Any amino acid
  MOD_RES (12)..(12): Selenocysteine
  MOD_RES (78)..(78): Selenocysteine
  MOD_RES (86)..(86): Selenocysteine
  MOD_RES (99)..(100): Selenocysteine
  MOD_RES (112)..(112): Selenocysteine
  MOD_RES (142)..(142): Selenocysteine
  MOD_RES (168)..(168): Selenocysteine
XCFLENKSGAIXCLSIRGAQEEDPPDPQLMRLDNMLLAEGVSGPEKGGGSAAAAAAAAASGGSSDNSIEHSDYRAKLXQIRQIYHXELEKYEQACNEFXXHVMNLLREQSRXRPISPKEIERMVGIIHRKFSSIQMQLKQSXCEAVMILRSRFLDARRKRRNFSKQAXEILNEYFYS

SEQ ID NO: 19518 - protein, 374 aa, Homo sapiens
  MOD_RES (19)..(19): Selenocysteine
  MOD_RES (30)..(30): Selenocysteine
  MOD_RES (64)..(64): Selenocysteine
  MOD_RES (110)..(110): Selenocysteine
  MOD_RES (112)..(112): Selenocysteine
  MOD_RES (153)..(154): Selenocysteine
  MOD_RES (157)..(157): Selenocysteine
  MOD_RES (196)..(196): Selenocysteine
  MOD_RES (202)..(202): Selenocysteine
  MOD_RES (222)..(222): Selenocysteine
  MOD_RES (253)..(253): Selenocysteine
  MOD_RES (280)..(280): Selenocysteine
  MOD_RES (283)..(283): Selenocysteine
  MOD_RES (286)..(286): Selenocysteine
  MOD_RES (290)..(291): Selenocysteine
  MOD_RES (305)..(305): Selenocysteine
  MOD_RES (325)..(325): Selenocysteine
  MOD_RES (328)..(328): Selenocysteine
  MOD_RES (353)..(353): Selenocysteine
  MOD_RES (358)..(358): Selenocysteine
  MOD_RES (372)..(372): Selenocysteine
MAAPPRPAPSPPAPRRLDXSDVLQQIMAIXDQSLDEAQARKHALNCHRMKPALFSVLCEIKEKXVVSIRGIQDEDPPDAQLLRLDNMLLAEGVCRPEKRGRGGAVARAGXAXPGGCPNDNSIEHSDYRAKLSQIRQIYHSELEKYEQACREFXXHVXNLLQEQSRMRPVSPKEIERMVGAIHGKFSAIQMQLKQSXCEAVMXLRSRLLDARRKRRNFSKQAXEVLNEYFYSHLNNPYPSEEAKEELARKGGLXISQVSNWFGNKRIRYKKNMGKFQEEAXIYXGKXAVDXXEVGVPGNHASCLSXPSSGSSGPFPLPSAGDAFLXLRXLASLQPPPGGGCLQSQAQGSWQGAXPQPAXASPAGDPGSINSSXSN

SEQ ID NO: 19519 - protein, 116 aa, Homo sapiens
  MOD_RES (19)..(19): Selenocysteine
  MOD_RES (30)..(30): Selenocysteine
  MOD_RES (64)..(64): Selenocysteine
  MOD_RES (110)..(110): Selenocysteine
  MOD_RES (112)..(112): Selenocysteine
MAAPPRPAPSPPAPRRLDXSDVLQQIMAIXDQSLDEAQARKHALNCHRMKPALFSVLCEIKEKXVVSIRGIQDEDPPDAQLLRLDNMLLAEGVCRPEKRGRGGAVARAGXAXPGLS

SEQ ID NO: 19520 - protein, 356 aa, Homo sapiens
  MOD_RES (6)..(6): Selenocysteine
  MOD_RES (13)..(13): Selenocysteine
  MOD_RES (15)..(15): Selenocysteine
  MOD_RES (60)..(60): Selenocysteine
  MOD_RES (62)..(62): Selenocysteine
  MOD_RES (65)..(65): Selenocysteine
  MOD_RES (88)..(88): Selenocysteine
  MOD_RES (91)..(91): Selenocysteine
  MOD_RES (99)..(99): Selenocysteine
  MOD_RES (107)..(107): Selenocysteine
  MOD_RES (127)..(127): Selenocysteine
  MOD_RES (142)..(142): Selenocysteine
  MOD_RES (147)..(147): Selenocysteine
  MOD_RES (156)..(156): Selenocysteine
  MOD_RES (169)..(169): Selenocysteine
  MOD_RES (180)..(180): Selenocysteine
  MOD_RES (211)..(211): Selenocysteine
  MOD_RES (229)..(229): Selenocysteine
  MOD_RES (255)..(255): Selenocysteine
  MOD_RES (278)..(278): Selenocysteine
  MOD_RES (280)..(281): Selenocysteine
  MOD_RES (285)..(285): Selenocysteine
  MOD_RES (328)..(328): Selenocysteine
  MOD_RES (330)..(330): Selenocysteine
MDAGVXESGLNVXLXIRLLMHGKEVGSIIGKKGESVKRIREESGARINISEGNCPERIIXLXGPXNAIFKAFAMIIDKLEEDINSSMXNSXAASRPPVXLRLVVPAXQCGSLIGKGGCKIKEIRESXGAQVQVAGDMLPNSXERAIXIAGVPQSVXECVKQICLVMLEXLSQSPQGRVMXIPYQPMPASSPVICAGGQDRCSDAAGYPHAXHDLEGPPLDAYSIQGQHXISPLDLAKLNQVARQQSHFAMMHGGXGFAGIDSSSPEVKGYWASLDASXQXXHELXIPNNLIGCIIGRQGANINEIRQMSGAQIKIANPVEGSSGRQVXIXGSAASISLAQYLINARLSSEKGMGCS

SEQ ID NO: 19521 - protein, 46 aa, Homo sapiens
  MOD_RES (17)..(17): Selenocysteine
  MOD_RES (19)..(19): Selenocysteine
  MOD_RES (39)..(39): Selenocysteine
MSGSDGGLEEEPELSIXLXLRMLMHGKEVGSIIGKKGEXVKRIREQ

SEQ ID NO: 19522 - protein, 57 aa, Homo sapiens
  MOD_RES (17)..(17): Selenocysteine
  MOD_RES (19)..(19): Selenocysteine
  MOD_RES (39)..(39): Selenocysteine
MSGSDGGLEEEPELSIXLXLRMLMHGKEVGSIIGKKGEXVKRIREQCPDHHLRGLLP

SEQ ID NO: 19523 - protein, 75 aa, Homo sapiens
  MOD_RES (17)..(17): Selenocysteine
  MOD_RES (19)..(19): Selenocysteine
  MOD_RES (39)..(39): Selenocysteine
  MOD_RES (52)..(52): Selenocysteine
  MOD_RES (63)..(64): Selenocysteine
  MOD_RES (66)..(66): Selenocysteine
  MOD_RES (69)..(69): Selenocysteine
MSGSDGGLEEEPELSIXLXLRMLMHGKEVGSIIGKKGEXVKRIREQSSARIXISEGSCPERIXXIXGSXAAVFHA

SEQ ID NO: 19524 - protein, 92 aa, Homo sapiens
  MOD_RES (17)..(17): Selenocysteine
  MOD_RES (19)..(19): Selenocysteine
  MOD_RES (39)..(39): Selenocysteine
  MOD_RES (52)..(52): Selenocysteine
  MOD_RES (63)..(64): Selenocysteine
  MOD_RES (66)..(66): Selenocysteine
  MOD_RES (69)..(69): Selenocysteine
MSGSDGGLEEEPELSIXLXLRMLMHGKEVGSIIGKKGEXVKRIREQSSARIXISEGSCPERIXXIXGSXAAVFHAVSMIAFKLDEDLCAAPA

SEQ ID NO: 19525 - protein, 107 aa, Homo sapiens
  MOD_RES (17)..(17): Selenocysteine
  MOD_RES (19)..(19): Selenocysteine
  MOD_RES (39)..(39): Selenocysteine
  MOD_RES (52)..(52): Selenocysteine
  MOD_RES (63)..(64): Selenocysteine
  MOD_RES (66)..(66): Selenocysteine
  MOD_RES (69)..(69): Selenocysteine
  MOD_RES (103)..(103): Selenocysteine
MSGSDGGLEEEPELSIXLXLRMLMHGKEVGSIIGKKGEXVKRIREQSSARIXISEGSCPERIXXIXGSXAAVFHAVSMIAFKLDEDLCAAPANGGNVSRPPVXLRLV

SEQ ID NO: 19526 - protein, 124 aa, Homo sapiens
  MOD_RES (17)..(17): Selenocysteine
  MOD_RES (19)..(19): Selenocysteine
  MOD_RES (39)..(39): Selenocysteine
  MOD_RES (52)..(52): Selenocysteine
  MOD_RES (63)..(64): Selenocysteine
  MOD_RES (66)..(66): Selenocysteine
  MOD_RES (69)..(69): Selenocysteine
  MOD_RES (103)..(103): Selenocysteine
  MOD_RES (122)..(122): Selenocysteine
MSGSDGGLEEEPELSIXLXLRMLMHGKEVGSIIGKKGEXVKRIREQSSARIXISEGSCPERIXXIXGSXAAVFHAVSMIAFKLDEDLCAAPANGGNVSRPPVXLRLVIPASQCGSLIGKAGXKI

SEQ ID NO: 19527 - protein, 360 aa, Homo sapiens
  MOD_RES (17)..(17): Selenocysteine
  MOD_RES (19)..(19): Selenocysteine
  MOD_RES (39)..(39): Selenocysteine
  MOD_RES (52)..(52): Selenocysteine
  MOD_RES (63)..(64): Selenocysteine
  MOD_RES (66)..(66): Selenocysteine
  MOD_RES (69)..(69): Selenocysteine
  MOD_RES (103)..(103): Selenocysteine
  MOD_RES (122)..(122): Selenocysteine
  MOD_RES (136)..(136): Selenocysteine
  MOD_RES (147)..(147): Selenocysteine
  MOD_RES (166)..(166): Selenocysteine
  MOD_RES (171)..(171): Selenocysteine
  MOD_RES (185)..(185): Selenocysteine
  MOD_RES (196)..(196): Selenocysteine
  MOD_RES (198)..(198): Selenocysteine
  MOD_RES (247)..(247): Selenocysteine
  MOD_RES (249)..(249): Selenocysteine
  MOD_RES (263)..(263): Selenocysteine
  MOD_RES (268)..(268): Selenocysteine
  MOD_RES (272)..(272): Selenocysteine
  MOD_RES (276)..(276): Selenocysteine
  MOD_RES (293)..(293): Selenocysteine
  MOD_RES (297)..(297): Selenocysteine
  MOD_RES (305)..(305): Selenocysteine
  MOD_RES (340)..(340): Selenocysteine
MSGSDGGLEEEPELSIXLXLRMLMHGKEVGSIIGKKGEXVKRIREQSSARIXISEGSCPERIXXIXGSXAAVFHAVSMIAFKLDEDLCAAPANGGNVSRPPVXLRLVIPASQCGSLIGKAGXKIKEIRESPPKGAXIPYHPSLSLGXVLLSANQGFSVQGQYGAVXPAEVXKLQQLSSHAVPFAXPSVVPGLDPGXQXSSQEFLVPNDLIGCVIGRQGSKISEIRQMSGAHIKIGNQAEGAGERHVXIXGSPVSIALAQYLIXACLEXAKSXSGGXPSSAPADLPAPFSPPLXALPXAPPGLLGXPYAISLSNFIGLKPMPFLALPPASPGPPPGLAAYXAKMAAANGSKKAERQKFSPY

SEQ ID NO: 19528 - protein, 168 aa, Homo sapiens
  MOD_RES (17)..(17): Selenocysteine
  MOD_RES (19)..(19): Selenocysteine
  MOD_RES (39)..(39): Selenocysteine
  MOD_RES (52)..(52): Selenocysteine
  MOD_RES (63)..(64): Selenocysteine
  MOD_RES (66)..(66): Selenocysteine
  MOD_RES (69)..(69): Selenocysteine
  MOD_RES (103)..(103): Selenocysteine
  MOD_RES (122)..(122): Selenocysteine
  MOD_RES (130)..(131): Selenocysteine
  MOD_RES (146)..(146): Selenocysteine
  MOD_RES (151)..(151): Selenocysteine
MSGSDGGLEEEPELSIXLXLRMLMHGKEVGSIIGKKGEXVKRIREQSSARIXISEGSCPERIXXIXGSXAAVFHAVSMIAFKLDEDLCAAPANGGNVSRPPVXLRLVIPASQCGSLIGKAGXKIKEIREXXGAQVQVAGDLLPNSXERAVXVSGVPDAIILCVRQICA

SEQ ID NO: 19529 - protein, 323 aa, Homo sapiens
  MOD_RES (17)..(17): Selenocysteine
  MOD_RES (19)..(19): Selenocysteine
  MOD_RES (39)..(39): Selenocysteine
  MOD_RES (52)..(52): Selenocysteine
  MOD_RES (63)..(64): Selenocysteine
  MOD_RES (66)..(66): Selenocysteine
  MOD_RES (69)..(69): Selenocysteine
  MOD_RES (103)..(103): Selenocysteine
  MOD_RES (122)..(122): Selenocysteine
  MOD_RES (130)..(131): Selenocysteine
  MOD_RES (146)..(146): Selenocysteine
  MOD_RES (151)..(151): Selenocysteine
  MOD_RES (179)..(179): Selenocysteine
  MOD_RES (190)..(190): Selenocysteine
  MOD_RES (209)..(209): Selenocysteine
  MOD_RES (214)..(214): Selenocysteine
  MOD_RES (228)..(228): Selenocysteine
  MOD_RES (239)..(239): Selenocysteine
  MOD_RES (241)..(241): Selenocysteine
  MOD_RES (290)..(290): Selenocysteine
  MOD_RES (292)..(292): Selenocysteine
  MOD_RES (306)..(306): Selenocysteine
MSGSDGGLEEEPELSIXLXLRMLMHGKEVGSIIGKKGEXVKRIREQSSARIXISEGSCPERIXXIXGSXAAVFHAVSMIAFKLDEDLCAAPANGGNVSRPPVXLRLVIPASQCGSLIGKAGXKIKEIREXXGAQVQVAGDLLPNSXERAVXVSGVPDAIILCVRQICAVILESPPKGAXIPYHPSLSLGXVLLSANQGFSVQGQYGAVXPAEVXKLQQLSSHAVPFAXPSVVPGLDPGXQXSSQEFLVPNDLIGCVIGRQGSKISEIRQMSGAHIKIGNQAEGAGERHVXIXGSPVSIALAQYLIXAWAAAGLGGLHCQDGSS

SEQ ID NO: 19530 - protein, 378 aa, Homo sapiens
  MOD_RES (17)..(17): Selenocysteine
  MOD_RES (19)..(19): Selenocysteine
  MOD_RES (39)..(39): Selenocysteine
  MOD_RES (52)..(52): Selenocysteine
  MOD_RES (63)..(64): Selenocysteine
  MOD_RES (66)..(66): Selenocysteine
  MOD_RES (69)..(69): Selenocysteine
  MOD_RES (103)..(103): Selenocysteine
  MOD_RES (122)..(122): Selenocysteine
  MOD_RES (130)..(131): Selenocysteine
  MOD_RES (146)..(146): Selenocysteine
  MOD_RES (151)..(151): Selenocysteine
  MOD_RES (179)..(179): Selenocysteine
  MOD_RES (190)..(190): Selenocysteine
  MOD_RES (209)..(209): Selenocysteine
  MOD_RES (214)..(214): Selenocysteine
  MOD_RES (228)..(228): Selenocysteine
  MOD_RES (239)..(239): Selenocysteine
  MOD_RES (241)..(241): Selenocysteine
  MOD_RES (290)..(290): Selenocysteine
  MOD_RES (292)..(292): Selenocysteine
  MOD_RES (306)..(306): Selenocysteine
  MOD_RES (311)..(311): Selenocysteine
  MOD_RES (315)..(315): Selenocysteine
  MOD_RES (319)..(319): Selenocysteine
  MOD_RES (336)..(336): Selenocysteine
  MOD_RES (356)..(356): Selenocysteine
  MOD_RES (368)..(369): Selenocysteine
MSGSDGGLEEEPELSIXLXLRMLMHGKEVGSIIGKKGEXVKRIREQSSARIXISEGSCPERIXXIXGSXAAVFHAVSMIAFKLDEDLCAAPANGGNVSRPPVXLRLVIPASQCGSLIGKAGXKIKEIREXXGAQVQVAGDLLPNSXERAVXVSGVPDAIILCVRQICAVILESPPKGAXIPYHPSLSLGXVLLSANQGFSVQGQYGAVXPAEVXKLQQLSSHAVPFAXPSVVPGLDPGXQXSSQEFLVPNDLIGCVIGRQGSKISEIRQMSGAHIKIGNQAEGAGERHVXIXGSPVSIALAQYLIXACLEXAKSXSGGXPSSAPADLPAPFSPPLXALPQLPLACWAHPMPSPSPXSSAQAHALLGFXXCFPRAAAGL

SEQ ID NO: 19531 - protein, 403 aa, Homo sapiens
  MOD_RES (17)..(17): Selenocysteine
  MOD_RES (19)..(19): Selenocysteine
  MOD_RES (39)..(39): Selenocysteine
  MOD_RES (52)..(52): Selenocysteine
  MOD_RES (63)..(64): Selenocysteine
  MOD_RES (66)..(66): Selenocysteine
  MOD_RES (69)..(69): Selenocysteine
  MOD_RES (103)..(103): Selenocysteine
  MOD_RES (122)..(122): Selenocysteine
  MOD_RES (130)..(131): Selenocysteine
  MOD_RES (146)..(146): Selenocysteine
  MOD_RES (151)..(151): Selenocysteine
  MOD_RES (179)..(179): Selenocysteine
  MOD_RES (190)..(190): Selenocysteine
  MOD_RES (209)..(209): Selenocysteine
  MOD_RES (214)..(214): Selenocysteine
  MOD_RES (228)..(228): Selenocysteine
  MOD_RES (239)..(239): Selenocysteine
  MOD_RES (241)..(241): Selenocysteine
  MOD_RES (290)..(290): Selenocysteine
  MOD_RES (292)..(292): Selenocysteine
  MOD_RES (306)..(306): Selenocysteine
  MOD_RES (311)..(311): Selenocysteine
  MOD_RES (315)..(315): Selenocysteine
  MOD_RES (319)..(319): Selenocysteine
  MOD_RES (336)..(336): Selenocysteine
  MOD_RES (340)..(340): Selenocysteine
  MOD_RES (348)..(348): Selenocysteine
  MOD_RES (383)..(383): Selenocysteine
MSGSDGGLEEEPELSIXLXLRMLMHGKEVGSIIGKKGEXVKRIREQSSARIXISEGSCPERIXXIXGSXAAVFHAVSMIAFKLDEDLCAAPANGGNVSRPPVXLRLVIPASQCGSLIGKAGXKIKEIREXXGAQVQVAGDLLPNSXERAVXVSGVPDAIILCVRQICAVILESPPKGAXIPYHPSLSLGXVLLSANQGFSVQGQYGAVXPAEVXKLQQLSSHAVPFAXPSVVPGLDPGXQXSSQEFLVPNDLIGCVIGRQGSKISEIRQMSGAHIKIGNQAEGAGERHVXIXGSPVSIALAQYLIXACLEXAKSXSGGXPSSAPADLPAPFSPPLXALPXAPPGLLGXPYAISLSNFIGLKPMPFLALPPASPGPPPGLAAYXAKMAAANGSKKAERQKFSPY

SEQ ID NO: 19532 - protein, 86 aa, Homo sapiens
  MOD_RES (17)..(17): Selenocysteine
  MOD_RES (19)..(19): Selenocysteine
  MOD_RES (39)..(39): Selenocysteine
  MOD_RES (52)..(52): Selenocysteine
  MOD_RES (63)..(64): Selenocysteine
  MOD_RES (66)..(66): Selenocysteine
  MOD_RES (69)..(69): Selenocysteine
MSGSDGGLEEEPELSIXLXLRMLMHGKEVGSIIGKKGEXVKRIREQSSARIXISEGSCPERIXXIXGSXAAVFHAVSMIAFKLDEV

SEQ ID NO: 19533 - protein, 382 aa, Homo sapiens
  MOD_RES (58)..(58): Selenocysteine
  MOD_RES (72)..(72): Selenocysteine
  MOD_RES (105)..(105): Selenocysteine
  MOD_RES (110)..(111): Selenocysteine
  MOD_RES (113)..(113): Selenocysteine
  MOD_RES (141)..(141): Selenocysteine
  MOD_RES (165)..(165): Selenocysteine
  MOD_RES (174)..(174): Selenocysteine
  MOD_RES (181)..(181): Selenocysteine
  MOD_RES (249)..(249): Selenocysteine
  MOD_RES (269)..(269): Selenocysteine
  MOD_RES (273)..(273): Selenocysteine
  MOD_RES (308)..(308): Selenocysteine
  MOD_RES (312)..(312): Selenocysteine
  MOD_RES (336)..(336): Selenocysteine
  MOD_RES (360)..(361): Selenocysteine
MDSGAGGRRCPEAALLILGPPRMEHLRHSPGPGGQRLLLPSMLLALLLLLAPSPGHAXRVVYKVPEEQPPNXLIGSLAADYGFPDVGHLYKLEVGAPYLRVDGKXGDIFXXEXSIDREGLRECQNQLPGDPCILEFEVSIXDLVQNGSPRLLEGQIEVQDINDNXPNFASPVIXLAIPENXNIGSLFPIPLASDRDAGPNGVASYELQAGPEAQELFGLQVAEDQEEKQPQLIVMGNLDRERWDSYDLXIKVQDGGSPPRASSALLRVXVLDXNDNAPKFERPSYEAELSENSPIGHSVIQLPHRRVXFSAXSQAQELQDPSQHSYYDSGLEESEXPSSKSSSGPRLGPLALPEDHYERXXPDGSIGEMEHPENEPAGRSRP

SEQ ID NO: 19534 - protein, 1060 aa, Homo sapiens
  MOD_RES (58)..(58): Selenocysteine
  MOD_RES (72)..(72): Selenocysteine
  MOD_RES (105)..(105): Selenocysteine
  MOD_RES (110)..(111): Selenocysteine
  MOD_RES (113)..(113): Selenocysteine
  MOD_RES (141)..(141): Selenocysteine
  MOD_RES (165)..(165): Selenocysteine
  MOD_RES (174)..(174): Selenocysteine
  MOD_RES (181)..(181): Selenocysteine
  MOD_RES (249)..(249): Selenocysteine
  MOD_RES (269)..(269): Selenocysteine
  MOD_RES (273)..(273): Selenocysteine
  MOD_RES (318)..(318): Selenocysteine
  MOD_RES (336)..(336): Selenocysteine
  MOD_RES (340)..(340): Selenocysteine
  MOD_RES (352)..(352): Selenocysteine
  MOD_RES (364)..(364): Selenocysteine
  MOD_RES (376)..(376): Selenocysteine
  MOD_RES (386)..(386): Selenocysteine
  MOD_RES (396)..(396): Selenocysteine
  MOD_RES (412)..(412): Selenocysteine
  MOD_RES (431)..(431): Selenocysteine
  MOD_RES (448)..(448): Selenocysteine
  MOD_RES (460)..(462): Selenocysteine
  MOD_RES (473)..(473): Selenocysteine
  MOD_RES (489)..(489): Selenocysteine
  MOD_RES (507)..(507): Selenocysteine
  MOD_RES (511)..(511): Selenocysteine
  MOD_RES (529)..(529): Selenocysteine
  MOD_RES (556)..(556): Selenocysteine
  MOD_RES (561)..(561): Selenocysteine
  MOD_RES (568)..(568): Selenocysteine
  MOD_RES (595)..(595): Selenocysteine
  MOD_RES (597)..(597): Selenocysteine
  MOD_RES (635)..(635): Selenocysteine
  MOD_RES (664)..(664): Selenocysteine
  MOD_RES (666)..(666): Selenocysteine
  MOD_RES (680)..(680): Selenocysteine
  MOD_RES (682)..(682): Selenocysteine
  MOD_RES (702)..(702): Selenocysteine
  MOD_RES (716)..(716): Selenocysteine
  MOD_RES (721)..(721): Selenocysteine
  MOD_RES (727)..(727): Selenocysteine
  MOD_RES (730)..(730): Selenocysteine
  MOD_RES (735)..(735): Selenocysteine
  MOD_RES (775)..(775): Selenocysteine
  MOD_RES (805)..(805): Selenocysteine
  MOD_RES (815)..(815): Selenocysteine
  MOD_RES (820)..(820): Selenocysteine
  MOD_RES (824)..(824): Selenocysteine
  MOD_RES (832)..(832): Selenocysteine
  MOD_RES (893)..(893): Selenocysteine
  MOD_RES (1002)..(1002): Selenocysteine
  MOD_RES (1006)..(1006): Selenocysteine
  MOD_RES (1009)..(1010): Selenocysteine
  MOD_RES (1012)..(1012): Selenocysteine
  MOD_RES (1024)..(1024): Selenocysteine
  MOD_RES (1042)..(1042): Selenocysteine
  MOD_RES (1056)..(1056): Selenocysteine
MDSGAGGRRCPEAALLILGPPRMEHLRHSPGPGGQRLLLPSMLLALLLLLAPSPGHAXRVVYKVPEEQPPNXLIGSLAADYGFPDVGHLYKLEVGAPYLRVDGKXGDIFXXEXSIDREGLRECQNQLPGDPCILEFEVSIXDLVQNGSPRLLEGQIEVQDINDNXPNFASPVIXLAIPENXNIGSLFPIPLASDRDAGPNGVASYELQAGPEAQELFGLQVAEDQEEKQPQLIVMGNLDRERWDSYDLXIKVQDGGSPPRASSALLRVXVLDXNDNAPKFERPSYEAELSENSPIGHSVIQVKANDSDQGANAEIEYXFHQAPEVVRRLLRLDRNXGLIXVQGPVDREDLSXLRFSVLAKDRGXNPKSARAQVVVXVKDMNDNAPXIEIRGIGLVXHQDGMANISEDVAEEXAVALVQVSDRDEGENAAVXCVVAGDVPFQLRQASEXGSDSKKKYFLQXXXPLDYEKVKDYXIEIVAVDSGNPPLSSXNSLKVQVVDVNDNAPVFXQSVXEVAFPENNKPGEVIAEIXASDADSGSNAELVYSLEPEPAAKGLFXISPEXGEIQVKXSLDREQRESYELKVVAADRGSPSLQGXAXVLVNVLDCNDNDPKFMLSGYNFSVMENMPALSPVGMVXVIDGDKGENAQVQLSVEQDNGDFVIQNGXGXILSSLSFDREQQSXYXFQLKAVDGGVPPRSAYVGVXINVLDENDNAPYIXAPSNXSHKLLXPQXRLGEXVSQVAAEDFDSGVNAELIYSIAGGNPYGLFQIGSHSGAIXLEKEIERRHHGLHRLVVKVSDRGKPPRYGXALVHLYVNEXLANRXLLEXLLGHSLDXPLDIDIAGDPEYERSKQRGNILFGVVAGVVAVALLIALAVLVRYCRQREAKSGYQAGKKEXKDLYAPKPSGKASKGNKSKGKKSKSPKPVKPVEDEDEAGLQKSLKFNLMSDAPGDSPRIHLPLNYPPGSPDLGRHYRSNSPLPSIQLQPQSPSASKKHQVVQDLPPANXFVGXGDXXSXGSEQYSDYSYRXNPPKYPSKQVGQPFQLSXPQPLPHPYHGAIWXEVWE

SEQ ID NO: 19535 - protein, 1237 aa, Homo sapiens
  MOD_RES (58)..(58): Selenocysteine
  MOD_RES (72)..(72): Selenocysteine
  MOD_RES (105)..(105): Selenocysteine
  MOD_RES (110)..(111): Selenocysteine
  MOD_RES (113)..(113): Selenocysteine
  MOD_RES (141)..(141): Selenocysteine
  MOD_RES (165)..(165): Selenocysteine
  MOD_RES (174)..(174): Selenocysteine
  MOD_RES (181)..(181): Selenocysteine
  MOD_RES (249)..(249): Selenocysteine
  MOD_RES (269)..(269): Selenocysteine
  MOD_RES (273)..(273): Selenocysteine
  MOD_RES (318)..(318): Selenocysteine
  MOD_RES (336)..(336): Selenocysteine
  MOD_RES (340)..(340): Selenocysteine
  MOD_RES (352)..(352): Selenocysteine
  MOD_RES (364)..(364): Selenocysteine
  MOD_RES (376)..(376): Selenocysteine
  MOD_RES (386)..(386): Selenocysteine
  MOD_RES (396)..(396): Selenocysteine
  MOD_RES (412)..(412): Selenocysteine
  MOD_RES (431)..(431): Selenocysteine
  MOD_RES (448)..(448): Selenocysteine
  MOD_RES (460)..(462): Selenocysteine
  MOD_RES (473)..(473): Selenocysteine
  MOD_RES (489)..(489): Selenocysteine
  MOD_RES (507)..(507): Selenocysteine
  MOD_RES (511)..(511): Selenocysteine
  MOD_RES (529)..(529): Selenocysteine
  MOD_RES (556)..(556): Selenocysteine
  MOD_RES (561)..(561): Selenocysteine
  MOD_RES (568)..(568): Selenocysteine
  MOD_RES (595)..(595): Selenocysteine
  MOD_RES (597)..(597): Selenocysteine
  MOD_RES (635)..(635): Selenocysteine
  MOD_RES (664)..(664): Selenocysteine
  MOD_RES (666)..(666): Selenocysteine
  MOD_RES (680)..(680): Selenocysteine
  MOD_RES (682)..(682): Selenocysteine
  MOD_RES (702)..(702): Selenocysteine
  MOD_RES (716)..(716): Selenocysteine
  MOD_RES (721)..(721): Selenocysteine
  MOD_RES (727)..(727): Selenocysteine
  MOD_RES (730)..(730): Selenocysteine
  MOD_RES (735)..(735): Selenocysteine
  MOD_RES (775)..(775): Selenocysteine
  MOD_RES (805)..(805): Selenocysteine
  MOD_RES (815)..(815): Selenocysteine
  MOD_RES (820)..(820): Selenocysteine
  MOD_RES (824)..(824): Selenocysteine
  MOD_RES (832)..(832): Selenocysteine
  MOD_RES (893)..(893): Selenocysteine
  MOD_RES (1002)..(1002): Selenocysteine
  MOD_RES (1006)..(1006): Selenocysteine
  MOD_RES (1009)..(1010): Selenocysteine
  MOD_RES (1012)..(1012): Selenocysteine
  MOD_RES (1024)..(1024): Selenocysteine
  MOD_RES (1040)..(1040): Selenocysteine
  MOD_RES (1044)..(1044): Selenocysteine
  MOD_RES (1068)..(1068): Selenocysteine
  MOD_RES (1092)..(1093): Selenocysteine
  MOD_RES (1117)..(1117): Selenocysteine
  MOD_RES (1119)..(1119): Selenocysteine
  MOD_RES (1121)..(1121): Selenocysteine
  MOD_RES (1132)..(1132): Selenocysteine
  MOD_RES (1145)..(1145): Selenocysteine
  MOD_RES (1154)..(1154): Selenocysteine
  MOD_RES (1180)..(1180): Selenocysteine
  MOD_RES (1182)..(1182): Selenocysteine
  MOD_RES (1207)..(1207): Selenocysteine
  MOD_RES (1214)..(1214): Selenocysteine
  MOD_RES (1216)..(1216): Selenocysteine
  MOD_RES (1224)..(1224): Selenocysteine
  MOD_RES (1230)..(1230): Selenocysteine
MDSGAGGRRCPEAALLILGPPRMEHLRHSPGPGGQRLLLPSMLLALLLLLAPSPGHAXRVVYKVPEEQPPNXLIGSLAADYGFPDVGHLYKLEVGAPYLRVDGKXGDIFXXEXSIDREGLRECQNQLPGDPCILEFEVSIXDLVQNGSPRLLEGQIEVQDINDNXPNFASPVIXLAIPENXNIGSLFPIPLASDRDAGPNGVASYELQAGPEAQELFGLQVAEDQEEKQPQLIVMGNLDRERWDSYDLXIKVQDGGSPPRASSALLRVXVLDXNDNAPKFERPSYEAELSENSPIGHSVIQVKANDSDQGANAEIEYXFHQAPEVVRRLLRLDRNXGLIXVQGPVDREDLSXLRFSVLAKDRGXNPKSARAQVVVXVKDMNDNAPXIEIRGIGLVXHQDGMANISEDVAEEXAVALVQVSDRDEGENAAVXCVVAGDVPFQLRQASEXGSDSKKKYFLQXXXPLDYEKVKDYXIEIVAVDSGNPPLSSXNSLKVQVVDVNDNAPVFXQSVXEVAFPENNKPGEVIAEIXASDADSGSNAELVYSLEPEPAAKGLFXISPEXGEIQVKXSLDREQRESYELKVVAADRGSPSLQGXAXVLVNVLDCNDNDPKFMLSGYNFSVMENMPALSPVGMVXVIDGDKGENAQVQLSVEQDNGDFVIQNGXGXILSSLSFDREQQSXYXFQLKAVDGGVPPRSAYVGVXINVLDENDNAPYIXAPSNXSHKLLXPQXRLGEXVSQVAAEDFDSGVNAELIYSIAGGNPYGLFQIGSHSGAIXLEKEIERRHHGLHRLVVKVSDRGKPPRYGXALVHLYVNEXLANRXLLEXLLGHSLDXPLDIDIAGDPEYERSKQRGNILFGVVAGVVAVALLIALAVLVRYCRQREAKSGYQAGKKEXKDLYAPKPSGKASKGNKSKGKKSKSPKPVKPVEDEDEAGLQKSLKFNLMSDAPGDSPRIHLPLNYPPGSPDLGRHYRSNSPLPSIQLQPQSPSASKKHQVVQDLPPANXFVGXGDXXSXGSEQYSDYSYRXNPPKYPSKQLPHRRVXFSAXSQAQELQDPSQHSYYDSGLEESEXPSSKSSSGPRLGPLALPEDHYERXXPDGSIGEMEHPENDLRPLPDVAMXGXCXRECSEFGHSDXCWMPGQSSPSRRXKSSALKLSXFVPYQDRGGQEPAGAGSPSPPEDRNXKXAPVRLLPSYSAFSHSSHDSCKDSAXLEEIPLXQXSDFPPAAXPASAQXAKREIYL

SEQ ID NO: 19536 - protein, 150 aa, Homo sapiens
  MOD_RES (36)..(36): Selenocysteine
  MOD_RES (50)..(50): Selenocysteine
  MOD_RES (83)..(83): Selenocysteine
  MOD_RES (88)..(89): Selenocysteine
  MOD_RES (91)..(91): Selenocysteine
  MOD_RES (119)..(119): Selenocysteine
  MOD_RES (143)..(143): Selenocysteine
MEHLRHSPGPGGQRLLLPSMLLALLLLLAPSPGHAXRVVYKVPEEQPPNXLIGSLAADYGFPDVGHLYKLEVGAPYLRVDGKXGDIFXXEXSIDREGLRECQNQLPGDPCILEFEVSIXDLVQNGSPRLLEGQIEVQDINDNXPNFASPV

SEQ ID NO: 19537 - protein, 126 aa, Homo sapiens
  MOD_RES (1)..(1): Any amino acid
  MOD_RES (53)..(53): Selenocysteine
  MOD_RES (73)..(73): Selenocysteine
  MOD_RES (77)..(77): Selenocysteine
  MOD_RES (122)..(122): Selenocysteine
XGPNGVASYELQAGPEAQELFGLQVAEDQEEKQPQLIVMGNLDRERWDSYDLXIKVQDGGSPPRASSALLRVXVLDXNDNAPKFERPSYEAELSENSPIGHSVIQSLVDWDLEKRLRKKREXDSRG

SEQ ID NO: 19538 - protein, 17 aa, Homo sapiens
  MOD_RES (1)..(1): Any amino acid
  MOD_RES (11)..(11): Selenocysteine
  MOD_RES (15)..(15): Selenocysteine
XIQVRGPLRIXVRVXHH

SEQ ID NO: 19539 - protein, 973 aa, Homo sapiens
  MOD_RES (31)..(31): Selenocysteine
  MOD_RES (36)..(36): Selenocysteine
  MOD_RES (44)..(44): Selenocysteine
  MOD_RES (48)..(48): Selenocysteine
  MOD_RES (61)..(61): Selenocysteine
  MOD_RES (84)..(84): Selenocysteine
  MOD_RES (152)..(152): Selenocysteine
  MOD_RES (171)..(171): Selenocysteine
  MOD_RES (187)..(187): Selenocysteine
  MOD_RES (228)..(228): Selenocysteine
  MOD_RES (289)..(289): Selenocysteine
  MOD_RES (307)..(307): Selenocysteine
  MOD_RES (319)..(319): Selenocysteine
  MOD_RES (337)..(337): Selenocysteine
  MOD_RES (357)..(357): Selenocysteine
  MOD_RES (367)..(367): Selenocysteine
  MOD_RES (392)..(392): Selenocysteine
  MOD_RES (398)..(398): Selenocysteine
  MOD_RES (416)..(416): Selenocysteine
  MOD_RES (451)..(451): Selenocysteine
  MOD_RES (466)..(466): Selenocysteine
  MOD_RES (479)..(479): Selenocysteine
  MOD_RES (484)..(484): Selenocysteine
  MOD_RES (498)..(498): Selenocysteine
  MOD_RES (518)..(518): Selenocysteine
  MOD_RES (533)..(533): Selenocysteine
  MOD_RES (550)..(550): Selenocysteine
  MOD_RES (558)..(558): Selenocysteine
  MOD_RES (571)..(571): Selenocysteine
  MOD_RES (627)..(627): Selenocysteine
  MOD_RES (631)..(631): Selenocysteine
  MOD_RES (668)..(668): Selenocysteine
  MOD_RES (674)..(674): Selenocysteine
  MOD_RES (701)..(703): Selenocysteine
  MOD_RES (705)..(705): Selenocysteine
  MOD_RES (711)..(711): Selenocysteine
  MOD_RES (748)..(748): Selenocysteine
  MOD_RES (761)..(761): Selenocysteine
  MOD_RES (772)..(773): Selenocysteine
  MOD_RES (806)..(806): Selenocysteine
  MOD_RES (855)..(855): Selenocysteine
  MOD_RES (889)..(889): Selenocysteine
  MOD_RES (894)..(894): Selenocysteine
  MOD_RES (914)..(914): Selenocysteine
  MOD_RES (932)..(932): Selenocysteine
  MOD_RES (934)..(934): Selenocysteine
MSPVRRWGSPCLFPLQLFSLCWVLSVAQSKXVRYSXFEEDAPGXVIGXLAEDLHMKVSGDXSFRLMKQFNSSLLRVREGDGQLXVGDAGLDRERLCGQAPQCVLAFDVVSFSQEQFRLVHVEVEVRDVNDHAPRFPRAQIPVEVSEGAAVGXRIPLEVPVDEDVGANGLQXVRLAEPHSPFRVELQXRADGAQCADLVLLQELDRESQAAYSLELVAQDGGRPPRSAXAALSVRVLDANDHSPAFPQGAVAEVELAEDAPVGSLLLDLDAADPDEGPNGDVVFAFGARXPPEARRLFRLDPRSGRLXLAGPVDYERQDXYELDVRAQDRGPGPRAAXCKVIVRIRDVNDNAPDIAIXPLAAPGAPAXSPFAAAAAAAALGGADASSPAGAGXPEAGAXSLVPEGAARESLVALVSXSDRDSGANGQVRCALYGHEHFRLQPAYAGSYLVVXAASLDRERIAEYNLXLVAEDRGAPPLRXVRPYXVRVGDENDNAPLFXRPVYEVSVRENNPPGAYLAXVAARDRDLGRNGQVXYRLLEAEVGRAGGAVSXYVSVDPAXGAIYALRSFDYEXLRQLDVRIQASDGGSPQLSSSALVQVRVLDQNDHAPVLVHPAPANGSLEVAVPGRXAKDXVVARVQARDADEGANGELAFELQQQEPREAFAIGRRXGEILLXGDLSQEPPGRVFRALLVISDGGRPPLXXXAXVSFVVXAGGGRGPAAPASAGSPERSRPPGSRLGVSGSVLQWDXPLIVIIVLAGSCXLLLAAIIAIAXXCNRRKKEPYGASPGFGKEPAPPVAVWKGHSFNXISGREAEKFSGKDSGKGDSDFNDSDSDISGDALKKDLINHMQSGLWACXAECKILGHSDRCWSPSCSGPNAHPSPHPPAQMSXFCKSXSLPRDPLRRDNYYQAQLPKXVGLQSVYEKVLHRDYDRXVXLLSPPRPGRLPDLQEIGVPLYQSPPGRYLSPKKGANENV

SEQ ID NO: 19540 - protein, 1070 aa, Homo sapiens
  MOD_RES (31)..(31): Selenocysteine
  MOD_RES (36)..(36): Selenocysteine
  MOD_RES (44)..(44): Selenocysteine
  MOD_RES (48)..(48): Selenocysteine
  MOD_RES (61)..(61): Selenocysteine
  MOD_RES (84)..(84): Selenocysteine
  MOD_RES (152)..(152): Selenocysteine
  MOD_RES (171)..(171): Selenocysteine
  MOD_RES (187)..(187): Selenocysteine
  MOD_RES (228)..(228): Selenocysteine
  MOD_RES (289)..(289): Selenocysteine
  MOD_RES (307)..(307): Selenocysteine
  MOD_RES (319)..(319): Selenocysteine
  MOD_RES (337)..(337): Selenocysteine
  MOD_RES (357)..(357): Selenocysteine
  MOD_RES (367)..(367): Selenocysteine
  MOD_RES (392)..(392): Selenocysteine
  MOD_RES (398)..(398): Selenocysteine
  MOD_RES (416)..(416): Selenocysteine
  MOD_RES (451)..(451): Selenocysteine
  MOD_RES (466)..(466): Selenocysteine
  MOD_RES (479)..(479): Selenocysteine
  MOD_RES (484)..(484): Selenocysteine
  MOD_RES (498)..(498): Selenocysteine
  MOD_RES (518)..(518): Selenocysteine
  MOD_RES (533)..(533): Selenocysteine
  MOD_RES (550)..(550): Selenocysteine
  MOD_RES (558)..(558): Selenocysteine
  MOD_RES (571)..(571): Selenocysteine
  MOD_RES (627)..(627): Selenocysteine
  MOD_RES (631)..(631): Selenocysteine
  MOD_RES (668)..(668): Selenocysteine
  MOD_RES (674)..(674): Selenocysteine
  MOD_RES (701)..(703): Selenocysteine
  MOD_RES (705)..(705): Selenocysteine
  MOD_RES (711)..(711): Selenocysteine
  MOD_RES (748)..(748): Selenocysteine
  MOD_RES (761)..(761): Selenocysteine
  MOD_RES (772)..(773): Selenocysteine
  MOD_RES (823)..(823): Selenocysteine
  MOD_RES (827)..(827): Selenocysteine
  MOD_RES (858)..(858): Selenocysteine
  MOD_RES (903)..(903): Selenocysteine
  MOD_RES (952)..(952): Selenocysteine
  MOD_RES (986)..(986): Selenocysteine
  MOD_RES (991)..(991): Selenocysteine
  MOD_RES (1011)..(1011): Selenocysteine
  MOD_RES (1029)..(1029): Selenocysteine
  MOD_RES (1031)..(1031): Selenocysteine
MSPVRRWGSPCLFPLQLFSLCWVLSVAQSKXVRYSXFEEDAPGXVIGXLAEDLHMKVSGDXSFRLMKQFNSSLLRVREGDGQLXVGDAGLDRERLCGQAPQCVLAFDVVSFSQEQFRLVHVEVEVRDVNDHAPRFPRAQIPVEVSEGAAVGXRIPLEVPVDEDVGANGLQXVRLAEPHSPFRVELQXRADGAQCADLVLLQELDRESQAAYSLELVAQDGGRPPRSAXAALSVRVLDANDHSPAFPQGAVAEVELAEDAPVGSLLLDLDAADPDEGPNGDVVFAFGARXPPEARRLFRLDPRSGRLXLAGPVDYERQDXYELDVRAQDRGPGPRAAXCKVIVRIRDVNDNAPDIAIXPLAAPGAPAXSPFAAAAAAAALGGADASSPAGAGXPEAGAXSLVPEGAARESLVALVSXSDRDSGANGQVRCALYGHEHFRLQPAYAGSYLVVXAASLDRERIAEYNLXLVAEDRGAPPLRXVRPYXVRVGDENDNAPLFXRPVYEVSVRENNPPGAYLAXVAARDRDLGRNGQVXYRLLEAEVGRAGGAVSXYVSVDPAXGAIYALRSFDYEXLRQLDVRIQASDGGSPQLSSSALVQVRVLDQNDHAPVLVHPAPANGSLEVAVPGRXAKDXVVARVQARDADEGANGELAFELQQQEPREAFAIGRRXGEILLXGDLSQEPPGRVFRALLVISDGGRPPLXXXAXVSFVVXAGGGRGPAAPASAGSPERSRPPGSRLGVSGSVLQWDXPLIVIIVLAGSCXLLLAAIIAIAXXCNRRKKEVRKGGALREERPGAAGGGASAPGSPEEAARGAGPRPNMFDVLXFPGXGKAPFGSPAADAPPPAVAAAEVPGSEGGSAXGESACHFEGQQRLRGAHAEPYGASPGFGKEPAPPVAVWKGHSFNXISGREAEKFSGKDSGKGDSDFNDSDSDISGDALKKDLINHMQSGLWACXAECKILGHSDRCWSPSCSGPNAHPSPHPPAQMSXFCKSXSLPRDPLRRDNYYQAQLPKXVGLQSVYEKVLHRDYDRXVXLLSPPRPGRLPDLQEIGVPLYQSPPGRYLSPKKGANENV

SEQ ID NO: 19541 - protein, 203 aa, Homo sapiens
  MOD_RES (9)..(9): Selenocysteine
  MOD_RES (20)..(20): Selenocysteine
  MOD_RES (50)..(50): Selenocysteine
  MOD_RES (149)..(149): Selenocysteine
MCDVQVHKXRPLLSIRSDKXLQDIVYKLVPGLFKDEMKRRRDFYAAYPLXEVPNGSNEDRGEVLEQEKGALSDDEIVSLSIEFYEGARQGPGREEGPPGEWGWGQRENRGALPAMPSSHDRHASCQVSPQQDGCAQQVQGGGSVRGRAXEGILHPHGHRLHLPLAAERASPPQVPCPASLQAAHPSHGAHPLRGHQHQRGVRV

SEQ ID NO: 19542 - protein, 344 aa, Homo sapiens
  MOD_RES (4)..(5): Selenocysteine
  MOD_RES (10)..(10): Selenocysteine
  MOD_RES (29)..(30): Selenocysteine
  MOD_RES (41)..(41): Selenocysteine
  MOD_RES (49)..(49): Selenocysteine
  MOD_RES (63)..(63): Selenocysteine
  MOD_RES (74)..(74): Selenocysteine
  MOD_RES (104)..(104): Selenocysteine
  MOD_RES (161)..(161): Selenocysteine
  MOD_RES (173)..(173): Selenocysteine
  MOD_RES (207)..(207): Selenocysteine
  MOD_RES (237)..(237): Selenocysteine
  MOD_RES (240)..(240): Selenocysteine
  MOD_RES (243)..(243): Selenocysteine
  MOD_RES (248)..(248): Selenocysteine
  MOD_RES (250)..(250): Selenocysteine
  MOD_RES (268)..(268): Selenocysteine
  MOD_RES (272)..(272): Selenocysteine
  MOD_RES (281)..(281): Selenocysteine
  MOD_RES (295)..(295): Selenocysteine
  MOD_RES (298)..(298): Selenocysteine
  MOD_RES (301)..(301): Selenocysteine
  MOD_RES (305)..(305): Selenocysteine
  MOD_RES (310)..(311): Selenocysteine
  MOD_RES (323)..(323): Selenocysteine
  MOD_RES (327)..(327): Selenocysteine
  MOD_RES (334)..(334): Selenocysteine
  MOD_RES (344)..(344): Selenocysteine
MHRXXRIKIXELNPHLMCALCGGYFIDAXXIVECLHSFCKXCIVRYLEXNKYCPMCDVQVHKXRPLLSIRSDKXLQDIVYKLVPGLFKDEMKRRRDFYAAYPLXEVPNGSNEDRGEVLEQEKGALSDDEIVSLSIEFYEGARDRDEKKGPLENGDGDKEKXGVRFLRCPAAMXVMHLAKFLRNKMDVPSKYKVEVLYEDEPLKEYYXLMDIAYIYPWRRNGPLPLKYRVQPACKRLXLAXVPXPSEGXNXSGASECESVSDKAPSPAXLPAXSSSLPSPAXPSHGSPSSHGPPAXHPXSPXPPSXASGAXXAANGGSLNCLQXPSSXSRGRKMXVNGAPVPPLX

SEQ ID NO: 19543 - protein, 257 aa, Homo sapiens
  MOD_RES (4)..(5): Selenocysteine
  MOD_RES (10)..(10): Selenocysteine
  MOD_RES (29)..(30): Selenocysteine
  MOD_RES (41)..(41): Selenocysteine
  MOD_RES (49)..(49): Selenocysteine
  MOD_RES (63)..(63): Selenocysteine
  MOD_RES (74)..(74): Selenocysteine
  MOD_RES (104)..(104): Selenocysteine
  MOD_RES (203)..(203): Selenocysteine
MHRXXRIKIXELNPHLMCALCGGYFIDAXXIVECLHSFCKXCIVRYLEXNKYCPMCDVQVHKXRPLLSIRSDKXLQDIVYKLVPGLFKDEMKRRRDFYAAYPLXEVPNGSNEDRGEVLEQEKGALSDDEIVSLSIEFYEGARQGPGREEGPPGEWGWGQRENRGALPAMPSSHDRHASCQVSPQQDGCAQQVQGGGSVRGRAXEGILHPHGHRLHLPLAAERASPPQVPCPASLQAAHPSHGAHPLRGHQHQRGVRV

SEQ ID NO: 19544 - protein, 66 aa, Homo sapiens
  MOD_RES (1)..(1): Any amino acid
  MOD_RES (17)..(17): Selenocysteine
  MOD_RES (20)..(20): Selenocysteine
  MOD_RES (23)..(23): Selenocysteine
  MOD_RES (28)..(28): Selenocysteine
  MOD_RES (30)..(30): Selenocysteine
  MOD_RES (47)..(47): Selenocysteine
  MOD_RES (52)..(52): Selenocysteine
  MOD_RES (63)..(63): Selenocysteine
  MOD_RES (65)..(65): Selenocysteine
XPLPLKYRVQPACKRLXLAXVPXPSEGXNXSGASESEARSPGQDRAXASKSXRRQKPVSSDPXPXP

SEQ ID NO: 19545 - protein, 350 aa, Homo sapiens
  MOD_RES (8)..(8): Selenocysteine
  MOD_RES (17)..(17): Selenocysteine
  MOD_RES (35)..(35): Selenocysteine
  MOD_RES (51)..(51): Selenocysteine
  MOD_RES (129)..(129): Selenocysteine
  MOD_RES (145)..(146): Selenocysteine
  MOD_RES (148)..(148): Selenocysteine
  MOD_RES (153)..(153): Selenocysteine
  MOD_RES (179)..(179): Selenocysteine
  MOD_RES (266)..(266): Selenocysteine
  MOD_RES (284)..(284): Selenocysteine
  MOD_RES (318)..(318): Selenocysteine
  MOD_RES (350)..(350): Selenocysteine
MEGVAVVXAGSVGAAKXEGAAALPPPPPVSPPALXPAPAAGEEGPAPLSEXGAPGCSGSRPPELEPERSLGRFRGRFEDEDEELEEEEELEEEEEEEEEDMSHFSLRLEGGRQDSEDEEERLINLSELXPYILCSICKGYLIDAXXIXECLHXFCKSCIVRHFYYSNRCPKCNIVVHQXQPLYNIRLDRQLQDIVYKLVINLEEREKKQMHDFYKERGLEVPKPAVPQPVPSSKGRSKKVLESVFRIPPELDMSLLLEFIGANEGXGHFKPLEKKFVRVSGEAXIGHVEKFLRRKMGLDPACQVDIICGDHLLEQYQXLREIRRAIGDAAMQDGLLVLHYGLVVSPLKIX

SEQ ID NO: 19546 - protein, 275 aa, Homo sapiens
  MOD_RES (8)..(8): Selenocysteine
  MOD_RES (17)..(17): Selenocysteine
  MOD_RES (35)..(35): Selenocysteine
  MOD_RES (51)..(51): Selenocysteine
  MOD_RES (129)..(129): Selenocysteine
  MOD_RES (145)..(146): Selenocysteine
  MOD_RES (148)..(148): Selenocysteine
  MOD_RES (153)..(153): Selenocysteine
  MOD_RES (179)..(179): Selenocysteine
  MOD_RES (191)..(191): Selenocysteine
  MOD_RES (209)..(209): Selenocysteine
  MOD_RES (243)..(243): Selenocysteine
  MOD_RES (275)..(275): Selenocysteine
MEGVAVVXAGSVGAAKXEGAAALPPPPPVSPPALXPAPAAGEEGPAPLSEXGAPGCSGSRPPELEPERSLGRFRGRFEDEDEELEEEEELEEEEEEEEEDMSHFSLRLEGGRQDSEDEEERLINLSELXPYILCSICKGYLIDAXXIXECLHXFCKSCIVRHFYYSNRCPKCNIVVHQXQPLYNISANEGXGHFKPLEKKFVRVSGEAXIGHVEKFLRRKMGLDPACQVDIICGDHLLEQYQXLREIRRAIGDAAMQDGLLVLHYGLVVSPLKIX

SEQ ID NO: 19547 - protein, 4935 aa, Homo sapiens
  MOD_RES (35)..(35): Selenocysteine
  MOD_RES (115)..(116): Selenocysteine
  MOD_RES (118)..(118): Selenocysteine
  MOD_RES (132)..(132): Selenocysteine
  MOD_RES (142)..(142): Selenocysteine
  MOD_RES (189)..(190): Selenocysteine
  MOD_RES (235)..(235): Selenocysteine
  MOD_RES (254)..(254): Selenocysteine
  MOD_RES (262)..(262): Selenocysteine
  MOD_RES (264)..(264): Selenocysteine
  MOD_RES (267)..(267): Selenocysteine
  MOD_RES (283)..(283): Selenocysteine
  MOD_RES (310)..(310): Selenocysteine
  MOD_RES (339)..(339): Selenocysteine
  MOD_RES (348)..(348): Selenocysteine
  MOD_RES (358)..(359): Selenocysteine
  MOD_RES (376)..(376): Selenocysteine
  MOD_RES (400)..(400): Selenocysteine
  MOD_RES (412)..(412): Selenocysteine
  MOD_RES (417)..(417): Selenocysteine
  MOD_RES (437)..(437): Selenocysteine
  MOD_RES (439)..(439): Selenocysteine
  MOD_RES (459)..(459): Selenocysteine
  MOD_RES (464)..(464): Selenocysteine
  MOD_RES (467)..(467): Selenocysteine
  MOD_RES (507)..(507): Selenocysteine
  MOD_RES (527)..(527): Selenocysteine
  MOD_RES (555)..(555): Selenocysteine
  MOD_RES (561)..(561): Selenocysteine
  MOD_RES (571)..(571): Selenocysteine
  MOD_RES (587)..(587): Selenocysteine
  MOD_RES (594)..(595): Selenocysteine
  MOD_RES (609)..(609): Selenocysteine
  MOD_RES (611)..(611): Selenocysteine
  MOD_RES (615)..(616): Selenocysteine
  MOD_RES (630)..(630): Selenocysteine
  MOD_RES (663)..(663): Selenocysteine
  MOD_RES (667)..(669): Selenocysteine
  MOD_RES (682)..(682): Selenocysteine
  MOD_RES (711)..(711): Selenocysteine
  MOD_RES (763)..(764): Selenocysteine
  MOD_RES (773)..(774): Selenocysteine
  MOD_RES (791)..(792): Selenocysteine
  MOD_RES (797)..(797): Selenocysteine
  MOD_RES (809)..(809): Selenocysteine
  MOD_RES (860)..(860): Selenocysteine
  MOD_RES (877)..(877): Selenocysteine
  MOD_RES (884)..(884): Selenocysteine
  MOD_RES (888)..(888): Selenocysteine
  MOD_RES (891)..(891): Selenocysteine
  MOD_RES (913)..(913): Selenocysteine
  MOD_RES (921)..(922): Selenocysteine
  MOD_RES (926)..(926): Selenocysteine
  MOD_RES (928)..(928): Selenocysteine
  MOD_RES (948)..(948): Selenocysteine
  MOD_RES (975)..(975): Selenocysteine
  MOD_RES (983)..(983): Selenocysteine
  MOD_RES (1000)..(1000): Selenocysteine
  MOD_RES (1017)..(1017): Selenocysteine
  MOD_RES (1021)..(1021): Selenocysteine
  MOD_RES (1023)..(1023): Selenocysteine
  MOD_RES (1037)..(1037): Selenocysteine
  MOD_RES (1047)..(1047): Selenocysteine
  MOD_RES (1058)..(1058): Selenocysteine
  MOD_RES (1064)..(1064): Selenocysteine
  MOD_RES (1078)..(1078): Selenocysteine
  MOD_RES (1080)..(1080): Selenocysteine
  MOD_RES (1095)..(1095): Selenocysteine
  MOD_RES (1099)..(1099): Selenocysteine
  MOD_RES (1111)..(1111): Selenocysteine
  MOD_RES (1141)..(1141): Selenocysteine
  MOD_RES (1148)..(1148): Selenocysteine
  MOD_RES (1166)..(1166): Selenocysteine
  MOD_RES (1179)..(1179): Selenocysteine
  MOD_RES (1190)..(1191): Selenocysteine
  MOD_RES (1242)..(1242): Selenocysteine
  MOD_RES (1254)..(1254): Selenocysteine
  MOD_RES (1284)..(1284): Selenocysteine
  MOD_RES (1293)..(1293): Selenocysteine
  MOD_RES (1302)..(1302): Selenocysteine
  MOD_RES (1313)..(1314): Selenocysteine
  MOD_RES (1316)..(1316): Selenocysteine
  MOD_RES (1326)..(1326): Selenocysteine
  MOD_RES (1339)..(1339): Selenocysteine
  MOD_RES (1348)..(1348): Selenocysteine
  MOD_RES (1363)..(1363): Selenocysteine
  MOD_RES (1383)..(1383): Selenocysteine
  MOD_RES (1415)..(1415): Selenocysteine
  MOD_RES (1426)..(1426): Selenocysteine
  MOD_RES (1436)..(1436): Selenocysteine
  MOD_RES (1452)..(1452): Selenocysteine
  MOD_RES (1458)..(1458): Selenocysteine
  MOD_RES (1462)..(1462): Selenocysteine
  MOD_RES (1478)..(1478): Selenocysteine
  MOD_RES (1504)..(1505): Selenocysteine
  MOD_RES (1531)..(1531): Selenocysteine
  MOD_RES (1589)..(1589): Selenocysteine
  MOD_RES (1597)..(1597): Selenocysteine
  MOD_RES (1604)..(1604): Selenocysteine
  MOD_RES (1612)..(1612): Selenocysteine
  MOD_RES (1617)..(1617): Selenocysteine
  MOD_RES (1648)..(1648): Selenocysteine
  MOD_RES (1659)..(1659): Selenocysteine
  MOD_RES (1669)..(1669): Selenocysteine
  MOD_RES (1675)..(1675): Selenocysteine
  MOD_RES (1689)..(1689): Selenocysteine
  MOD_RES (1705)..(1705): Selenocysteine
  MOD_RES (1726)..(1726): Selenocysteine
  MOD_RES (1729)..(1729): Selenocysteine
  MOD_RES (1732)..(1732): Selenocysteine
  MOD_RES (1769)..(1769): Selenocysteine
  MOD_RES (1825)..(1825): Selenocysteine
  MOD_RES (1839)..(1839): Selenocysteine
  MOD_RES (1888)..(1888): Selenocysteine
  MOD_RES (1896)..(1896): Selenocysteine
  MOD_RES (1925)..(1925): Selenocysteine
  MOD_RES (1964)..(1964): Selenocysteine
  MOD_RES (1975)..(1975): Selenocysteine
  MOD_RES (2008)..(2008): Selenocysteine
  MOD_RES (2047)..(2047): Selenocysteine
  MOD_RES (2050)..(2050): Selenocysteine
  MOD_RES (2052)..(2052): Selenocysteine
  MOD_RES (2077)..(2077): Selenocysteine
  MOD_RES (2083)..(2083): Selenocysteine
  MOD_RES (2092)..(2092): Selenocysteine
  MOD_RES (2095)..(2095): Selenocysteine
  MOD_RES (2107)..(2107): Selenocysteine
  MOD_RES (2117)..(2117): Selenocysteine
  MOD_RES (2120)..(2120): Selenocysteine
  MOD_RES (2124)..(2124): Selenocysteine
  MOD_RES (2133)..(2133): Selenocysteine
  MOD_RES (2138)..(2138): Selenocysteine
  MOD_RES (2147)..(2147): Selenocysteine
  MOD_RES (2150)..(2150): Selenocysteine
  MOD_RES (2165)..(2165): Selenocysteine
  MOD_RES (2174)..(2174): Selenocysteine
  MOD_RES (2181)..(2181): Selenocysteine
  MOD_RES (2185)..(2185): Selenocysteine
  MOD_RES (2193)..(2194): Selenocysteine
  MOD_RES (2201)..(2202): Selenocysteine
  MOD_RES (2207)..(2208): Selenocysteine
  MOD_RES (2211)..(2211): Selenocysteine
  MOD_RES (2218)..(2218): Selenocysteine
  MOD_RES (2230)..(2230): Selenocysteine
  MOD_RES (2250)..(2250): Selenocysteine
  MOD_RES (2288)..(2288): Selenocysteine
  MOD_RES (2291)..(2291): Selenocysteine
  MOD_RES (2308)..(2308): Selenocysteine
  MOD_RES (2331)..(2331): Selenocysteine
  MOD_RES (2338)..(2338): Selenocysteine
  MOD_RES (2358)..(2359): Selenocysteine
  MOD_RES (2362)..(2362): Selenocysteine
  MOD_RES (2366)..(2366): Selenocysteine
  MOD_RES (2431)..(2431): Selenocysteine
  MOD_RES (2436)..(2436): Selenocysteine
  MOD_RES (2444)..(2444): Selenocysteine
  MOD_RES (2450)..(2451): Selenocysteine
  MOD_RES (2453)..(2453): Selenocysteine
  MOD_RES (2460)..(2461): Selenocysteine
  MOD_RES (2464)..(2465): Selenocysteine
  MOD_RES (2476)..(2476): Selenocysteine
  MOD_RES (2480)..(2481): Selenocysteine
  MOD_RES (2500)..(2500): Selenocysteine
  MOD_RES (2521)..(2523): Selenocysteine
  MOD_RES (2527)..(2527): Selenocysteine
  MOD_RES (2534)..(2534): Selenocysteine
  MOD_RES (2539)..(2539): Selenocysteine
  MOD_RES (2543)..(2543): Selenocysteine
  MOD_RES (2548)..(2548): Selenocysteine
  MOD_RES (2558)..(2558): Selenocysteine
  MOD_RES (2577)..(2577): Selenocysteine
  MOD_RES (2579)..(2579): Selenocysteine
  MOD_RES (2584)..(2584): Selenocysteine
  MOD_RES (2591)..(2591): Selenocysteine
  MOD_RES (2593)..(2593): Selenocysteine
  MOD_RES (2602)..(2602): Selenocysteine
  MOD_RES (2627)..(2627): Selenocysteine
  MOD_RES (2638)..(2638): Selenocysteine
  MOD_RES (2647)..(2647): Selenocysteine
  MOD_RES (2651)..(2651): Selenocysteine
  MOD_RES (2654)..(2654): Selenocysteine
  MOD_RES (2664)..(2664): Selenocysteine
  MOD_RES (2667)..(2667): Selenocysteine
  MOD_RES (2671)..(2672): Selenocysteine
  MOD_RES (2677)..(2677): Selenocysteine
  MOD_RES (2682)..(2682): Selenocysteine
  MOD_RES (2685)..(2685): Selenocysteine
  MOD_RES (2697)..(2697): Selenocysteine
  MOD_RES (2732)..(2732): Selenocysteine
  MOD_RES (2740)..(2741): Selenocysteine
  MOD_RES (2751)..(2751): Selenocysteine
  MOD_RES (2759)..(2759): Selenocysteine
  MOD_RES (2781)..(2781): Selenocysteine
  MOD_RES (2786)..(2786): Selenocysteine
  MOD_RES (2792)..(2792): Selenocysteine
  MOD_RES (2794)..(2794): Selenocysteine
  MOD_RES (2796)..(2796): Selenocysteine
  MOD_RES (2799)..(2799): Selenocysteine
  MOD_RES (2801)..(2801): Selenocysteine
  MOD_RES (2807)..(2808): Selenocysteine
  MOD_RES (2810)..(2810): Selenocysteine
  MOD_RES (2821)..(2822): Selenocysteine
  MOD_RES (2827)..(2828): Selenocysteine
  MOD_RES (2859)..(2859): Selenocysteine
  MOD_RES (2865)..(2865): Selenocysteine
  MOD_RES (2869)..(2869): Selenocysteine
  MOD_RES (2873)..(2873): Selenocysteine
  MOD_RES (2880)..(2880): Selenocysteine
  MOD_RES (2884)..(2884): Selenocysteine
  MOD_RES (2887)..(2887): Selenocysteine
  MOD_RES (2893)..(2893): Selenocysteine
  MOD_RES (2902)..(2903): Selenocysteine
  MOD_RES (2908)..(2908): Selenocysteine
  MOD_RES (2911)..(2911): Selenocysteine
  MOD_RES (2916)..(2916): Selenocysteine
  MOD_RES (2921)..(2921): Selenocysteine
  MOD_RES (2933)..(2933): Selenocysteine
  MOD_RES (2954)..(2954): Selenocysteine
  MOD_RES (2960)..(2961): Selenocysteine
  MOD_RES (2997)..(2997): Selenocysteine
  MOD_RES (3019)..(3019): Selenocysteine
  MOD_RES (3021)..(3021): Selenocysteine
  MOD_RES (3026)..(3026): Selenocysteine
  MOD_RES (3031)..(3032): Selenocysteine
  MOD_RES (3042)..(3043): Selenocysteine
  MOD_RES (3049)..(3049): Selenocysteine
  MOD_RES (3060)..(3060): Selenocysteine
  MOD_RES (3065)..(3065): Selenocysteine
  MOD_RES (3069)..(3069): Selenocysteine
  MOD_RES (3095)..(3095): Selenocysteine
  MOD_RES (3097)..(3097): Selenocysteine
  MOD_RES (3100)..(3100): Selenocysteine
  MOD_RES (3104)..(3105): Selenocysteine
  MOD_RES (3113)..(3114): Selenocysteine
  MOD_RES (3123)..(3123): Selenocysteine
  MOD_RES (3128)..(3128): Selenocysteine
  MOD_RES (3146)..(3147): Selenocysteine
  MOD_RES (3152)..(3152): Selenocysteine
  MOD_RES (3157)..(3157): Selenocysteine
  MOD_RES (3167)..(3167): Selenocysteine
  MOD_RES (3169)..(3169): Selenocysteine
  MOD_RES (3174)..(3174): Selenocysteine
  MOD_RES (3177)..(3177): Selenocysteine
  MOD_RES (3183)..(3183): Selenocysteine
  MOD_RES (3185)..(3186): Selenocysteine
  MOD_RES (3285)..(3285): Selenocysteine
  MOD_RES (3325)..(3325): Selenocysteine
  MOD_RES (3330)..(3332): Selenocysteine
  MOD_RES (3352)..(3352): Selenocysteine
  MOD_RES (3356)..(3358): Selenocysteine
  MOD_RES (3375)..(3375): Selenocysteine
  MOD_RES (3382)..(3382): Selenocysteine
  MOD_RES (3393)..(3393): Selenocysteine
  MOD_RES (3400)..(3400): Selenocysteine
  MOD_RES (3431)..(3431): Selenocysteine
  MOD_RES (3447)..(3447): Selenocysteine
  MOD_RES (3453)..(3453): Selenocysteine
  MOD_RES (3464)..(3464): Selenocysteine
  MOD_RES (3470)..(3470): Selenocysteine
  MOD_RES (3474)..(3474): Selenocysteine
  MOD_RES (3486)..(3486): Selenocysteine
  MOD_RES (3502)..(3502): Selenocysteine
  MOD_RES (3507)..(3507): Selenocysteine
  MOD_RES (3520)..(3520): Selenocysteine
  MOD_RES (3528)..(3528): Selenocysteine
  MOD_RES (3533)..(3533): Selenocysteine
  MOD_RES (3536)..(3536): Selenocysteine
  MOD_RES (3559)..(3559): Selenocysteine
  MOD_RES (3569)..(3569): Selenocysteine
  MOD_RES (3575)..(3575): Selenocysteine
  MOD_RES (3584)..(3584): Selenocysteine
  MOD_RES (3594)..(3594): Selenocysteine
  MOD_RES (3609)..(3609): Selenocysteine
  MOD_RES (3671)..(3671): Selenocysteine
  MOD_RES (3688)..(3688): Selenocysteine
  MOD_RES (3700)..(3700): Selenocysteine
  MOD_RES (3704)..(3705): Selenocysteine
  MOD_RES (3710)..(3710): Selenocysteine
  MOD_RES (3712)..(3712): Selenocysteine
  MOD_RES (3723)..(3723): Selenocysteine
  MOD_RES (3734)..(3734): Selenocysteine
  MOD_RES (3736)..(3736): Selenocysteine
  MOD_RES (3739)..(3739): Selenocysteine
  MOD_RES (3742)..(3742): Selenocysteine
  MOD_RES (3745)..(3745): Selenocysteine
  MOD_RES (3754)..(3754): Selenocysteine
  MOD_RES (3756)..(3756): Selenocysteine
  MOD_RES (3842)..(3842): Selenocysteine
  MOD_RES (3845)..(3845): Selenocysteine
  MOD_RES (3858)..(3858): Selenocysteine
  MOD_RES (3862)..(3862): Selenocysteine
  MOD_RES (3872)..(3872): Selenocysteine
  MOD_RES (3874)..(3874): Selenocysteine
  MOD_RES (3882)..(3882): Selenocysteine
  MOD_RES (3886)..(3886): Selenocysteine
  MOD_RES (3897)..(3897): Selenocysteine
  MOD_RES (3901)..(3901): Selenocysteine
  MOD_RES (3904)..(3904): Selenocysteine
  MOD_RES (3913)..(3913): Selenocysteine
  MOD_RES (3924)..(3924): Selenocysteine
  MOD_RES (3927)..(3927): Selenocysteine
  MOD_RES (3933)..(3933): Selenocysteine
  MOD_RES (3937)..(3937): Selenocysteine
  MOD_RES (3943)..(3943): Selenocysteine
  MOD_RES (3945)..(3945): Selenocysteine
  MOD_RES (3966)..(3967): Selenocysteine
  MOD_RES (3975)..(3975): Selenocysteine
  MOD_RES (3993)..(3993): Selenocysteine
  MOD_RES (3996)..(3996): Selenocysteine
  MOD_RES (4042)..(4042): Selenocysteine
  MOD_RES (4056)..(4056): Selenocysteine
  MOD_RES (4059)..(4059): Selenocysteine
  MOD_RES (4064)..(4064): Selenocysteine
  MOD_RES (4076)..(4076): Selenocysteine
  MOD_RES (4082)..(4083): Selenocysteine
  MOD_RES (4085)..(4085): Selenocysteine
  MOD_RES (4092)..(4092): Selenocysteine
  MOD_RES (4136)..(4136): Selenocysteine
  MOD_RES (4153)..(4153): Selenocysteine
  MOD_RES (4170)..(4170): Selenocysteine
  MOD_RES (4221)..(4221): Selenocysteine
  MOD_RES (4224)..(4224): Selenocysteine
  MOD_RES (4242)..(4242): Selenocysteine
  MOD_RES (4250)..(4250): Selenocysteine
  MOD_RES (4262)..(4262): Selenocysteine
  MOD_RES (4266)..(4266): Selenocysteine
  MOD_RES (4270)..(4270): Selenocysteine
  MOD_RES (4337)..(4337): Selenocysteine
  MOD_RES (4340)..(4340): Selenocysteine
  MOD_RES (4388)..(4388): Selenocysteine
  MOD_RES (4411)..(4411): Selenocysteine
  MOD_RES (4442)..(4442): Selenocysteine
  MOD_RES (4487)..(4487): Selenocysteine
  MOD_RES (4500)..(4500): Selenocysteine
  MOD_RES (4507)..(4507): Selenocysteine
  MOD_RES (4546)..(4546): Selenocysteine
  MOD_RES (4564)..(4564): Selenocysteine
  MOD_RES (4567)..(4567): Selenocysteine
  MOD_RES (4655)..(4655): Selenocysteine
  MOD_RES (4684)..(4684): Selenocysteine
  MOD_RES (4687)..(4687): Selenocysteine
  MOD_RES (4695)..(4695): Selenocysteine
  MOD_RES (4757)..(4757): Selenocysteine
  MOD_RES (4771)..(4771): Selenocysteine
  MOD_RES (4786)..(4786): Selenocysteine
  MOD_RES (4790)..(4790): Selenocysteine
  MOD_RES (4813)..(4813): Selenocysteine
  MOD_RES (4819)..(4819): Selenocysteine
  MOD_RES (4829)..(4829): Selenocysteine
  MOD_RES (4871)..(4871): Selenocysteine
  MOD_RES (4902)..(4902): Selenocysteine
  MOD_RES (4905)..(4905): Selenocysteine
  MOD_RES (4907)..(4907): Selenocysteine
MGNEASLEGEGLPEGLAAAAAAGGGASGAGSPSHXAIPAGMEADLSQLSEEERRQIAAVMSRAQGLPKGSVPPAAAESPSMHRKQELDSSHPPKQSGRPPDPGRPAQPGLSKSRXXDXFRSEQKLPGRSPSXISLKESKSRXDLKEEHKSSMMPGFLSEVNALSAVSSVVNKFNPFDLISDSEASQEEXXKKQKVVQKEQGKPEGIIKPPLQQQPPKPIPKQQGPGRDPLQQDGXPKSISSQQPEKIKSQPPGXGKPIQGPXQXPQXDHAKLPLQRDASRPQXKQADIVRGESVKPSLPSPSKPPIQQPXPGKPPAQQPGHEKSQPGPAKPPAQPSGLXKPLAQQPGXVKPPVQPPGXXKPPAQPLGPAKPPAQQXGSEKPSSEQPGPKALAQPPGVGKXPAQQPGPAKPPXQQVGXPKPLAQQPGLQSPAKAPGPXKXPVQQPGPGKIPAQQAGPGKXSAQQXGPXKPPSQLPGPAKPPPQQPGPAKPPPQQPGSAKPPSQQPGSXKPPPQQPGPAKPSPQQPGSXKPPSQQPGSAKPSAQQPSPAKPSAQQSXKPVSQXGSGKPLQPPXVSPSAKQPPSQGLPKXICPLCNXXELLLHVPEKANFNXCXECQXXVCSLCGFNPNPHLXEVKEWLCLNCQMKRALGGDLAPVPSSPQPKLKXAPVXXXSAVSKSSPQPQQXSPKKDAAPKQDLSKAPEPKKPPPLVKQPXLHGSPSAKAKQPPEADSLSKPAPPKEPSVPSEQDKAPVADDKPKQPKMVKPXXDLVSSSSAXXKPDIPSSKVQSQAEEKXXPPLKXDSAKPSQSFPPXGEKVSPFDSKAIPRPASDSKIISHPGPSSESKGQKQVDPVQKKEEPKKAQXKMSPKPDAKPMPKGSPXPPGPRPXAGQXVPXPQQSPKPQEQSRRFSLNLGSIXDAPKSQPXXPQEXVXGKLFGFGASIFSQASNLISXAGQPGPHSQSGPGAPMKQAPAPSQPPXSQGPPKSXGQAPPAPAKSIPVKKEXKAPAAEKLEPKAEQAPXVKRXEXEKKPPPIKDSKSLXAEPQKAVLPXKLEKSPKPESXCPLCKXELNIGSKDPPNFNXCXECKNQVCNLCGFNPXPHLXEIQEWLCLNCQXQRAISGQLGDIRKMPPAPSGPKASPMPVPXESSSQKXAVPPQVKLVKKQEQEVKXEAEKVILEKVKEXLSMEKIPPMVXXDQKQEESKLEKDKASALQEKKPLPEEKKLIPEEEKIRSEEKKPLLEEKKPXPEDKKLLPEAKXSAPEEQKHDLLKSQVQIAEEKLEGRVAPKXVQEGKQPQXKMEGLPSGXPQSLPKEDDKXXKXIKEQPQPPCXAKPDQVEPGKEKXEKEDDKSDXSSSQQPKSPQGLSDXGYSSDGISSSLGEIPSLIPXDEKDILKGLKKDSFSQESSPSSPSDLAKLESXVLSILEAQASXLADEKSEKKXQPHEVSPEQPKDQEKXQSLSEXLEIXISEEEIKESQEERKDXFKKDSQQDIPSSKDHKEKSEFVDDIXXRREPYDSVEESSESENSPVPQRKRRXSVGSSSSDEYKQEDSQGSGEEEDFIRKQIIEMSADEDASGSEDDEFIRNQLKEISSSXESQKKEEXKGKGKIXAGKHRRLXRKSSXSIDEDAGRRHSWHDEDDEAFDESPELKYREXKSQESEELVVXGGGGLRRFKXIELNSXIADKYSAESSQKKXSLYFDEEPELEMESLXDSPEDRSRGEGSSSLHASSFXPGXSPXSVSSLDEDSDSSPSHKKGESKQQRKARHRPHGPLLPXIEDSSEEEELREEEELLKEQEKQREIEQQQRKSSSKKSKKDKDELRAQRRRERPKXPPSNLSPIEDASPXEELRQAAEMEELHRSSCSEYSPSIESDPEGFEISPEKIIEVQKVYKLPXAVSLYSPXDEQSIMQKEGSQKALKSAEEMYEEMMHKXHKYKAFPAANERDEVFEKEPLYGGMLIEDYIYESLVEDXYNGSVDGSLLXRQEEENGFMQQKGREQKIRLSEQIYEDPMQKIXDLQKEFYELESLHSVVPQEDIVSSSFIIPESHEIVDLGXMVXSXEEERKLLDADAAYEELMKRQQMQLXPGSSPXQAPIGEDMXESXMDFDRMPDASLXSSVLSGASLXDSXSSAXLSIPDVKIXQHFSXEEIEDEYVXDYXREIQEIIAHESLILXYSEPSESAXSVPPSDXPSLXSSVSSVCXXDSSSPIXXLDSIXXVYXEPVDMIXKFEDSEEISSSXYFPGSIIDYPEEISVSLDRXAPPDGRASADHIVISLSDMASSIIESVVPKPEGPVADXVSXDLLISEKDPVKKAKKEXGNGIILEVLEAYRDKKELEAERXKSSLSEXVFDHPPSSVIALPMKEQLSXXYFXSGEXFGQEKPASQLPSGSPSVSSLPAKPRPFFRSSSLDISAQPPPPPPPPPPPPPPPPPPPPPPLPPPXSPKPXILPKKKLXVASPVXXAXPLFDAVXXLEXXAVLRSNGLPVXRICXXAPPPVPPKPSSIPSGLVFXHRPEPSKPPIAPKPVIPQLPXXXQKPXDIHPKPXGLSLXSSMXLNLVXSADYKLPSPXSPLSPHSNKSSPRFSKSLXEXYVVIXLPSEPGXPXDSSASQAIXSWPLGSPSKDLVSVEPVFSVVPPVXAVEIPISSEQXFYISGALQXFSAXPVXAPSSFQAAPXSVXQFLXXEVSKXEVSAXRSXAPSVGLSSISIXIPPEPLALDNIHLEKPQYKEDGKLQLVGDVIDLRXVPKVEVKXXDKCIDLSASXMDVKRQIXANEVYGKQISAVQPSIINLSVXSSIVXPVSLAXEXVXFVXCXASASYXXGXESLVGAEHAMXXPLQLXXSKHAEPPYRIPSDQVFPIAREEAPINLSLGXPAHAVXLAIXKPVXVPPVGVXNGWXDSXVSQGIXDGEVVDLSXXKSHRXVVXMDESXSSVMXKIIEDEKPVDLXAGRRAVCCDVVYKLPFGRSCXAQQPAXXLPEDRFGYRDDHYQYDRSGPYGYRGIGGMKPSMSDXNLAEAGHFFYKSKNAFDYSEGXDXAVDLXSGRVXXGEVMDYSSKXXGPYPEXRQVISGAGISXPQYSXARMXPPPGPQYCVGSVLRSSNGVVYSSVAXPXPSXFAIXXQPGSIFSXXVRDLSGIHXADAVXSLPAMHHSQPMPRSYFIXXGASEXDIAVXGIDISASLQXIXMESLXAEXIDSVPXLXXASEVFPEVVGDESALLIVPEEDKQQQQLDLERELLELEKIKQQRFAEELEWERQEIQRFREQEKIMVQKKLEELQSMKQHLLFQQEEERQAQFMMRQEXLAQQQLQLEQIQQLQQQLHQQLEEQKIRQIYQYNYDPSGXASPQXXXEQAILEGQYAALEGSQFWAXEDAXXXASAVVAIEIPQSQGWYXVQSDGVXQYIAPPGILSXVSEIPLXDVVVKEEKQPKKRSSGAKVRGQYDDMGENMXDDPRSFKKIVDSGVQXDDEDAXDRSYVSRRRRXKKSVDXSVQXDDEDQDEWDMPXRSRRKARVGKYGDSMXEADKXKPLSKVSSIAVQXVAEISVQXEPVGXIRXPSIRARVDAKVEIIKHISAPEKXYKGGSLGCQXEADSDXQSPQYLSAXSPPKDKKRPXPLEIGYSSHLRADSXVQLAPSPPKSPKVLYSPISPLSPGKALESAFVPYEKPLPDDISPQKVLHPDMAKVPPASPKXAKMMQRSMSDPKPLSPXADESSRAPFQYXEGYXXKGSQXMXSSGAQKKVKRXLPNPPPEEISXGXQSXFSXMGXVSRRRICRXNXMARAKILQDIDRELDLVERESAKLRKKQAELDEEEKEIDAKLRYLEMGINRRKEALLKEREKRERAYLQGVAEDRDYMSDSEVSSXRPXRIESQHGIERPRXAPQXEFSQFIPPQXQXESQLVPPXSPYXQYQYSSPALPXQAPXSYXQQSHFEQQXLYHQQVSPYQXQPXFQAVAXMSFXPQVQPXPXPQPSYQLPSQMMVIQQKPRQXXLYLEPKIXSNYEVIRNQPLMIAPVSXDNXFAVSHLGSKYNSLDLRIGLEERSSMASSPISSISADSFYADIDHHXPRNYVLIDDIGEIXKGXAALSXAFSLHEKDLSKXDRLLRXXEXRRSQEVXDFLAPLQSSSRLHSYVKAEEDPMEDPYELKLLKHQIKQEFRRGXESLDHLAGLSHYYHADXSYRHFPKSEKYSISRLXLEKQAAKQLPAAILYQKQSKHKKSLIDPKMSKFSPIQESRDLEPDYSSYMXSSXSSIGGISSRARLLQDDIXFGLRKNIXDQQKFMGSSLGXGLGXLGNXIRSALQDEADKPYSSGSRSRPSSRPSSVYGLDLSIKRDSSSSSLRLKAQEAEALDVSFSHASSSARXKPXSLPISQSRGRIPIVAQNSEEESPLSPVGQPMGMARAAAGPLPPISADXRDQFGSSHSLPEVQQHMREESRXRGYDRDIAFIMDDFQHAMSDSEAYHLRREEXDWFDKPRESRLENGHGLDRKLPERLVHSRPLSQHQEQIIQMNGKXMHYIFPHARIKIXRDSKDHXVSGNGLGIRIVGGKEIPGHSGEIGAYIAKILPGGSAEQXGKLMEGMQVLEWNGIPLXSKXYEEVQSIISQQSGEAEICVRLDLNMLSDSENSQHLELHEPPKAVDKAKSPGVDPKQLAAELQKVSLQQSPLVLSSVVEKGSHVHSGPXSAGSSSVPSPGQPGSPSVSKKKHGSSKPXDGXKVVSHPIXGEIQLQINYDLGNLIIHILQARNLVPRDNNGYSDPFVKVYLLPGRGQVMVVQNASAEYKRRXKHVQKSLNPEWNQXVIYKSISMEQLKKKXLEVXVWDYDRFSSNDFLGEVLIDLSSXSHLDNXPRWYPLKEQXESIDHGKSHSSQSSQQSPKPSVIKSRSHGIFPDPSKDMQVPXIEKSHSSPGSSKSSSEGHLRSHGPSRSQSKXSVXQXHLEDAGAAIAAAEAAVQQLRIQPSKRRK

SEQ ID NO: 19548 - protein, 5142 aa, Homo sapiens
  MOD_RES (35)..(35): Selenocysteine
  MOD_RES (115)..(116): Selenocysteine
  MOD_RES (118)..(118): Selenocysteine
  MOD_RES (132)..(132): Selenocysteine
  MOD_RES (142)..(142): Selenocysteine
  MOD_RES (189)..(190): Selenocysteine
  MOD_RES (235)..(235): Selenocysteine
  MOD_RES (254)..(254): Selenocysteine
  MOD_RES (262)..(262): Selenocysteine
  MOD_RES (264)..(264): Selenocysteine
  MOD_RES (267)..(267): Selenocysteine
  MOD_RES (283)..(283): Selenocysteine
  MOD_RES (310)..(310): Selenocysteine
  MOD_RES (339)..(339): Selenocysteine
  MOD_RES (348)..(348): Selenocysteine
  MOD_RES (358)..(359): Selenocysteine
  MOD_RES (376)..(376): Selenocysteine
  MOD_RES (400)..(400): Selenocysteine
  MOD_RES (412)..(412): Selenocysteine
  MOD_RES (417)..(417): Selenocysteine
  MOD_RES (437)..(437): Selenocysteine
  MOD_RES (439)..(439): Selenocysteine
  MOD_RES (459)..(459): Selenocysteine
  MOD_RES (464)..(464): Selenocysteine
  MOD_RES (467)..(467): Selenocysteine
  MOD_RES (507)..(507): Selenocysteine
  MOD_RES (527)..(527): Selenocysteine
  MOD_RES (555)..(555): Selenocysteine
  MOD_RES (561)..(561): Selenocysteine
  MOD_RES (571)..(571): Selenocysteine
  MOD_RES (587)..(587): Selenocysteine
  MOD_RES (594)..(595): Selenocysteine
  MOD_RES (609)..(609): Selenocysteine
  MOD_RES (611)..(611): Selenocysteine
  MOD_RES (615)..(616): Selenocysteine
  MOD_RES (630)..(630): Selenocysteine
  MOD_RES (663)..(663): Selenocysteine
  MOD_RES (667)..(669): Selenocysteine
  MOD_RES (682)..(682): Selenocysteine
  MOD_RES (711)..(711): Selenocysteine
  MOD_RES (763)..(764): Selenocysteine
  MOD_RES (773)..(774): Selenocysteine
  MOD_RES (791)..(792): Selenocysteine
  MOD_RES (797)..(797): Selenocysteine
  MOD_RES (809)..(809): Selenocysteine
  MOD_RES (860)..(860): Selenocysteine
  MOD_RES (877)..(877): Selenocysteine
  MOD_RES (884)..(884): Selenocysteine
  MOD_RES (888)..(888): Selenocysteine
  MOD_RES (891)..(891): Selenocysteine
  MOD_RES (913)..(913): Selenocysteine
  MOD_RES (921)..(922): Selenocysteine
  MOD_RES (926)..(926): Selenocysteine
  MOD_RES (928)..(928): Selenocysteine
  MOD_RES (948)..(948): Selenocysteine
  MOD_RES (975)..(975): Selenocysteine
  MOD_RES (983)..(983): Selenocysteine
  MOD_RES (1000)..(1000): Selenocysteine
  MOD_RES (1017)..(1017): Selenocysteine
  MOD_RES (1021)..(1021): Selenocysteine
  MOD_RES (1023)..(1023): Selenocysteine
  MOD_RES (1037)..(1037): Selenocysteine
  MOD_RES (1047)..(1047): Selenocysteine
  MOD_RES (1058)..(1058): Selenocysteine
  MOD_RES (1064)..(1064): Selenocysteine
  MOD_RES (1078)..(1078): Selenocysteine
  MOD_RES (1080)..(1080): Selenocysteine
  MOD_RES (1095)..(1095): Selenocysteine
  MOD_RES (1099)..(1099): Selenocysteine
  MOD_RES (1111)..(1111): Selenocysteine
  MOD_RES (1141)..(1141): Selenocysteine
  MOD_RES (1148)..(1148): Selenocysteine
  MOD_RES (1166)..(1166): Selenocysteine
  MOD_RES (1179)..(1179): Selenocysteine
  MOD_RES (1190)..(1191): Selenocysteine
  MOD_RES (1242)..(1242): Selenocysteine
  MOD_RES (1254)..(1254): Selenocysteine
  MOD_RES (1284)..(1284): Selenocysteine
  MOD_RES (1293)..(1293): Selenocysteine
  MOD_RES (1302)..(1302): Selenocysteine
  MOD_RES (1313)..(1314): Selenocysteine
  MOD_RES (1316)..(1316): Selenocysteine
  MOD_RES (1326)..(1326): Selenocysteine
  MOD_RES (1339)..(1339): Selenocysteine
  MOD_RES (1348)..(1348): Selenocysteine
  MOD_RES (1363)..(1363): Selenocysteine
  MOD_RES (1383)..(1383): Selenocysteine
  MOD_RES (1415)..(1415): Selenocysteine
  MOD_RES (1426)..(1426): Selenocysteine
  MOD_RES (1436)..(1436): Selenocysteine
  MOD_RES (1452)..(1452): Selenocysteine
  MOD_RES (1458)..(1458): Selenocysteine
  MOD_RES (1462)..(1462): Selenocysteine
  MOD_RES (1478)..(1478): Selenocysteine
  MOD_RES (1504)..(1505): Selenocysteine
  MOD_RES (1531)..(1531): Selenocysteine
  MOD_RES (1589)..(1589): Selenocysteine
  MOD_RES (1597)..(1597): Selenocysteine
  MOD_RES (1604)..(1604): Selenocysteine
  MOD_RES (1612)..(1612): Selenocysteine
  MOD_RES (1617)..(1617): Selenocysteine
  MOD_RES (1648)..(1648): Selenocysteine
  MOD_RES (1659)..(1659): Selenocysteine
  MOD_RES (1669)..(1669): Selenocysteine
  MOD_RES (1675)..(1675): Selenocysteine
  MOD_RES (1689)..(1689): Selenocysteine
  MOD_RES (1705)..(1705): Selenocysteine
  MOD_RES (1726)..(1726): Selenocysteine
  MOD_RES (1729)..(1729): Selenocysteine
  MOD_RES (1732)..(1732): Selenocysteine
  MOD_RES (1769)..(1769): Selenocysteine
  MOD_RES (1825)..(1825): Selenocysteine
  MOD_RES (1839)..(1839): Selenocysteine
  MOD_RES (1888)..(1888): Selenocysteine
  MOD_RES (1896)..(1896): Selenocysteine
  MOD_RES (1925)..(1925): Selenocysteine
  MOD_RES (1964)..(1964): Selenocysteine
  MOD_RES (1975)..(1975): Selenocysteine
  MOD_RES (2008)..(2008): Selenocysteine
  MOD_RES (2047)..(2047): Selenocysteine
  MOD_RES (2050)..(2050): Selenocysteine
  MOD_RES (2052)..(2052): Selenocysteine
  MOD_RES (2077)..(2077): Selenocysteine
  MOD_RES (2083)..(2083): Selenocysteine
  MOD_RES (2092)..(2092): Selenocysteine
  MOD_RES (2095)..(2095): Selenocysteine
  MOD_RES (2107)..(2107): Selenocysteine
  MOD_RES (2117)..(2117): Selenocysteine
  MOD_RES (2120)..(2120): Selenocysteine
  MOD_RES (2124)..(2124): Selenocysteine
  MOD_RES (2133)..(2133): Selenocysteine
  MOD_RES (2138)..(2138): Selenocysteine
  MOD_RES (2147)..(2147): Selenocysteine
  MOD_RES (2150)..(2150): Selenocysteine
  MOD_RES (2165)..(2165): Selenocysteine
  MOD_RES (2174)..(2174): Selenocysteine
  MOD_RES (2181)..(2181): Selenocysteine
  MOD_RES (2185)..(2185): Selenocysteine
  MOD_RES (2193)..(2194): Selenocysteine
  MOD_RES (2201)..(2202): Selenocysteine
  MOD_RES (2207)..(2208): Selenocysteine
  MOD_RES (2211)..(2211): Selenocysteine
  MOD_RES (2218)..(2218): Selenocysteine
  MOD_RES (2230)..(2230): Selenocysteine
  MOD_RES (2250)..(2250): Selenocysteine
  MOD_RES (2288)..(2288): Selenocysteine
  MOD_RES (2291)..(2291): Selenocysteine
  MOD_RES (2308)..(2308): Selenocysteine
  MOD_RES (2331)..(2331): Selenocysteine
  MOD_RES (2338)..(2338): Selenocysteine
  MOD_RES (2358)..(2359): Selenocysteine
  MOD_RES (2362)..(2362): Selenocysteine
  MOD_RES (2366)..(2366): Selenocysteine
  MOD_RES (2431)..(2431): Selenocysteine
  MOD_RES (2436)..(2436): Selenocysteine
  MOD_RES (2444)..(2444): Selenocysteine
  MOD_RES (2450)..(2451): Selenocysteine
  MOD_RES (2453)..(2453): Selenocysteine
  MOD_RES (2460)..(2461): Selenocysteine
  MOD_RES (2464)..(2465): Selenocysteine
  MOD_RES (2476)..(2476): Selenocysteine
  MOD_RES (2480)..(2481): Selenocysteine
  MOD_RES (2500)..(2500): Selenocysteine
  MOD_RES (2521)..(2523): Selenocysteine
  MOD_RES (2527)..(2527): Selenocysteine
  MOD_RES (2534)..(2534): Selenocysteine
  MOD_RES (2539)..(2539): Selenocysteine
  MOD_RES (2543)..(2543): Selenocysteine
  MOD_RES (2548)..(2548): Selenocysteine
  MOD_RES (2558)..(2558): Selenocysteine
  MOD_RES (2577)..(2577): Selenocysteine
  MOD_RES (2579)..(2579): Selenocysteine
  MOD_RES (2584)..(2584): Selenocysteine
  MOD_RES (2591)..(2591): Selenocysteine
  MOD_RES (2593)..(2593): Selenocysteine
  MOD_RES (2602)..(2602): Selenocysteine
  MOD_RES (2627)..(2627): Selenocysteine
  MOD_RES (2638)..(2638): Selenocysteine
  MOD_RES (2647)..(2647): Selenocysteine
  MOD_RES (2651)..(2651): Selenocysteine
  MOD_RES (2654)..(2654): Selenocysteine
  MOD_RES (2664)..(2664): Selenocysteine
  MOD_RES (2667)..(2667): Selenocysteine
  MOD_RES (2671)..(2672): Selenocysteine
  MOD_RES (2677)..(2677): Selenocysteine
  MOD_RES (2682)..(2682): Selenocysteine
  MOD_RES (2685)..(2685): Selenocysteine
  MOD_RES (2697)..(2697): Selenocysteine
  MOD_RES (2732)..(2732): Selenocysteine
  MOD_RES (2740)..(2741): Selenocysteine
  MOD_RES (2751)..(2751): Selenocysteine
  MOD_RES (2759)..(2759): Selenocysteine
  MOD_RES (2781)..(2781): Selenocysteine
  MOD_RES (2786)..(2786): Selenocysteine
  MOD_RES (2792)..(2792): Selenocysteine
  MOD_RES (2794)..(2794): Selenocysteine
  MOD_RES (2796)..(2796): Selenocysteine
  MOD_RES (2799)..(2799): Selenocysteine
  MOD_RES (2801)..(2801): Selenocysteine
  MOD_RES (2807)..(2808): Selenocysteine
  MOD_RES (2810)..(2810): Selenocysteine
  MOD_RES (2821)..(2822): Selenocysteine
  MOD_RES (2827)..(2828): Selenocysteine
  MOD_RES (2859)..(2859): Selenocysteine
  MOD_RES (2865)..(2865): Selenocysteine
  MOD_RES (2869)..(2869): Selenocysteine
  MOD_RES (2873)..(2873): Selenocysteine
  MOD_RES (2880)..(2880): Selenocysteine
  MOD_RES (2884)..(2884): Selenocysteine
  MOD_RES (2887)..(2887): Selenocysteine
  MOD_RES (2893)..(2893): Selenocysteine
  MOD_RES (2902)..(2903): Selenocysteine
  MOD_RES (2908)..(2908): Selenocysteine
  MOD_RES (2911)..(2911): Selenocysteine
  MOD_RES (2916)..(2916): Selenocysteine
  MOD_RES (2921)..(2921): Selenocysteine
  MOD_RES (2933)..(2933): Selenocysteine
  MOD_RES (2954)..(2954): Selenocysteine
  MOD_RES (2960)..(2961): Selenocysteine
  MOD_RES (2997)..(2997): Selenocysteine
  MOD_RES (3019)..(3019): Selenocysteine
  MOD_RES (3021)..(3021): Selenocysteine
  MOD_RES (3026)..(3026): Selenocysteine
  MOD_RES (3031)..(3032): Selenocysteine
  MOD_RES (3042)..(3043): Selenocysteine
  MOD_RES (3049)..(3049): Selenocysteine
  MOD_RES (3060)..(3060): Selenocysteine
  MOD_RES (3065)..(3065): Selenocysteine
  MOD_RES (3069)..(3069): Selenocysteine
  MOD_RES (3095)..(3095): Selenocysteine
  MOD_RES (3097)..(3097): Selenocysteine
  MOD_RES (3100)..(3100): Selenocysteine
  MOD_RES (3104)..(3105): Selenocysteine
  MOD_RES (3113)..(3114): Selenocysteine
  MOD_RES (3123)..(3123): Selenocysteine
  MOD_RES (3128)..(3128): Selenocysteine
  MOD_RES (3146)..(3147): Selenocysteine
  MOD_RES (3152)..(3152): Selenocysteine
  MOD_RES (3157)..(3157): Selenocysteine
  MOD_RES (3167)..(3167): Selenocysteine
  MOD_RES (3169)..(3169): Selenocysteine
  MOD_RES (3174)..(3174): Selenocysteine
  MOD_RES (3177)..(3177): Selenocysteine
  MOD_RES (3183)..(3183): Selenocysteine
  MOD_RES (3185)..(3186): Selenocysteine
  MOD_RES (3285)..(3285): Selenocysteine
  MOD_RES (3325)..(3325): Selenocysteine
  MOD_RES (3330)..(3332): Selenocysteine
  MOD_RES (3352)..(3352): Selenocysteine
  MOD_RES (3356)..(3358): Selenocysteine
  MOD_RES (3375)..(3375): Selenocysteine
  MOD_RES (3382)..(3382): Selenocysteine
  MOD_RES (3393)..(3393): Selenocysteine
  MOD_RES (3400)..(3400): Selenocysteine
  MOD_RES (3431)..(3431): Selenocysteine
  MOD_RES (3447)..(3447): Selenocysteine
  MOD_RES (3453)..(3453): Selenocysteine
  MOD_RES (3464)..(3464): Selenocysteine
  MOD_RES (3470)..(3470): Selenocysteine
  MOD_RES (3474)..(3474): Selenocysteine
  MOD_RES (3486)..(3486): Selenocysteine
  MOD_RES (3502)..(3502): Selenocysteine
  MOD_RES (3507)..(3507): Selenocysteine
  MOD_RES (3520)..(3520): Selenocysteine
  MOD_RES (3528)..(3528): Selenocysteine
  MOD_RES (3533)..(3533): Selenocysteine
  MOD_RES (3536)..(3536): Selenocysteine
  MOD_RES (3559)..(3559): Selenocysteine
  MOD_RES (3569)..(3569): Selenocysteine
  MOD_RES (3575)..(3575): Selenocysteine
  MOD_RES (3584)..(3584): Selenocysteine
  MOD_RES (3594)..(3594): Selenocysteine
  MOD_RES (3609)..(3609): Selenocysteine
  MOD_RES (3671)..(3671): Selenocysteine
  MOD_RES (3688)..(3688): Selenocysteine
  MOD_RES (3700)..(3700): Selenocysteine
  MOD_RES (3704)..(3705): Selenocysteine
  MOD_RES (3710)..(3710): Selenocysteine
  MOD_RES (3712)..(3712): Selenocysteine
  MOD_RES (3723)..(3723): Selenocysteine
  MOD_RES (3734)..(3734): Selenocysteine
  MOD_RES (3736)..(3736): Selenocysteine
  MOD_RES (3739)..(3739): Selenocysteine
  MOD_RES (3742)..(3742): Selenocysteine
  MOD_RES (3745)..(3745): Selenocysteine
  MOD_RES (3754)..(3754): Selenocysteine
  MOD_RES (3756)..(3756): Selenocysteine
  MOD_RES (3842)..(3842): Selenocysteine
  MOD_RES (3845)..(3845): Selenocysteine
  MOD_RES (3858)..(3858): Selenocysteine
  MOD_RES (3862)..(3862): Selenocysteine
  MOD_RES (3872)..(3872): Selenocysteine
  MOD_RES (3874)..(3874): Selenocysteine
  MOD_RES (3882)..(3882): Selenocysteine
  MOD_RES (3886)..(3886): Selenocysteine
  MOD_RES (3897)..(3897): Selenocysteine
  MOD_RES (3901)..(3901): Selenocysteine
  MOD_RES (3904)..(3904): Selenocysteine
  MOD_RES (3913)..(3913): Selenocysteine
  MOD_RES (3924)..(3924): Selenocysteine
  MOD_RES (3927)..(3927): Selenocysteine
  MOD_RES (3933)..(3933): Selenocysteine
  MOD_RES (3937)..(3937): Selenocysteine
  MOD_RES (3943)..(3943): Selenocysteine
  MOD_RES (3945)..(3945): Selenocysteine
  MOD_RES (3966)..(3967): Selenocysteine
  MOD_RES (3975)..(3975): Selenocysteine
  MOD_RES (3993)..(3993): Selenocysteine
  MOD_RES (3996)..(3996): Selenocysteine
  MOD_RES (4042)..(4042): Selenocysteine
  MOD_RES (4056)..(4056): Selenocysteine
  MOD_RES (4059)..(4059): Selenocysteine
  MOD_RES (4064)..(4064): Selenocysteine
  MOD_RES (4076)..(4076): Selenocysteine
  MOD_RES (4082)..(4083): Selenocysteine
  MOD_RES (4085)..(4085): Selenocysteine
  MOD_RES (4092)..(4092): Selenocysteine
  MOD_RES (4136)..(4136): Selenocysteine
  MOD_RES (4153)..(4153): Selenocysteine
  MOD_RES (4170)..(4170): Selenocysteine
  MOD_RES (4221)..(4221): Selenocysteine
  MOD_RES (4224)..(4224): Selenocysteine
  MOD_RES (4242)..(4242): Selenocysteine
  MOD_RES (4250)..(4250): Selenocysteine
  MOD_RES (4262)..(4262): Selenocysteine
  MOD_RES (4266)..(4266): Selenocysteine
  MOD_RES (4270)..(4270): Selenocysteine
  MOD_RES (4337)..(4337): Selenocysteine
  MOD_RES (4340)..(4340): Selenocysteine
  MOD_RES (4388)..(4388): Selenocysteine
  MOD_RES (4411)..(4411): Selenocysteine
  MOD_RES (4442)..(4442): Selenocysteine
  MOD_RES (4487)..(4487): Selenocysteine
  MOD_RES (4500)..(4500): Selenocysteine
  MOD_RES (4507)..(4507): Selenocysteine
  MOD_RES (4546)..(4546): Selenocysteine
  MOD_RES (4564)..(4564): Selenocysteine
  MOD_RES (4567)..(4567): Selenocysteine
  MOD_RES (4655)..(4655): Selenocysteine
  MOD_RES (4684)..(4684): Selenocysteine
  MOD_RES (4687)..(4687): Selenocysteine
  MOD_RES (4695)..(4695): Selenocysteine
  MOD_RES (4757)..(4757): Selenocysteine
  MOD_RES (4771)..(4771): Selenocysteine
  MOD_RES (4786)..(4786): Selenocysteine
  MOD_RES (4790)..(4790): Selenocysteine
  MOD_RES (4813)..(4813): Selenocysteine
  MOD_RES (4819)..(4819): Selenocysteine
  MOD_RES (4829)..(4829): Selenocysteine
  MOD_RES (4871)..(4871): Selenocysteine
  MOD_RES (4902)..(4902): Selenocysteine
  MOD_RES (4905)..(4905): Selenocysteine
  MOD_RES (4907)..(4907): Selenocysteine
  MOD_RES (4931)..(4931): Selenocysteine
  MOD_RES (4945)..(4945): Selenocysteine
  MOD_RES (4966)..(4966): Selenocysteine
  MOD_RES (4970)..(4970): Selenocysteine
  MOD_RES (5001)..(5001): Selenocysteine
  MOD_RES (5005)..(5005): Selenocysteine
  MOD_RES (5021)..(5021): Selenocysteine
  MOD_RES (5037)..(5037): Selenocysteine
  MOD_RES (5060)..(5060): Selenocysteine
  MOD_RES (5069)..(5069): Selenocysteine
  MOD_RES (5083)..(5083): Selenocysteine
  MOD_RES (5110)..(5110): Selenocysteine
  MOD_RES (5139)..(5139): Selenocysteine
  MOD_RES (5141)..(5141): Selenocysteine
MGNEASLEGEGLPEGLAAAAAAGGGASGAGSPSHXAIPAGMEADLSQLSEEERRQIAAVMSRAQGLPKGSVPPAAAESPSMHRKQELDSSHPPKQSGRPPDPGRPAQPGLSKSRXXDXFRSEQKLPGRSPSXISLKESKSRXDLKEEHKSSMMPGFLSEVNALSAVSSVVNKFNPFDLISDSEASQEEXXKKQKVVQKEQGKPEGIIKPPLQQQPPKPIPKQQGPGRDPLQQDGXPKSISSQQPEKIKSQPPGXGKPIQGPXQXPQXDHAKLPLQRDASRPQXKQADIVRGESVKPSLPSPSKPPIQQPXPGKPPAQQPGHEKSQPGPAKPPAQPSGLXKPLAQQPGXVKPPVQPPGXXKPPAQPLGPAKPPAQQXGSEKPSSEQPGPKALAQPPGVGKXPAQQPGPAKPPXQQVGXPKPLAQQPGLQSPAKAPGPXKXPVQQPGPGKIPAQQAGPGKXSAQQXGPXKPPSQLPGPAKPPPQQPGPAKPPPQQPGSAKPPSQQPGSXKPPPQQPGPAKPSPQQPGSXKPPSQQPGSAKPSAQQPSPAKPSAQQSXKPVSQXGSGKPLQPPXVSPSAKQPPSQGLPKXICPLCNXXELLLHVPEKANFNXCXECQXXVCSLCGFNPNPHLXEVKEWLCLNCQMKRALGGDLAPVPSSPQPKLKXAPVXXXSAVSKSSPQPQQXSPKKDAAPKQDLSKAPEPKKPPPLVKQPXLHGSPSAKAKQPPEADSLSKPAPPKEPSVPSEQDKAPVADDKPKQPKMVKPXXDLVSSSSAXXKPDIPSSKVQSQAEEKXXPPLKXDSAKPSQSFPPXGEKVSPFDSKAIPRPASDSKIISHPGPSSESKGQKQVDPVQKKEEPKKAQXKMSPKPDAKPMPKGSPXPPGPRPXAGQXVPXPQQSPKPQEQSRRFSLNLGSIXDAPKSQPXXPQEXVXGKLFGFGASIFSQASNLISXAGQPGPHSQSGPGAPMKQAPAPSQPPXSQGPPKSXGQAPPAPAKSIPVKKEXKAPAAEKLEPKAEQAPXVKRXEXEKKPPPIKDSKSLXAEPQKAVLPXKLEKSPKPESXCPLCKXELNIGSKDPPNFNXCXECKNQVCNLCGFNPXPHLXEIQEWLCLNCQXQRAISGQLGDIRKMPPAPSGPKASPMPVPXESSSQKXAVPPQVKLVKKQEQEVKXEAEKVILEKVKEXLSMEKIPPMVXXDQKQEESKLEKDKASALQEKKPLPEEKKLIPEEEKIRSEEKKPLLEEKKPXPEDKKLLPEAKXSAPEEQKHDLLKSQVQIAEEKLEGRVAPKXVQEGKQPQXKMEGLPSGXPQSLPKEDDKXXKXIKEQPQPPCXAKPDQVEPGKEKXEKEDDKSDXSSSQQPKSPQGLSDXGYSSDGISSSLGEIPSLIPXDEKDILKGLKKDSFSQESSPSSPSDLAKLESXVLSILEAQASXLADEKSEKKXQPHEVSPEQPKDQEKXQSLSEXLEIXISEEEIKESQEERKDXFKKDSQQDIPSSKDHKEKSEFVDDIXXRREPYDSVEESSESENSPVPQRKRRXSVGSSSSDEYKQEDSQGSGEEEDFIRKQIIEMSADEDASGSEDDEFIRNQLKEISSSXESQKKEEXKGKGKIXAGKHRRLXRKSSXSIDEDAGRRHSWHDEDDEAFDESPELKYREXKSQESEELVVXGGGGLRRFKXIELNSXIADKYSAESSQKKXSLYFDEEPELEMESLXDSPEDRSRGEGSSSLHASSFXPGXSPXSVSSLDEDSDSSPSHKKGESKQQRKARHRPHGPLLPXIEDSSEEEELREEEELLKEQEKQREIEQQQRKSSSKKSKKDKDELRAQRRRERPKXPPSNLSPIEDASPXEELRQAAEMEELHRSSCSEYSPSIESDPEGFEISPEKIIEVQKVYKLPXAVSLYSPXDEQSIMQKEGSQKALKSAEEMYEEMMHKXHKYKAFPAANERDEVFEKEPLYGGMLIEDYIYESLVEDXYNGSVDGSLLXRQEEENGFMQQKGREQKIRLSEQIYEDPMQKIXDLQKEFYELESLHSVVPQEDIVSSSFIIPESHEIVDLGXMVXSXEEERKLLDADAAYEELMKRQQMQLXPGSSPXQAPIGEDMXESXMDFDRMPDASLXSSVLSGASLXDSXSSAXLSIPDVKIXQHFSXEEIEDEYVXDYXREIQEIIAHESLILXYSEPSESAXSVPPSDXPSLXSSVSSVCXXDSSSPIXXLDSIXXVYXEPVDMIXKFEDSEEISSSXYFPGSIIDYPEEISVSLDRXAPPDGRASADHIVISLSDMASSIIESVVPKPEGPVADXVSXDLLISEKDPVKKAKKEXGNGIILEVLEAYRDKKELEAERXKSSLSEXVFDHPPSSVIALPMKEQLSXXYFXSGEXFGQEKPASQLPSGSPSVSSLPAKPRPFFRSSSLDISAQPPPPPPPPPPPPPPPPPPPPPPLPPPXSPKPXILPKKKLXVASPVXXAXPLFDAVXXLEXXAVLRSNGLPVXRICXXAPPPVPPKPSSIPSGLVFXHRPEPSKPPIAPKPVIPQLPXXXQKPXDIHPKPXGLSLXSSMXLNLVXSADYKLPSPXSPLSPHSNKSSPRFSKSLXEXYVVIXLPSEPGXPXDSSASQAIXSWPLGSPSKDLVSVEPVFSVVPPVXAVEIPISSEQXFYISGALQXFSAXPVXAPSSFQAAPXSVXQFLXXEVSKXEVSAXRSXAPSVGLSSISIXIPPEPLALDNIHLEKPQYKEDGKLQLVGDVIDLRXVPKVEVKXXDKCIDLSASXMDVKRQIXANEVYGKQISAVQPSIINLSVXSSIVXPVSLAXEXVXFVXCXASASYXXGXESLVGAEHAMXXPLQLXXSKHAEPPYRIPSDQVFPIAREEAPINLSLGXPAHAVXLAIXKPVXVPPVGVXNGWXDSXVSQGIXDGEVVDLSXXKSHRXVVXMDESXSSVMXKIIEDEKPVDLXAGRRAVCCDVVYKLPFGRSCXAQQPAXXLPEDRFGYRDDHYQYDRSGPYGYRGIGGMKPSMSDXNLAEAGHFFYKSKNAFDYSEGXDXAVDLXSGRVXXGEVMDYSSKXXGPYPEXRQVISGAGISXPQYSXARMXPPPGPQYCVGSVLRSSNGVVYSSVAXPXPSXFAIXXQPGSIFSXXVRDLSGIHXADAVXSLPAMHHSQPMPRSYFIXXGASEXDIAVXGIDISASLQXIXMESLXAEXIDSVPXLXXASEVFPEVVGDESALLIVPEEDKQQQQLDLERELLELEKIKQQRFAEELEWERQEIQRFREQEKIMVQKKLEELQSMKQHLLFQQEEERQAQFMMRQEXLAQQQLQLEQIQQLQQQLHQQLEEQKIRQIYQYNYDPSGXASPQXXXEQAILEGQYAALEGSQFWAXEDAXXXASAVVAIEIPQSQGWYXVQSDGVXQYIAPPGILSXVSEIPLXDVVVKEEKQPKKRSSGAKVRGQYDDMGENMXDDPRSFKKIVDSGVQXDDEDAXDRSYVSRRRRXKKSVDXSVQXDDEDQDEWDMPXRSRRKARVGKYGDSMXEADKXKPLSKVSSIAVQXVAEISVQXEPVGXIRXPSIRARVDAKVEIIKHISAPEKXYKGGSLGCQXEADSDXQSPQYLSAXSPPKDKKRPXPLEIGYSSHLRADSXVQLAPSPPKSPKVLYSPISPLSPGKALESAFVPYEKPLPDDISPQKVLHPDMAKVPPASPKXAKMMQRSMSDPKPLSPXADESSRAPFQYXEGYXXKGSQXMXSSGAQKKVKRXLPNPPPEEISXGXQSXFSXMGXVSRRRICRXNXMARAKILQDIDRELDLVERESAKLRKKQAELDEEEKEIDAKLRYLEMGINRRKEALLKEREKRERAYLQGVAEDRDYMSDSEVSSXRPXRIESQHGIERPRXAPQXEFSQFIPPQXQXESQLVPPXSPYXQYQYSSPALPXQAPXSYXQQSHFEQQXLYHQQVSPYQXQPXFQAVAXMSFXPQVQPXPXPQPSYQLPSQMMVIQQKPRQXXLYLEPKIXSNYEVIRNQPLMIAPVSXDNXFAVSHLGSKYNSLDLRIGLEERSSMASSPISSISADSFYADIDHHXPRNYVLIDDIGEIXKGXAALSXAFSLHEKDLSKXDRLLRXXEXRRSQEVXDFLAPLQSSSRLHSYVKAEEDPMEDPYELKLLKHQIKQEFRRGXESLDHLAGLSHYYHADXSYRHFPKSEKYSISRLXLEKQAAKQLPAAILYQKQSKHKKSLIDPKMSKFSPIQESRDLEPDYSSYMXSSXSSIGGISSRARLLQDDIXFGLRKNIXDQQKFMGSSLGXGLGXLGNXIRSALQDEADKPYSSGSRSRPSSRPSSVYGLDLSIKRDSSSSSLRLKAQEAEALDVSFSHASSSARXKPXSLPISQSRGRIPIVAQNSEEESPLSPVGQPMGMARAAAGPLPPISADXRDQFGSSHSLPEVQQHMREESRXRGYDRDIAFIMDDFQHAMSDSEAYHLRREEXDWFDKPRESRLENGHGLDRKLPERLVHSRPLSQHQEQIIQMNGKXMHYIFPHARIKIXRDSKDHXVSGNGLGIRIVGGKEIPGHSGEIGAYIAKILPGGSAEQXGKLMEGMQVLEWNGIPLXSKXYEEVQSIISQQSGEAEICVRLDLNMLSDSENSQHLELHEPPKAVDKAKSPGVDPKQLAAELQKVSLQQSPLVLSSVVEKGSHVHSGPXSAGSSSVPSPGQPGSPSVSKKKHGSSKPXDGXKVVSHPIXGEIQLQINYDLGNLIIHILQARNLVPRDNNGYSDPFVKVYLLPGRGQVMVVQNASAEYKRRXKHVQKSLNPEWNQXVIYKSISMEQLKKKXLEVXVWDYDRFSSNDFLGEVLIDLSSXSHLDNXPRWYPLKEQXESIDHGKSHSSQSSQQSPKPSVIKSRSHGIFPDPSKDMQVPXIEKSHSSPGSSKSSSEGHLRSHGPSRSQSKXSVXQXHLEDAGAAIAAAEAAVQQLRIQPXKPPNHRPAESSVSXGSSGSSFGSGYSVDSEGSSSXAGEXNLFPIPRIGKMGQNGQEPVKQPGVGVGLADXEAKXQVMGEIKIALKKEMKXDGEQLIVEILQCRNIXYKFKSPDHLPDLYVKIYVMNISXQKKVIKKKXRVCRHDREPSFNEXFRFSLSPAGHSLQILLFSNGGKFMKKXLIGEACIWLDKVDLRKRIVNWHKLLVSPXQXH

SEQ ID NO: 19549 - protein, 356 aa, Homo sapiens
  MOD_RES (85)..(85): Selenocysteine
  MOD_RES (114)..(114): Selenocysteine
  MOD_RES (117)..(117): Selenocysteine
  MOD_RES (125)..(125): Selenocysteine
  MOD_RES (178)..(178): Selenocysteine
  MOD_RES (192)..(192): Selenocysteine
  MOD_RES (207)..(207): Selenocysteine
  MOD_RES (211)..(211): Selenocysteine
  MOD_RES (234)..(234): Selenocysteine
  MOD_RES (240)..(240): Selenocysteine
  MOD_RES (250)..(250): Selenocysteine
  MOD_RES (292)..(292): Selenocysteine
  MOD_RES (323)..(323): Selenocysteine
  MOD_RES (326)..(326): Selenocysteine
  MOD_RES (328)..(328): Selenocysteine
MKKFRVSLVSKVGKQKYVDLNMLSDSENSQHLELHEPPKAVDKAKSPGVDPKQLAAELQKVSLQQSPLVLSSVVEKGSHVHSGPXSAGSSSVPSPGQPGSPSVSKKKHGSSKPXDGXKVVSHPIXGEIQLQINYDLGNLIIHILQARNLVPRDNNGYSDPFVKVYLLPGRGAEYKRRXKHVQKSLNPEWNQXVIYKSISMEQLKKKXLEVXVWDYDRFSSNDFLGEVLIDLSSXSHLDNXPRWYPLKEQXESIDHGKSHSSQSSQQSPKPSVIKSRSHGIFPDPSKDMQVPXIEKSHSSPGSSKSSSEGHLRSHGPSRSQSKXSVXQXHLEDAGAAIAAAEAAVQQLRIQPSKRRK

SEQ ID NO: 19550 - protein, 1217 aa, Homo sapiens
  MOD_RES (5)..(5): Selenocysteine
  MOD_RES (45)..(45): Selenocysteine
  MOD_RES (50)..(52): Selenocysteine
  MOD_RES (72)..(72): Selenocysteine
  MOD_RES (76)..(78): Selenocysteine
  MOD_RES (95)..(95): Selenocysteine
  MOD_RES (102)..(102): Selenocysteine
  MOD_RES (113)..(113): Selenocysteine
  MOD_RES (120)..(120): Selenocysteine
  MOD_RES (151)..(151): Selenocysteine
  MOD_RES (167)..(167): Selenocysteine
  MOD_RES (173)..(173): Selenocysteine
  MOD_RES (184)..(184): Selenocysteine
  MOD_RES (190)..(190): Selenocysteine
  MOD_RES (194)..(194): Selenocysteine
  MOD_RES (206)..(206): Selenocysteine
  MOD_RES (222)..(222): Selenocysteine
  MOD_RES (227)..(227): Selenocysteine
  MOD_RES (240)..(240): Selenocysteine
  MOD_RES (248)..(248): Selenocysteine
  MOD_RES (253)..(253): Selenocysteine
  MOD_RES (256)..(256): Selenocysteine
  MOD_RES (279)..(279): Selenocysteine
  MOD_RES (289)..(289): Selenocysteine
  MOD_RES (295)..(295): Selenocysteine
  MOD_RES (304)..(304): Selenocysteine
  MOD_RES (314)..(314): Selenocysteine
  MOD_RES (329)..(329): Selenocysteine
  MOD_RES (391)..(391): Selenocysteine
  MOD_RES (408)..(408): Selenocysteine
  MOD_RES (420)..(420): Selenocysteine
  MOD_RES (424)..(425): Selenocysteine
  MOD_RES (430)..(430): Selenocysteine
  MOD_RES (432)..(432): Selenocysteine
  MOD_RES (443)..(443): Selenocysteine
  MOD_RES (454)..(454): Selenocysteine
  MOD_RES (456)..(456): Selenocysteine
  MOD_RES (459)..(459): Selenocysteine
  MOD_RES (462)..(462): Selenocysteine
  MOD_RES (465)..(465): Selenocysteine
  MOD_RES (474)..(474): Selenocysteine
  MOD_RES (476)..(476): Selenocysteine
  MOD_RES (562)..(562): Selenocysteine
  MOD_RES (565)..(565): Selenocysteine
  MOD_RES (578)..(578): Selenocysteine
  MOD_RES (582)..(582): Selenocysteine
  MOD_RES (592)..(592): Selenocysteine
  MOD_RES (594)..(594): Selenocysteine
  MOD_RES (602)..(602): Selenocysteine
  MOD_RES (606)..(606): Selenocysteine
  MOD_RES (617)..(617): Selenocysteine
  MOD_RES (621)..(621): Selenocysteine
  MOD_RES (624)..(624): Selenocysteine
  MOD_RES (633)..(633): Selenocysteine
  MOD_RES (644)..(644): Selenocysteine
  MOD_RES (647)..(647): Selenocysteine
  MOD_RES (653)..(653): Selenocysteine
  MOD_RES (657)..(657): Selenocysteine
  MOD_RES (663)..(663): Selenocysteine
  MOD_RES (665)..(665): Selenocysteine
  MOD_RES (686)..(687): Selenocysteine
  MOD_RES (695)..(695): Selenocysteine
  MOD_RES (713)..(713): Selenocysteine
  MOD_RES (716)..(716): Selenocysteine
  MOD_RES (762)..(762): Selenocysteine
  MOD_RES (776)..(776): Selenocysteine
  MOD_RES (779)..(779): Selenocysteine
  MOD_RES (784)..(784): Selenocysteine
  MOD_RES (796)..(796): Selenocysteine
  MOD_RES (802)..(803): Selenocysteine
  MOD_RES (805)..(805): Selenocysteine
  MOD_RES (812)..(812): Selenocysteine
  MOD_RES (856)..(856): Selenocysteine
  MOD_RES (873)..(873): Selenocysteine
  MOD_RES (890)..(890): Selenocysteine
  MOD_RES (941)..(941): Selenocysteine
  MOD_RES (944)..(944): Selenocysteine
  MOD_RES (962)..(962): Selenocysteine
  MOD_RES (970)..(970): Selenocysteine
  MOD_RES (982)..(982): Selenocysteine
  MOD_RES (986)..(986): Selenocysteine
  MOD_RES (990)..(990): Selenocysteine
  MOD_RES (1057)..(1057): Selenocysteine
  MOD_RES (1060)..(1060): Selenocysteine
  MOD_RES (1108)..(1108): Selenocysteine
  MOD_RES (1131)..(1131): Selenocysteine
MRQEXLAQQQLQLEQIQQLQQQLHQQLEEQKIRQIYQYNYDPSGXASPQXXXEQAILEGQYAALEGSQFWAXEDAXXXASAVVAIEIPQSQGWYXVQSDGVXQYIAPPGILSXVSEIPLXDVVVKEEKQPKKRSSGAKVRGQYDDMGENMXDDPRSFKKIVDSGVQXDDEDAXDRSYVSRRRRXKKSVDXSVQXDDEDQDEWDMPXRSRRKARVGKYGDSMXEADKXKPLSKVSSIAVQXVAEISVQXEPVGXIRXPSIRARVDAKVEIIKHISAPEKXYKGGSLGCQXEADSDXQSPQYLSAXSPPKDKKRPXPLEIGYSSHLRADSXVQLAPSPPKSPKVLYSPISPLSPGKALESAFVPYEKPLPDDISPQKVLHPDMAKVPPASPKXAKMMQRSMSDPKPLSPXADESSRAPFQYXEGYXXKGSQXMXSSGAQKKVKRXLPNPPPEEISXGXQSXFSXMGXVSRRRICRXNXMARAKILQDIDRELDLVERESAKLRKKQAELDEEEKEIDAKLRYLEMGINRRKEALLKEREKRERAYLQGVAEDRDYMSDSEVSSXRPXRIESQHGIERPRXAPQXEFSQFIPPQXQXESQLVPPXSPYXQYQYSSPALPXQAPXSYXQQSHFEQQXLYHQQVSPYQXQPXFQAVAXMSFXPQVQPXPXPQPSYQLPSQMMVIQQKPRQXXLYLEPKIXSNYEVIRNQPLMIAPVSXDNXFAVSHLGSKYNSLDLRIGLEERSSMASSPISSISADSFYADIDHHXPRNYVLIDDIGEIXKGXAALSXAFSLHEKDLSKXDRLLRXXEXRRSQEVXDFLAPLQSSSRLHSYVKAEEDPMEDPYELKLLKHQIKQEFRRGXESLDHLAGLSHYYHADXSYRHFPKSEKYSISRLXLEKQAAKQLPAAILYQKQSKHKKSLIDPKMSKFSPIQESRDLEPDYSSYMXSSXSSIGGISSRARLLQDDIXFGLRKNIXDQQKFMGSSLGXGLGXLGNXIRSALQDEADKPYSSGSRSRPSSRPSSVYGLDLSIKRDSSSSSLRLKAQEAEALDVSFSHASSSARXKPXSLPISQSRGRIPIVAQNSEEESPLSPVGQPMGMARAAAGPLPPISADXRDQFGSSHSLPEVQQHMREESRXRGYDRDIAFIMDDFQHAMSDSEGKLGLKLPCYSQNSNSYFSACLISLLQRCILLFLVCLLHVYFNFISCKWKFYHVYRFCSMLFFI

SEQ ID NO: 19551 - protein, 46 aa, Homo sapiens
  MOD_RES (1)..(1): Any amino acid
  MOD_RES (37)..(37): Selenocysteine
XNGLGIRIVGGKEIPGHSGEIGAYIAKILPGGSAEQXGKLMEAWDC

SEQ ID NO: 19552 - protein, 60 aa, Homo sapiens
  MOD_RES (1)..(1): Any amino acid
  MOD_RES (37)..(37): Selenocysteine
  MOD_RES (55)..(55): Selenocysteine
  MOD_RES (58)..(58): Selenocysteine
XNGLGIRIVGGKEIPGHSGEIGAYIAKILPGGSAEQXGKLMEDGMAVIKVGDQEXQHXDE

SEQ ID NO: 19553 - protein, 261 aa, Homo sapiens
  MOD_RES (51)..(51): Selenocysteine
  MOD_RES (59)..(59): Selenocysteine
  MOD_RES (73)..(73): Selenocysteine
  MOD_RES (89)..(89): Selenocysteine
  MOD_RES (98)..(98): Selenocysteine
  MOD_RES (185)..(185): Selenocysteine
  MOD_RES (196)..(196): Selenocysteine
  MOD_RES (206)..(206): Selenocysteine
  MOD_RES (216)..(216): Selenocysteine
  MOD_RES (219)..(219): Selenocysteine
  MOD_RES (224)..(224): Selenocysteine
  MOD_RES (226)..(226): Selenocysteine
MFEARLVQGSILKKVLEALKDLINEACWDISSSGVNLQSMDSSHVSLVQLXLRSEGFDXYRCDRNLAMGVNLXSMSKILKCAGNEDIIXLRAEDNADXLALVFEAPNQEKVSDYEMKLMDLDVEQLGIPEQEYSCVVKMPSGEFARICRDLSHIGDAVVISCAKDGVKFSASGELGNGNIKLSQXSNVDKEEEAVXIEMNEPVQLXFALRYLNFFXKAXPLSSXVXLSMSADVPLVVEYKIADMGHLKYYLAPKIEDEEGS

SEQ ID NO: 19554 - protein, 158 aa, Homo sapiens
  MOD_RES (11)..(11): Selenocysteine
  MOD_RES (87)..(87): Selenocysteine
  MOD_RES (135)..(135): Selenocysteine
  MOD_RES (138)..(138): Selenocysteine
  MOD_RES (157)..(157): Selenocysteine
MERRAWSLQCXAFVLFCAWCALNSAKAKRQFVNEWAAEIPGGPEAASAIAEELGYDLLGQIGSLENHYLFKHKNHPRRSRRSAFHIXKRLSDDDRVIWAEQQYEKERSKRSALRDSALNLFNDPMWNQQWYLQDXRMXAALPKLDLHVIPVWQKGIXG

SEQ ID NO: 19555 - protein, 753 aa, Homo sapiens
  MOD_RES (11)..(11): Selenocysteine
  MOD_RES (87)..(87): Selenocysteine
  MOD_RES (135)..(135): Selenocysteine
  MOD_RES (138)..(138): Selenocysteine
  MOD_RES (157)..(157): Selenocysteine
  MOD_RES (164)..(164): Selenocysteine
  MOD_RES (175)..(175): Selenocysteine
  MOD_RES (203)..(203): Selenocysteine
  MOD_RES (210)..(210): Selenocysteine
  MOD_RES (246)..(246): Selenocysteine
  MOD_RES (276)..(276): Selenocysteine
  MOD_RES (323)..(323): Selenocysteine
  MOD_RES (328)..(328): Selenocysteine
  MOD_RES (350)..(350): Selenocysteine
  MOD_RES (353)..(353): Selenocysteine
  MOD_RES (361)..(361): Selenocysteine
  MOD_RES (366)..(366): Selenocysteine
  MOD_RES (375)..(375): Selenocysteine
  MOD_RES (377)..(377): Selenocysteine
  MOD_RES (379)..(379): Selenocysteine
  MOD_RES (381)..(381): Selenocysteine
  MOD_RES (403)..(403): Selenocysteine
  MOD_RES (414)..(414): Selenocysteine
  MOD_RES (457)..(457): Selenocysteine
  MOD_RES (491)..(491): Selenocysteine
  MOD_RES (512)..(512): Selenocysteine
  MOD_RES (524)..(524): Selenocysteine
  MOD_RES (526)..(526): Selenocysteine
  MOD_RES (531)..(531): Selenocysteine
  MOD_RES (533)..(533): Selenocysteine
  MOD_RES (543)..(543): Selenocysteine
  MOD_RES (558)..(558): Selenocysteine
  MOD_RES (566)..(566): Selenocysteine
  MOD_RES (568)..(568): Selenocysteine
  MOD_RES (572)..(572): Selenocysteine
  MOD_RES (594)..(594): Selenocysteine
  MOD_RES (608)..(608): Selenocysteine
  MOD_RES (612)..(612): Selenocysteine
  MOD_RES (632)..(632): Selenocysteine
  MOD_RES (640)..(640): Selenocysteine
  MOD_RES (731)..(731): Selenocysteine
MERRAWSLQCXAFVLFCAWCALNSAKAKRQFVNEWAAEIPGGPEAASAIAEELGYDLLGQIGSLENHYLFKHKNHPRRSRRSAFHIXKRLSDDDRVIWAEQQYEKERSKRSALRDSALNLFNDPMWNQQWYLQDXRMXAALPKLDLHVIPVWQKGIXGKGVVIXVLDDGLEWNHXDIYANYDPEASYDFNDNDHDPFPRYDPXNENKHGXRCAGEIAMQANNHKCGVGVAYNSKVGGIRMLDGIVXDAIEASSIGFNPGHVDIYSASWGPNDDGKXVEGPGRLAQKAFEYGVKQGRQGKGSIFVWASGNGGRQGDNCDCDGYXDSIYXISISSASQQGLSPWYAEKCSSXLAXSYSSGDYXDQRIXSADLHNDCXEXHXGXSASAPLAAGIFALALEANPNLXWRDMQHLVVWXSEYDPLANNPGWKKNGAGLMVNSRFGFGLLNAKALVDLADPRXWRSVPEKKECVVKDNDFEPRALKANGEVIIEIPXRACEGQENAIKSLEHVQFEAXIEYSRRGDLHVXLXSAAGXSXVLLAERERDXSPNGFKNWDFMSVHXWGENPIGXWXLRIXDMSGRIQNEGRIVNWKLILHGXSSQPEHMKQPRVYXSYNXVQNDRRGVEKMVDPGEEQPXQENPKENXLVSKSPSSSSVGGRRDELEEGAPSQAMLRLLQSAFSKNSPPKQSPKKSPSAKLNIPYENFYEALEKLNKPSQLKDSEDSLYNDYVDVFYNXKPYKHRDDRLLQALVDILNEEN

SEQ ID NO: 19556 - protein, 706 aa, Homo sapiens
  MOD_RES (40)..(40): Selenocysteine
  MOD_RES (88)..(88): Selenocysteine
  MOD_RES (91)..(91): Selenocysteine
  MOD_RES (110)..(110): Selenocysteine
  MOD_RES (117)..(117): Selenocysteine
  MOD_RES (128)..(128): Selenocysteine
  MOD_RES (156)..(156): Selenocysteine
  MOD_RES (163)..(163): Selenocysteine
  MOD_RES (199)..(199): Selenocysteine
  MOD_RES (229)..(229): Selenocysteine
  MOD_RES (276)..(276): Selenocysteine
  MOD_RES (281)..(281): Selenocysteine
  MOD_RES (303)..(303): Selenocysteine
  MOD_RES (306)..(306): Selenocysteine
  MOD_RES (314)..(314): Selenocysteine
  MOD_RES (319)..(319): Selenocysteine
  MOD_RES (328)..(328): Selenocysteine
  MOD_RES (330)..(330): Selenocysteine
  MOD_RES (332)..(332): Selenocysteine
  MOD_RES (334)..(334): Selenocysteine
  MOD_RES (356)..(356): Selenocysteine
  MOD_RES (367)..(367): Selenocysteine
  MOD_RES (410)..(410): Selenocysteine
  MOD_RES (444)..(444): Selenocysteine
  MOD_RES (465)..(465): Selenocysteine
  MOD_RES (477)..(477): Selenocysteine
  MOD_RES (479)..(479): Selenocysteine
  MOD_RES (484)..(484): Selenocysteine
  MOD_RES (486)..(486): Selenocysteine
  MOD_RES (496)..(496): Selenocysteine
  MOD_RES (511)..(511): Selenocysteine
  MOD_RES (519)..(519): Selenocysteine
  MOD_RES (521)..(521): Selenocysteine
  MOD_RES (525)..(525): Selenocysteine
  MOD_RES (547)..(547): Selenocysteine
  MOD_RES (561)..(561): Selenocysteine
  MOD_RES (565)..(565): Selenocysteine
  MOD_RES (585)..(585): Selenocysteine
  MOD_RES (593)..(593): Selenocysteine
  MOD_RES (684)..(684): Selenocysteine
MGKGSISFLFFSQIGSLENHYLFKHKNHPRRSRRSAFHIXKRLSDDDRVIWAEQQYEKERSKRSALRDSALNLFNDPMWNQQWYLQDXRMXAALPKLDLHVIPVWQKGIXGKGVVIXVLDDGLEWNHXDIYANYDPEASYDFNDNDHDPFPRYDPXNENKHGXRCAGEIAMQANNHKCGVGVAYNSKVGGIRMLDGIVXDAIEASSIGFNPGHVDIYSASWGPNDDGKXVEGPGRLAQKAFEYGVKQGRQGKGSIFVWASGNGGRQGDNCDCDGYXDSIYXISISSASQQGLSPWYAEKCSSXLAXSYSSGDYXDQRIXSADLHNDCXEXHXGXSASAPLAAGIFALALEANPNLXWRDMQHLVVWXSEYDPLANNPGWKKNGAGLMVNSRFGFGLLNAKALVDLADPRXWRSVPEKKECVVKDNDFEPRALKANGEVIIEIPXRACEGQENAIKSLEHVQFEAXIEYSRRGDLHVXLXSAAGXSXVLLAERERDXSPNGFKNWDFMSVHXWGENPIGXWXLRIXDMSGRIQNEGRIVNWKLILHGXSSQPEHMKQPRVYXSYNXVQNDRRGVEKMVDPGEEQPXQENPKENXLVSKSPSSSSVGGRRDELEEGAPSQAMLRLLQSAFSKNSPPKQSPKKSPSAKLNIPYENFYEALEKLNKPSQLKDSEDSLYNDYVDVFYNXKPYKHRDDRLLQALVDILNEEN

SEQ ID NO: 19557 - protein, 260 aa, Homo sapiens
  MOD_RES (53)..(53): Selenocysteine
  MOD_RES (187)..(187): Selenocysteine
  MOD_RES (247)..(247): Selenocysteine
MAGSPLLWGPRAGGVGLLVLLLLGLFRPPPALCARPVKEPRGLSAASPPLAEXGAPRRFRRSVPRGEAAGAVQELARALAHLLEAERQERARAEAQEAEDQQARVLAQLLRVWGAPRNSDPALGLDDDPDAPAAQLARALLRARLDPAALAAQLVPAPVPAAALRPRPPVYDDGPAGPDAEEAGDEXPDVDPELLRYLLGRILAGSADSEGVAAPRRLRRAADHDVGSELPPEGVLGALLRVKRLEXPAPQVPARRLLPP

SEQ ID NO: 19558 - protein, 101 aa, Homo sapiens
  MOD_RES (10)..(10): Selenocysteine
  MOD_RES (23)..(23): Selenocysteine
  MOD_RES (63)..(63): Selenocysteine
  MOD_RES (73)..(73): Selenocysteine
CQPCHRFCAXCAGAGADGCINCXEGYFMEDGRCVQSCSISYYFDHSSENGYKSCKKCDISCLXCNGPGFKNCXSCPSGYLLDLGMCQMGAICKDVSLFRGA

SEQ ID NO: 19559 - protein, 690 aa, Homo sapiens
  MOD_RES (32)..(32): Selenocysteine
  MOD_RES (36)..(36): Selenocysteine
  MOD_RES (79)..(79): Selenocysteine
  MOD_RES (90)..(90): Selenocysteine
  MOD_RES (112)..(112): Selenocysteine
  MOD_RES (124)..(124): Selenocysteine
  MOD_RES (143)..(143): Selenocysteine
  MOD_RES (161)..(161): Selenocysteine
  MOD_RES (168)..(168): Selenocysteine
  MOD_RES (177)..(177): Selenocysteine
  MOD_RES (214)..(214): Selenocysteine
  MOD_RES (230)..(230): Selenocysteine
  MOD_RES (250)..(250): Selenocysteine
  MOD_RES (280)..(280): Selenocysteine
  MOD_RES (288)..(288): Selenocysteine
  MOD_RES (327)..(327): Selenocysteine
  MOD_RES (332)..(332): Selenocysteine
  MOD_RES (338)..(338): Selenocysteine
  MOD_RES (354)..(354): Selenocysteine
  MOD_RES (357)..(358): Selenocysteine
  MOD_RES (371)..(372): Selenocysteine
  MOD_RES (379)..(379): Selenocysteine
  MOD_RES (383)..(383): Selenocysteine
  MOD_RES (385)..(385): Selenocysteine
  MOD_RES (407)..(407): Selenocysteine
  MOD_RES (418)..(418): Selenocysteine
  MOD_RES (431)..(431): Selenocysteine
  MOD_RES (460)..(461): Selenocysteine
  MOD_RES (472)..(472): Selenocysteine
  MOD_RES (478)..(478): Selenocysteine
  MOD_RES (513)..(513): Selenocysteine
  MOD_RES (515)..(515): Selenocysteine
  MOD_RES (527)..(527): Selenocysteine
  MOD_RES (532)..(532): Selenocysteine
  MOD_RES (556)..(556): Selenocysteine
  MOD_RES (575)..(575): Selenocysteine
  MOD_RES (584)..(584): Selenocysteine
  MOD_RES (598)..(598): Selenocysteine
  MOD_RES (606)..(606): Selenocysteine
  MOD_RES (624)..(624): Selenocysteine
  MOD_RES (629)..(629): Selenocysteine
  MOD_RES (641)..(641): Selenocysteine
  MOD_RES (653)..(654): Selenocysteine
MGWGSRCCCPGRLDLLCVLALLGGCLLPVCRXRVYXNHWAVKIAGGFPEANRIASKYGFINIGQIGALKDYYHFYHSRXIKRSVISSRGXHSFISMEPKVEWIQQQVVKKRXKRDYDFSRAQSXYFNDPKWPSMWYMHCSDNXHPCQSDMNIEGAWKRGYXGKNIVVXILDDGIERXHPDLMQNYDALASCDVNGNDLDPMPRYDASNENKHGXRCAGEVAAAANNSHCXVGIAFNAKIGGVRMLDGDVXDMVEAKSVSFNPQHVHIYSASWGPDDDGKXVDGPAPLXRQAFENGVRMGRRGLGSVFVWASGNGGRSKDHCSCDGYXNSIYXISISSXAESGKKPWYLEECSSXLAXXYSSGESYDKKIIXXDLRQRCXDNHXGXSASAPMAAGIIALALEANPFLXWRDVQHVIVRXSRAGHLNANDWKXNAAGFKVSHLYGFGLMDAEAMVMEAEKWXXVPRQHVCVESXDRQIKXIRPNSAVRSIYKASGCSDNPNRHVNYLEHVVVRIXIXHPRRGDLAIYLXSPSGXRSQLLANRLFDHSMEGFKNWEFMXIHCWGERAAGDWVLEVYDXPSQLRNFKXPGKLKEWSLVLYGXSVQPYSPXNEFPKVERFRYSRVEDPXDDYGXEDYAGELASSGXQAKKRQLMHHPXXWENRMEWNGMKWNGMKWNGMEWNGMEWNRIESNRIE

SEQ ID NO: 19560 - protein, 913 aa, Homo sapiens
  MOD_RES (32)..(32): Selenocysteine
  MOD_RES (36)..(36): Selenocysteine
  MOD_RES (79)..(79): Selenocysteine
  MOD_RES (90)..(90): Selenocysteine
  MOD_RES (112)..(112): Selenocysteine
  MOD_RES (124)..(124): Selenocysteine
  MOD_RES (143)..(143): Selenocysteine
  MOD_RES (161)..(161): Selenocysteine
  MOD_RES (168)..(168): Selenocysteine
  MOD_RES (177)..(177): Selenocysteine
  MOD_RES (214)..(214): Selenocysteine
  MOD_RES (230)..(230): Selenocysteine
  MOD_RES (250)..(250): Selenocysteine
  MOD_RES (280)..(280): Selenocysteine
  MOD_RES (288)..(288): Selenocysteine
  MOD_RES (327)..(327): Selenocysteine
  MOD_RES (332)..(332): Selenocysteine
  MOD_RES (338)..(338): Selenocysteine
  MOD_RES (354)..(354): Selenocysteine
  MOD_RES (357)..(358): Selenocysteine
  MOD_RES (371)..(372): Selenocysteine
  MOD_RES (379)..(379): Selenocysteine
  MOD_RES (383)..(383): Selenocysteine
  MOD_RES (385)..(385): Selenocysteine
  MOD_RES (407)..(407): Selenocysteine
  MOD_RES (418)..(418): Selenocysteine
  MOD_RES (431)..(431): Selenocysteine
  MOD_RES (460)..(461): Selenocysteine
  MOD_RES (472)..(472): Selenocysteine
  MOD_RES (478)..(478): Selenocysteine
  MOD_RES (513)..(513): Selenocysteine
  MOD_RES (515)..(515): Selenocysteine
  MOD_RES (527)..(527): Selenocysteine
  MOD_RES (532)..(532): Selenocysteine
  MOD_RES (556)..(556): Selenocysteine
  MOD_RES (575)..(575): Selenocysteine
  MOD_RES (584)..(584): Selenocysteine
  MOD_RES (598)..(598): Selenocysteine
  MOD_RES (606)..(606): Selenocysteine
  MOD_RES (624)..(624): Selenocysteine
  MOD_RES (629)..(629): Selenocysteine
  MOD_RES (667)..(667): Selenocysteine
  MOD_RES (717)..(717): Selenocysteine
  MOD_RES (722)..(722): Selenocysteine
  MOD_RES (732)..(732): Selenocysteine
  MOD_RES (746)..(746): Selenocysteine
  MOD_RES (748)..(748): Selenocysteine
  MOD_RES (754)..(754): Selenocysteine
  MOD_RES (791)..(791): Selenocysteine
  MOD_RES (804)..(804): Selenocysteine
  MOD_RES (844)..(844): Selenocysteine
  MOD_RES (854)..(854): Selenocysteine
  MOD_RES (877)..(877): Selenocysteine
  MOD_RES (908)..(908): Selenocysteine
  MOD_RES (910)..(910): Selenocysteine
MGWGSRCCCPGRLDLLCVLALLGGCLLPVCRXRVYXNHWAVKIAGGFPEANRIASKYGFINIGQIGALKDYYHFYHSRXIKRSVISSRGXHSFISMEPKVEWIQQQVVKKRXKRDYDFSRAQSXYFNDPKWPSMWYMHCSDNXHPCQSDMNIEGAWKRGYXGKNIVVXILDDGIERXHPDLMQNYDALASCDVNGNDLDPMPRYDASNENKHGXRCAGEVAAAANNSHCXVGIAFNAKIGGVRMLDGDVXDMVEAKSVSFNPQHVHIYSASWGPDDDGKXVDGPAPLXRQAFENGVRMGRRGLGSVFVWASGNGGRSKDHCSCDGYXNSIYXISISSXAESGKKPWYLEECSSXLAXXYSSGESYDKKIIXXDLRQRCXDNHXGXSASAPMAAGIIALALEANPFLXWRDVQHVIVRXSRAGHLNANDWKXNAAGFKVSHLYGFGLMDAEAMVMEAEKWXXVPRQHVCVESXDRQIKXIRPNSAVRSIYKASGCSDNPNRHVNYLEHVVVRIXIXHPRRGDLAIYLXSPSGXRSQLLANRLFDHSMEGFKNWEFMXIHCWGERAAGDWVLEVYDXPSQLRNFKXPGKLKEWSLVLYGXSVQPYSPXNEFPKVERFRYSRVEDPXDDYGXEDYAGPCDPECSEVGCDGPGPDHCNDCLHYYYKLKNNXRICVSSCPPGHYHADKKRCRKCAPNCESCFGSHGDQCMSCKYGYFLNEEXNSCVXHCPDGSYQDXKKNLCRKCSENCKXCXEFHNCXECRDGLSLQGSRCSVSCEDGRYFNGQDCQPCHRFCAXCAGAGADGCINCXEGYFMEDGRCVQSCSISYYFDHSSENGYKSCKKCDISCLXCNGPGFKNCXSCPSGYLLDLGMCQMGAICKDAXEESWAEGGFCMLVKKNNLCQRKVLQQLCCKXCXFQG

SEQ ID NO: 19561 - protein, 1860 aa, Homo sapiens
  MOD_RES (32)..(32): Selenocysteine
  MOD_RES (36)..(36): Selenocysteine
  MOD_RES (79)..(79): Selenocysteine
  MOD_RES (90)..(90): Selenocysteine
  MOD_RES (112)..(112): Selenocysteine
  MOD_RES (124)..(124): Selenocysteine
  MOD_RES (143)..(143): Selenocysteine
  MOD_RES (161)..(161): Selenocysteine
  MOD_RES (168)..(168): Selenocysteine
  MOD_RES (177)..(177): Selenocysteine
  MOD_RES (214)..(214): Selenocysteine
  MOD_RES (230)..(230): Selenocysteine
  MOD_RES (250)..(250): Selenocysteine
  MOD_RES (280)..(280): Selenocysteine
  MOD_RES (288)..(288): Selenocysteine
  MOD_RES (327)..(327): Selenocysteine
  MOD_RES (332)..(332): Selenocysteine
  MOD_RES (338)..(338): Selenocysteine
  MOD_RES (354)..(354): Selenocysteine
  MOD_RES (357)..(358): Selenocysteine
  MOD_RES (371)..(372): Selenocysteine
  MOD_RES (379)..(379): Selenocysteine
  MOD_RES (383)..(383): Selenocysteine
  MOD_RES (385)..(385): Selenocysteine
  MOD_RES (407)..(407): Selenocysteine
  MOD_RES (418)..(418): Selenocysteine
  MOD_RES (431)..(431): Selenocysteine
  MOD_RES (460)..(461): Selenocysteine
  MOD_RES (472)..(472): Selenocysteine
  MOD_RES (478)..(478): Selenocysteine
  MOD_RES (513)..(513): Selenocysteine
  MOD_RES (515)..(515): Selenocysteine
  MOD_RES (527)..(527): Selenocysteine
  MOD_RES (532)..(532): Selenocysteine
  MOD_RES (556)..(556): Selenocysteine
  MOD_RES (575)..(575): Selenocysteine
  MOD_RES (584)..(584): Selenocysteine
  MOD_RES (598)..(598): Selenocysteine
  MOD_RES (606)..(606): Selenocysteine
  MOD_RES (624)..(624): Selenocysteine
  MOD_RES (629)..(629): Selenocysteine
  MOD_RES (667)..(667): Selenocysteine
  MOD_RES (717)..(717): Selenocysteine
  MOD_RES (722)..(722): Selenocysteine
  MOD_RES (732)..(732): Selenocysteine
  MOD_RES (746)..(746): Selenocysteine
  MOD_RES (748)..(748): Selenocysteine
  MOD_RES (754)..(754): Selenocysteine
  MOD_RES (791)..(791): Selenocysteine
  MOD_RES (804)..(804): Selenocysteine
  MOD_RES (844)..(844): Selenocysteine
  MOD_RES (854)..(854): Selenocysteine
  MOD_RES (887)..(887): Selenocysteine
  MOD_RES (899)..(899): Selenocysteine
  MOD_RES (904)..(905): Selenocysteine
  MOD_RES (909)..(909): Selenocysteine
  MOD_RES (938)..(938): Selenocysteine
  MOD_RES (948)..(948): Selenocysteine
  MOD_RES (951)..(951): Selenocysteine
  MOD_RES (980)..(980): Selenocysteine
  MOD_RES (984)..(984): Selenocysteine
  MOD_RES (1002)..(1002): Selenocysteine
  MOD_RES (1013)..(1013): Selenocysteine
  MOD_RES (1016)..(1016): Selenocysteine
  MOD_RES (1052)..(1052): Selenocysteine
  MOD_RES (1054)..(1054): Selenocysteine
  MOD_RES (1070)..(1070): Selenocysteine
  MOD_RES (1075)..(1075): Selenocysteine
  MOD_RES (1137)..(1137): Selenocysteine
  MOD_RES (1139)..(1139): Selenocysteine
  MOD_RES (1164)..(1164): Selenocysteine
  MOD_RES (1166)..(1166): Selenocysteine
  MOD_RES (1189)..(1189): Selenocysteine
  MOD_RES (1195)..(1195): Selenocysteine
  MOD_RES (1198)..(1198): Selenocysteine
  MOD_RES (1219)..(1219): Selenocysteine
  MOD_RES (1232)..(1232): Selenocysteine
  MOD_RES (1286)..(1286): Selenocysteine
  MOD_RES (1292)..(1292): Selenocysteine
  MOD_RES (1338)..(1338): Selenocysteine
  MOD_RES (1343)..(1343): Selenocysteine
  MOD_RES (1409)..(1409): Selenocysteine
  MOD_RES (1415)..(1415): Selenocysteine
  MOD_RES (1427)..(1427): Selenocysteine
  MOD_RES (1433)..(1433): Selenocysteine
  MOD_RES (1435)..(1436): Selenocysteine
  MOD_RES (1488)..(1488): Selenocysteine
  MOD_RES (1498)..(1499): Selenocysteine
  MOD_RES (1526)..(1526): Selenocysteine
  MOD_RES (1563)..(1563): Selenocysteine
  MOD_RES (1582)..(1582): Selenocysteine
  MOD_RES (1614)..(1614): Selenocysteine
  MOD_RES (1616)..(1616): Selenocysteine
  MOD_RES (1623)..(1623): Selenocysteine
  MOD_RES (1650)..(1650): Selenocysteine
  MOD_RES (1687)..(1687): Selenocysteine
  MOD_RES (1708)..(1708): Selenocysteine
  MOD_RES (1723)..(1724): Selenocysteine
  MOD_RES (1731)..(1731): Selenocysteine
  MOD_RES (1738)..(1738): Selenocysteine
  MOD_RES (1743)..(1743): Selenocysteine
  MOD_RES (1748)..(1748): Selenocysteine
  MOD_RES (1800)..(1800): Selenocysteine
  MOD_RES (1831)..(1831): Selenocysteine
MGWGSRCCCPGRLDLLCVLALLGGCLLPVCRXRVYXNHWAVKIAGGFPEANRIASKYGFINIGQIGALKDYYHFYHSRXIKRSVISSRGXHSFISMEPKVEWIQQQVVKKRXKRDYDFSRAQSXYFNDPKWPSMWYMHCSDNXHPCQSDMNIEGAWKRGYXGKNIVVXILDDGIERXHPDLMQNYDALASCDVNGNDLDPMPRYDASNENKHGXRCAGEVAAAANNSHCXVGIAFNAKIGGVRMLDGDVXDMVEAKSVSFNPQHVHIYSASWGPDDDGKXVDGPAPLXRQAFENGVRMGRRGLGSVFVWASGNGGRSKDHCSCDGYXNSIYXISISSXAESGKKPWYLEECSSXLAXXYSSGESYDKKIIXXDLRQRCXDNHXGXSASAPMAAGIIALALEANPFLXWRDVQHVIVRXSRAGHLNANDWKXNAAGFKVSHLYGFGLMDAEAMVMEAEKWXXVPRQHVCVESXDRQIKXIRPNSAVRSIYKASGCSDNPNRHVNYLEHVVVRIXIXHPRRGDLAIYLXSPSGXRSQLLANRLFDHSMEGFKNWEFMXIHCWGERAAGDWVLEVYDXPSQLRNFKXPGKLKEWSLVLYGXSVQPYSPXNEFPKVERFRYSRVEDPXDDYGXEDYAGPCDPECSEVGCDGPGPDHCNDCLHYYYKLKNNXRICVSSCPPGHYHADKKRCRKCAPNCESCFGSHGDQCMSCKYGYFLNEEXNSCVXHCPDGSYQDXKKNLCRKCSENCKXCXEFHNCXECRDGLSLQGSRCSVSCEDGRYFNGQDCQPCHRFCAXCAGAGADGCINCXEGYFMEDGRCVQSCSISYYFDHSSENGYKSCKKCDISCLXCNGPGFKNCXSCPSGYLLDLGMCQMGAICKDGEYVDEHGHCQXCEASCAKCQGPXQEDCXXCPMXRIFDDGRCVSNCPSWKFEFENQCHPCHHXCQRCQGSGPXHCXSCGADNYGREHFLYQGECGDSCPEGHYAXEGNXCLPCPDNCELCHSVHVCXRCMKGYFIAPXNHXCQKLECGQGEVQDPDYEECVPCEEGCLGCSLDDPGXCXSCAMGYYRFDHHCYKXCPEKXYSEEVECKACDSNCGSCDQNGCYWCEEGFFLLGGSCVRKCGPGFYGDQEMGECESCHRACEXCXGPGHDECSSCQEGLQLLRGMCVHAXKXQEEGKFWNDILRKLQPCHSSCKXCNGSAXLCXSCPKGAYLLAQACVSSCPQGXWPSVRSGSCENCXEACAICSGADLCKKCQMQPGHPLFLHEGRCYSKCPEGSYAEDGICERCSSPCRXCEGNAXNCHSCEGGHVLHHGVCQENCPERHVAVKGVCKHCPEMCQDCIHEKXCKECXPEFFLHDDMCHQSCPRGFYADSRHCVPCHKDCLECSGPKADDCELCLESSWVLYDGLCLEECPAGXYYEKEXKECRDCHKSCLXCSSSGXCXXCQKGLIMNPRGSCMANEKCSPSEYWDEDAPGCKPCHVKCFHCMGPAEDQCQXCPMNSLLLNXXCVKDCPEGYYADEDSNRCAHCHSSCRXCEGRHSRQCHSCRPGWFQLGKECLLQCREGYYADNSXGRCERCNRSCKGCQGPRPXDCLSCDRFFFLLRSKGECHRSCPDHYYVEQSXQXCERCHPXCDQCKGKGALNCLSCVWSYHLMGGICXSDCLVGEYRVGEGEKFNCEKCHESCMECKGPGAKNCXLCPANLVLHMDDSHCLHCCNXSDPPSAQECCDCQDXXDECILRXSKVRPAXEHFKXALFIXSSMMLVLLLGAAVVVWKKSRGRVQPAAKAGYEKLADPNKSYSSYKSSYRESXSFEEDQVIEYRDRDYDEDDDDDIVYMGQDGXVYRKFKYGLLDDDDIDELEYDDESYSYYQ

SEQ ID NO: 19562 - protein, 1560 aa, Homo sapiens
  MOD_RES (5)..(5): Selenocysteine
  MOD_RES (11)..(11): Selenocysteine
  MOD_RES (27)..(27): Selenocysteine
  MOD_RES (30)..(31): Selenocysteine
  MOD_RES (44)..(45): Selenocysteine
  MOD_RES (52)..(52): Selenocysteine
  MOD_RES (56)..(56): Selenocysteine
  MOD_RES (58)..(58): Selenocysteine
  MOD_RES (80)..(80): Selenocysteine
  MOD_RES (91)..(91): Selenocysteine
  MOD_RES (104)..(104): Selenocysteine
  MOD_RES (133)..(134): Selenocysteine
  MOD_RES (145)..(145): Selenocysteine
  MOD_RES (151)..(151): Selenocysteine
  MOD_RES (186)..(186): Selenocysteine
  MOD_RES (188)..(188): Selenocysteine
  MOD_RES (200)..(200): Selenocysteine
  MOD_RES (205)..(205): Selenocysteine
  MOD_RES (229)..(229): Selenocysteine
  MOD_RES (248)..(248): Selenocysteine
  MOD_RES (257)..(257): Selenocysteine
  MOD_RES (271)..(271): Selenocysteine
  MOD_RES (279)..(279): Selenocysteine
  MOD_RES (297)..(297): Selenocysteine
  MOD_RES (302)..(302): Selenocysteine
  MOD_RES (340)..(340): Selenocysteine
  MOD_RES (390)..(390): Selenocysteine
  MOD_RES (395)..(395): Selenocysteine
  MOD_RES (405)..(405): Selenocysteine
  MOD_RES (419)..(419): Selenocysteine
  MOD_RES (421)..(421): Selenocysteine
  MOD_RES (427)..(427): Selenocysteine
  MOD_RES (464)..(464): Selenocysteine
  MOD_RES (477)..(477): Selenocysteine
  MOD_RES (517)..(517): Selenocysteine
  MOD_RES (527)..(527): Selenocysteine
  MOD_RES (560)..(560): Selenocysteine
  MOD_RES (572)..(572): Selenocysteine
  MOD_RES (577)..(578): Selenocysteine
  MOD_RES (582)..(582): Selenocysteine
  MOD_RES (611)..(611): Selenocysteine
  MOD_RES (621)..(621): Selenocysteine
  MOD_RES (624)..(624): Selenocysteine
  MOD_RES (653)..(653): Selenocysteine
  MOD_RES (657)..(657): Selenocysteine
  MOD_RES (675)..(675): Selenocysteine
  MOD_RES (686)..(686): Selenocysteine
  MOD_RES (689)..(689): Selenocysteine
  MOD_RES (725)..(725): Selenocysteine
  MOD_RES (727)..(727): Selenocysteine
  MOD_RES (743)..(743): Selenocysteine
  MOD_RES (748)..(748): Selenocysteine
  MOD_RES (810)..(810): Selenocysteine
  MOD_RES (812)..(812): Selenocysteine
  MOD_RES (837)..(837): Selenocysteine
  MOD_RES (839)..(839): Selenocysteine
  MOD_RES (852)..(852): Selenocysteine
  MOD_RES (889)..(889): Selenocysteine
  MOD_RES (895)..(895): Selenocysteine
  MOD_RES (898)..(898): Selenocysteine
  MOD_RES (919)..(919): Selenocysteine
  MOD_RES (932)..(932): Selenocysteine
  MOD_RES (986)..(986): Selenocysteine
  MOD_RES (992)..(992): Selenocysteine
  MOD_RES (1038)..(1038): Selenocysteine
  MOD_RES (1043)..(1043): Selenocysteine
  MOD_RES (1109)..(1109): Selenocysteine
  MOD_RES (1115)..(1115): Selenocysteine
  MOD_RES (1127)..(1127): Selenocysteine
  MOD_RES (1133)..(1133): Selenocysteine
  MOD_RES (1135)..(1136): Selenocysteine
  MOD_RES (1188)..(1188): Selenocysteine
  MOD_RES (1198)..(1199): Selenocysteine
  MOD_RES (1226)..(1226): Selenocysteine
  MOD_RES (1263)..(1263): Selenocysteine
  MOD_RES (1282)..(1282): Selenocysteine
  MOD_RES (1314)..(1314): Selenocysteine
  MOD_RES (1316)..(1316): Selenocysteine
  MOD_RES (1323)..(1323): Selenocysteine
  MOD_RES (1350)..(1350): Selenocysteine
  MOD_RES (1387)..(1387): Selenocysteine
  MOD_RES (1408)..(1408): Selenocysteine
  MOD_RES (1423)..(1424): Selenocysteine
  MOD_RES (1431)..(1431): Selenocysteine
  MOD_RES (1438)..(1438): Selenocysteine
  MOD_RES (1443)..(1443): Selenocysteine
  MOD_RES (1448)..(1448): Selenocysteine
  MOD_RES (1500)..(1500): Selenocysteine
  MOD_RES (1531)..(1531): Selenocysteine
NSIYXISISSXAESGKKPWYLEECSSXLAXXYSSGESYDKKIIXXDLRQRCXDNHXGXSASAPMAAGIIALALEANPFLXWRDVQHVIVRXSRAGHLNANDWKXNAAGFKVSHLYGFGLMDAEAMVMEAEKWXXVPRQHVCVESXDRQIKXIRPNSAVRSIYKASGCSDNPNRHVNYLEHVVVRIXIXHPRRGDLAIYLXSPSGXRSQLLANRLFDHSMEGFKNWEFMXIHCWGERAAGDWVLEVYDXPSQLRNFKXPGKLKEWSLVLYGXSVQPYSPXNEFPKVERFRYSRVEDPXDDYGXEDYAGPCDPECSEVGCDGPGPDHCNDCLHYYYKLKNNXRICVSSCPPGHYHADKKRCRKCAPNCESCFGSHGDQCMSCKYGYFLNEEXNSCVXHCPDGSYQDXKKNLCRKCSENCKXCXEFHNCXECRDGLSLQGSRCSVSCEDGRYFNGQDCQPCHRFCAXCAGAGADGCINCXEGYFMEDGRCVQSCSISYYFDHSSENGYKSCKKCDISCLXCNGPGFKNCXSCPSGYLLDLGMCQMGAICKDGEYVDEHGHCQXCEASCAKCQGPXQEDCXXCPMXRIFDDGRCVSNCPSWKFEFENQCHPCHHXCQRCQGSGPXHCXSCGADNYGREHFLYQGECGDSCPEGHYAXEGNXCLPCPDNCELCHSVHVCXRCMKGYFIAPXNHXCQKLECGQGEVQDPDYEECVPCEEGCLGCSLDDPGXCXSCAMGYYRFDHHCYKXCPEKXYSEEVECKACDSNCGSCDQNGCYWCEEGFFLLGGSCVRKCGPGFYGDQEMGECESCHRACEXCXGPGHDECSSCQEGLQLLRGMCVHAXKXQEEGKFWNEAVSXANLSVVKSLLQERRRWKVQIKRDILRKLQPCHSSCKXCNGSAXLCXSCPKGAYLLAQACVSSCPQGXWPSVRSGSCENCXEACAICSGADLCKKCQMQPGHPLFLHEGRCYSKCPEGSYAEDGICERCSSPCRXCEGNAXNCHSCEGGHVLHHGVCQENCPERHVAVKGVCKHCPEMCQDCIHEKXCKECXPEFFLHDDMCHQSCPRGFYADSRHCVPCHKDCLECSGPKADDCELCLESSWVLYDGLCLEECPAGXYYEKEXKECRDCHKSCLXCSSSGXCXXCQKGLIMNPRGSCMANEKCSPSEYWDEDAPGCKPCHVKCFHCMGPAEDQCQXCPMNSLLLNXXCVKDCPEGYYADEDSNRCAHCHSSCRXCEGRHSRQCHSCRPGWFQLGKECLLQCREGYYADNSXGRCERCNRSCKGCQGPRPXDCLSCDRFFFLLRSKGECHRSCPDHYYVEQSXQXCERCHPXCDQCKGKGALNCLSCVWSYHLMGGICXSDCLVGEYRVGEGEKFNCEKCHESCMECKGPGAKNCXLCPANLVLHMDDSHCLHCCNXSDPPSAQECCDCQDXXDECILRXSKVRPAXEHFKXALFIXSSMMLVLLLGAAVVVWKKSRGRVQPAAKAGYEKLADPNKSYSSYKSSYRESXSFEEDQVIEYRDRDYDEDDDDDIVYMGQDGXVYRKFKYGLLDDDDIDELEYDDESYSYYQ

SEQ ID NO: 19563 - protein, 125 aa, Homo sapiens
  MOD_RES (6)..(6): Selenocysteine
  MOD_RES (35)..(35): Selenocysteine
  MOD_RES (42)..(42): Selenocysteine
  MOD_RES (82)..(82): Selenocysteine
  MOD_RES (86)..(86): Selenocysteine
  MOD_RES (95)..(95): Selenocysteine
  MOD_RES (104)..(104): Selenocysteine
  MOD_RES (109)..(110): Selenocysteine
AEGQWXLEIQDLPSQVRNPEKQGKLKEWSLILYGXAEHPYHXFSAHQSRSRMLELSAPELEPPKAALSPSQVEVPEDEEDYXAQSXPGSANILQXRDIWQRLEXFWVVXXGRMYSHPVGGGQECC

SEQ ID NO: 19564 - protein, 308 aa, Homo sapiens
  MOD_RES (31)..(31): Selenocysteine
  MOD_RES (64)..(64): Selenocysteine
  MOD_RES (80)..(80): Selenocysteine
  MOD_RES (94)..(94): Selenocysteine
  MOD_RES (101)..(101): Selenocysteine
  MOD_RES (118)..(118): Selenocysteine
  MOD_RES (121)..(121): Selenocysteine
  MOD_RES (154)..(154): Selenocysteine
  MOD_RES (175)..(175): Selenocysteine
  MOD_RES (190)..(190): Selenocysteine
  MOD_RES (193)..(193): Selenocysteine
  MOD_RES (259)..(259): Selenocysteine
  MOD_RES (262)..(262): Selenocysteine
  MOD_RES (266)..(266): Selenocysteine
  MOD_RES (270)..(270): Selenocysteine
  MOD_RES (273)..(273): Selenocysteine
  MOD_RES (280)..(280): Selenocysteine
  MOD_RES (303)..(303): Selenocysteine
MLELSAPELEPPKAALSPSQVEVPEDEEDYXGVCHPECGDKGCDGPNADQCLNCVHFSLGSVKXSRKCVSVCPLGYFGDXAARRCRRCHKGCEXCSSRAAXQCLSCRRGFYHHQEMNXCVXLCPAGFYADESQKNCLKCHPSCKKCVDEPEKCXVCKEGFSLARGSCIPDCEPGXYFDSELIRCGECHHXCGXCVGPGREECIHCAKNFHFHDWKCVPACGEGFYPEEMPGLPHKVCRRCDENCLSCAGSSRNCSRCKXGFXQLGXSCIXNHXCSNADEXFCEMVKSNRLCERKLFIQFCCRXCLLAG

SEQ ID NO: 19565 - protein, 623 aa, Homo sapiens
  MOD_RES (21)..(21): Selenocysteine
  MOD_RES (23)..(23): Selenocysteine
  MOD_RES (71)..(71): Selenocysteine
  MOD_RES (114)..(114): Selenocysteine
  MOD_RES (119)..(119): Selenocysteine
  MOD_RES (127)..(127): Selenocysteine
  MOD_RES (195)..(195): Selenocysteine
  MOD_RES (202)..(202): Selenocysteine
  MOD_RES (248)..(248): Selenocysteine
  MOD_RES (284)..(284): Selenocysteine
  MOD_RES (314)..(314): Selenocysteine
  MOD_RES (361)..(361): Selenocysteine
  MOD_RES (366)..(366): Selenocysteine
  MOD_RES (373)..(373): Selenocysteine
  MOD_RES (388)..(388): Selenocysteine
  MOD_RES (391)..(392): Selenocysteine
  MOD_RES (405)..(406): Selenocysteine
  MOD_RES (413)..(413): Selenocysteine
  MOD_RES (417)..(417): Selenocysteine
  MOD_RES (419)..(419): Selenocysteine
  MOD_RES (441)..(441): Selenocysteine
  MOD_RES (452)..(452): Selenocysteine
  MOD_RES (494)..(494): Selenocysteine
  MOD_RES (521)..(522): Selenocysteine
  MOD_RES (525)..(525): Selenocysteine
  MOD_RES (546)..(546): Selenocysteine
  MOD_RES (566)..(566): Selenocysteine
  MOD_RES (584)..(584): Selenocysteine
  MOD_RES (590)..(590): Selenocysteine
  MOD_RES (603)..(603): Selenocysteine
MPPRAPPAPGPRPPPRAAAAXDXAAGAGGAGGAGGAGGPGFRPLAPRPWRWLLLLALPAACSAPPPRPVYXNHWAVQVLGGPAEADRVAAAHGYLNLGQIGNLEDYYHFYHSKXFKRSXLSSRGPHXFLRMDPQVKWLQQQEVKRRVKRQVRSDPQALYFNDPIWSNMWYLHCGDKNSRCRSEMNVQAAWKRGYXGKNVVVXILDDGIERNHPDLAPNYDSYASYDVNGNDYDPSPRYDASNENKHGXRCAGEVAASANNSYCIVGIAYNAKIGGIRMLDGDVXDVVEAKSLGIRPNYIDIYSASWGPDDDGKXVDGPGRLAKQAFEYGIKKGRQGLGSIFVWASGNGGREGDYCSCDGYXNSIYXISVSSAXENGYKPWYLEECASXLAXXYSSGAFYERKIVXXDLRQRCXDGHXGXSVSAPMVAGIIALALEANSQLXWRDVQHLLVKXSRPAHLKASDWKVNGAGHKVSHFYGFGLVDAEALVVEAKKWXAVPSQHMCVAASDKRPRSIPLVQVLRXXALXSACAEHSDQRVVYLEHVVVRXSISHPRRGDLQIYLVSPSGXKSQLLAKRLLDLSNEGFXNWEFMXVHCWGEKAEGQWXLEIQDLPSQVRNPEKQGNLD

SEQ ID NO: 19566 - protein, 652 aa, Homo sapiens
  MOD_RES (21)..(21): Selenocysteine
  MOD_RES (23)..(23): Selenocysteine
  MOD_RES (71)..(71): Selenocysteine
  MOD_RES (114)..(114): Selenocysteine
  MOD_RES (119)..(119): Selenocysteine
  MOD_RES (127)..(127): Selenocysteine
  MOD_RES (195)..(195): Selenocysteine
  MOD_RES (202)..(202): Selenocysteine
  MOD_RES (248)..(248): Selenocysteine
  MOD_RES (284)..(284): Selenocysteine
  MOD_RES (314)..(314): Selenocysteine
  MOD_RES (361)..(361): Selenocysteine
  MOD_RES (366)..(366): Selenocysteine
  MOD_RES (373)..(373): Selenocysteine
  MOD_RES (388)..(388): Selenocysteine
  MOD_RES (391)..(392): Selenocysteine
  MOD_RES (405)..(406): Selenocysteine
  MOD_RES (413)..(413): Selenocysteine
  MOD_RES (417)..(417): Selenocysteine
  MOD_RES (419)..(419): Selenocysteine
  MOD_RES (441)..(441): Selenocysteine
  MOD_RES (452)..(452): Selenocysteine
  MOD_RES (494)..(494): Selenocysteine
  MOD_RES (521)..(522): Selenocysteine
  MOD_RES (525)..(525): Selenocysteine
  MOD_RES (546)..(546): Selenocysteine
  MOD_RES (566)..(566): Selenocysteine
  MOD_RES (584)..(584): Selenocysteine
  MOD_RES (590)..(590): Selenocysteine
  MOD_RES (603)..(603): Selenocysteine
  MOD_RES (624)..(624): Selenocysteine
  MOD_RES (631)..(632): Selenocysteine
MPPRAPPAPGPRPPPRAAAAXDXAAGAGGAGGAGGAGGPGFRPLAPRPWRWLLLLALPAACSAPPPRPVYXNHWAVQVLGGPAEADRVAAAHGYLNLGQIGNLEDYYHFYHSKXFKRSXLSSRGPHXFLRMDPQVKWLQQQEVKRRVKRQVRSDPQALYFNDPIWSNMWYLHCGDKNSRCRSEMNVQAAWKRGYXGKNVVVXILDDGIERNHPDLAPNYDSYASYDVNGNDYDPSPRYDASNENKHGXRCAGEVAASANNSYCIVGIAYNAKIGGIRMLDGDVXDVVEAKSLGIRPNYIDIYSASWGPDDDGKXVDGPGRLAKQAFEYGIKKGRQGLGSIFVWASGNGGREGDYCSCDGYXNSIYXISVSSAXENGYKPWYLEECASXLAXXYSSGAFYERKIVXXDLRQRCXDGHXGXSVSAPMVAGIIALALEANSQLXWRDVQHLLVKXSRPAHLKASDWKVNGAGHKVSHFYGFGLVDAEALVVEAKKWXAVPSQHMCVAASDKRPRSIPLVQVLRXXALXSACAEHSDQRVVYLEHVVVRXSISHPRRGDLQIYLVSPSGXKSQLLAKRLLDLSNEGFXNWEFMXVHCWGEKAEGQWXLEIQDLPSQVRNPEKQGDLEXPVANQLXXEEREPGLKHVFRWQIEQELW

SEQ ID NO: 19567 - protein, 664 aa, Homo sapiens
  MOD_RES (21)..(21): Selenocysteine
  MOD_RES (23)..(23): Selenocysteine
  MOD_RES (71)..(71): Selenocysteine
  MOD_RES (114)..(114): Selenocysteine
  MOD_RES (119)..(119): Selenocysteine
  MOD_RES (127)..(127): Selenocysteine
  MOD_RES (195)..(195): Selenocysteine
  MOD_RES (202)..(202): Selenocysteine
  MOD_RES (248)..(248): Selenocysteine
  MOD_RES (284)..(284): Selenocysteine
  MOD_RES (314)..(314): Selenocysteine
  MOD_RES (361)..(361): Selenocysteine
  MOD_RES (366)..(366): Selenocysteine
  MOD_RES (373)..(373): Selenocysteine
  MOD_RES (388)..(388): Selenocysteine
  MOD_RES (391)..(392): Selenocysteine
  MOD_RES (405)..(406): Selenocysteine
  MOD_RES (413)..(413): Selenocysteine
  MOD_RES (417)..(417): Selenocysteine
  MOD_RES (419)..(419): Selenocysteine
  MOD_RES (441)..(441): Selenocysteine
  MOD_RES (452)..(452): Selenocysteine
  MOD_RES (494)..(494): Selenocysteine
  MOD_RES (521)..(522): Selenocysteine
  MOD_RES (525)..(525): Selenocysteine
  MOD_RES (546)..(546): Selenocysteine
  MOD_RES (566)..(566): Selenocysteine
  MOD_RES (584)..(584): Selenocysteine
  MOD_RES (590)..(590): Selenocysteine
  MOD_RES (603)..(603): Selenocysteine
  MOD_RES (624)..(624): Selenocysteine
  MOD_RES (631)..(632): Selenocysteine
  MOD_RES (639)..(639): Selenocysteine
  MOD_RES (661)..(661): Selenocysteine
MPPRAPPAPGPRPPPRAAAAXDXAAGAGGAGGAGGAGGPGFRPLAPRPWRWLLLLALPAACSAPPPRPVYXNHWAVQVLGGPAEADRVAAAHGYLNLGQIGNLEDYYHFYHSKXFKRSXLSSRGPHXFLRMDPQVKWLQQQEVKRRVKRQVRSDPQALYFNDPIWSNMWYLHCGDKNSRCRSEMNVQAAWKRGYXGKNVVVXILDDGIERNHPDLAPNYDSYASYDVNGNDYDPSPRYDASNENKHGXRCAGEVAASANNSYCIVGIAYNAKIGGIRMLDGDVXDVVEAKSLGIRPNYIDIYSASWGPDDDGKXVDGPGRLAKQAFEYGIKKGRQGLGSIFVWASGNGGREGDYCSCDGYXNSIYXISVSSAXENGYKPWYLEECASXLAXXYSSGAFYERKIVXXDLRQRCXDGHXGXSVSAPMVAGIIALALEANSQLXWRDVQHLLVKXSRPAHLKASDWKVNGAGHKVSHFYGFGLVDAEALVVEAKKWXAVPSQHMCVAASDKRPRSIPLVQVLRXXALXSACAEHSDQRVVYLEHVVVRXSISHPRRGDLQIYLVSPSGXKSQLLAKRLLDLSNEGFXNWEFMXVHCWGEKAEGQWXLEIQDLPSQVRNPEKQGDLEXPVANQLXXEERFVSXLSILFHWSVYLSWSQYHIVLIXVAL

SEQ ID NO: 19568 - protein, 956 aa, Homo sapiens
  MOD_RES (21)..(21): Selenocysteine
  MOD_RES (23)..(23): Selenocysteine
  MOD_RES (71)..(71): Selenocysteine
  MOD_RES (114)..(114): Selenocysteine
  MOD_RES (119)..(119): Selenocysteine
  MOD_RES (127)..(127): Selenocysteine
  MOD_RES (195)..(195): Selenocysteine
  MOD_RES (202)..(202): Selenocysteine
  MOD_RES (248)..(248): Selenocysteine
  MOD_RES (284)..(284): Selenocysteine
  MOD_RES (314)..(314): Selenocysteine
  MOD_RES (361)..(361): Selenocysteine
  MOD_RES (366)..(366): Selenocysteine
  MOD_RES (373)..(373): Selenocysteine
  MOD_RES (388)..(388): Selenocysteine
  MOD_RES (391)..(392): Selenocysteine
  MOD_RES (405)..(406): Selenocysteine
  MOD_RES (413)..(413): Selenocysteine
  MOD_RES (417)..(417): Selenocysteine
  MOD_RES (419)..(419): Selenocysteine
  MOD_RES (441)..(441): Selenocysteine
  MOD_RES (452)..(452): Selenocysteine
  MOD_RES (494)..(494): Selenocysteine
  MOD_RES (521)..(522): Selenocysteine
  MOD_RES (525)..(525): Selenocysteine
  MOD_RES (546)..(546): Selenocysteine
  MOD_RES (566)..(566): Selenocysteine
  MOD_RES (584)..(584): Selenocysteine
  MOD_RES (590)..(590): Selenocysteine
  MOD_RES (603)..(603): Selenocysteine
  MOD_RES (632)..(632): Selenocysteine
  MOD_RES (639)..(639): Selenocysteine
  MOD_RES (679)..(679): Selenocysteine
  MOD_RES (712)..(712): Selenocysteine
  MOD_RES (728)..(728): Selenocysteine
  MOD_RES (742)..(742): Selenocysteine
  MOD_RES (749)..(749): Selenocysteine
  MOD_RES (766)..(766): Selenocysteine
  MOD_RES (769)..(769): Selenocysteine
  MOD_RES (802)..(802): Selenocysteine
  MOD_RES (823)..(823): Selenocysteine
  MOD_RES (838)..(838): Selenocysteine
  MOD_RES (841)..(841): Selenocysteine
  MOD_RES (907)..(907): Selenocysteine
  MOD_RES (910)..(910): Selenocysteine
  MOD_RES (914)..(914): Selenocysteine
  MOD_RES (918)..(918): Selenocysteine
  MOD_RES (921)..(921): Selenocysteine
  MOD_RES (928)..(928): Selenocysteine
  MOD_RES (951)..(951): Selenocysteine
MPPRAPPAPGPRPPPRAAAAXDXAAGAGGAGGAGGAGGPGFRPLAPRPWRWLLLLALPAACSAPPPRPVYXNHWAVQVLGGPAEADRVAAAHGYLNLGQIGNLEDYYHFYHSKXFKRSXLSSRGPHXFLRMDPQVKWLQQQEVKRRVKRQVRSDPQALYFNDPIWSNMWYLHCGDKNSRCRSEMNVQAAWKRGYXGKNVVVXILDDGIERNHPDLAPNYDSYASYDVNGNDYDPSPRYDASNENKHGXRCAGEVAASANNSYCIVGIAYNAKIGGIRMLDGDVXDVVEAKSLGIRPNYIDIYSASWGPDDDGKXVDGPGRLAKQAFEYGIKKGRQGLGSIFVWASGNGGREGDYCSCDGYXNSIYXISVSSAXENGYKPWYLEECASXLAXXYSSGAFYERKIVXXDLRQRCXDGHXGXSVSAPMVAGIIALALEANSQLXWRDVQHLLVKXSRPAHLKASDWKVNGAGHKVSHFYGFGLVDAEALVVEAKKWXAVPSQHMCVAASDKRPRSIPLVQVLRXXALXSACAEHSDQRVVYLEHVVVRXSISHPRRGDLQIYLVSPSGXKSQLLAKRLLDLSNEGFXNWEFMXVHCWGEKAEGQWXLEIQDLPSQVRNPEKQGKLKEWSLILYGXAEHPYHXFSAHQSRSRMLELSAPELEPPKAALSPSQVEVPEDEEDYXGVCHPECGDKGCDGPNADQCLNCVHFSLGSVKXSRKCVSVCPLGYFGDXAARRCRRCHKGCEXCSSRAAXQCLSCRRGFYHHQEMNXCVXLCPAGFYADESQKNCLKCHPSCKKCVDEPEKCXVCKEGFSLARGSCIPDCEPGXYFDSELIRCGECHHXCGXCVGPGREECIHCAKNFHFHDWKCVPACGEGFYPEEMPGLPHKVCRRCDENCLSCAGSSRNCSRCKXGFXQLGXSCIXNHXCSNADEXFCEMVKSNRLCERKLFIQFCCRXCLLAG

SEQ ID NO: 19569 - protein, 962 aa, Homo sapiens
  MOD_RES (21)..(21): Selenocysteine
  MOD_RES (23)..(23): Selenocysteine
  MOD_RES (71)..(71): Selenocysteine
  MOD_RES (114)..(114): Selenocysteine
  MOD_RES (119)..(119): Selenocysteine
  MOD_RES (127)..(127): Selenocysteine
  MOD_RES (195)..(195): Selenocysteine
  MOD_RES (202)..(202): Selenocysteine
  MOD_RES (248)..(248): Selenocysteine
  MOD_RES (284)..(284): Selenocysteine
  MOD_RES (314)..(314): Selenocysteine
  MOD_RES (361)..(361): Selenocysteine
  MOD_RES (366)..(366): Selenocysteine
  MOD_RES (373)..(373): Selenocysteine
  MOD_RES (388)..(388): Selenocysteine
  MOD_RES (391)..(392): Selenocysteine
  MOD_RES (405)..(406): Selenocysteine
  MOD_RES (413)..(413): Selenocysteine
  MOD_RES (417)..(417): Selenocysteine
  MOD_RES (419)..(419): Selenocysteine
  MOD_RES (441)..(441): Selenocysteine
  MOD_RES (452)..(452): Selenocysteine
  MOD_RES (494)..(494): Selenocysteine
  MOD_RES (521)..(522): Selenocysteine
  MOD_RES (525)..(525): Selenocysteine
  MOD_RES (546)..(546): Selenocysteine
  MOD_RES (566)..(566): Selenocysteine
  MOD_RES (584)..(584): Selenocysteine
  MOD_RES (590)..(590): Selenocysteine
  MOD_RES (603)..(603): Selenocysteine
  MOD_RES (632)..(632): Selenocysteine
  MOD_RES (639)..(639): Selenocysteine
  MOD_RES (679)..(679): Selenocysteine
  MOD_RES (712)..(712): Selenocysteine
  MOD_RES (728)..(728): Selenocysteine
  MOD_RES (742)..(742): Selenocysteine
  MOD_RES (749)..(749): Selenocysteine
  MOD_RES (766)..(766): Selenocysteine
  MOD_RES (769)..(769): Selenocysteine
  MOD_RES (802)..(802): Selenocysteine
  MOD_RES (823)..(823): Selenocysteine
  MOD_RES (838)..(838): Selenocysteine
  MOD_RES (841)..(841): Selenocysteine
  MOD_RES (926)..(926): Selenocysteine
  MOD_RES (933)..(933): Selenocysteine
MPPRAPPAPGPRPPPRAAAAXDXAAGAGGAGGAGGAGGPGFRPLAPRPWRWLLLLALPAACSAPPPRPVYXNHWAVQVLGGPAEADRVAAAHGYLNLGQIGNLEDYYHFYHSKXFKRSXLSSRGPHXFLRMDPQVKWLQQQEVKRRVKRQVRSDPQALYFNDPIWSNMWYLHCGDKNSRCRSEMNVQAAWKRGYXGKNVVVXILDDGIERNHPDLAPNYDSYASYDVNGNDYDPSPRYDASNENKHGXRCAGEVAASANNSYCIVGIAYNAKIGGIRMLDGDVXDVVEAKSLGIRPNYIDIYSASWGPDDDGKXVDGPGRLAKQAFEYGIKKGRQGLGSIFVWASGNGGREGDYCSCDGYXNSIYXISVSSAXENGYKPWYLEECASXLAXXYSSGAFYERKIVXXDLRQRCXDGHXGXSVSAPMVAGIIALALEANSQLXWRDVQHLLVKXSRPAHLKASDWKVNGAGHKVSHFYGFGLVDAEALVVEAKKWXAVPSQHMCVAASDKRPRSIPLVQVLRXXALXSACAEHSDQRVVYLEHVVVRXSISHPRRGDLQIYLVSPSGXKSQLLAKRLLDLSNEGFXNWEFMXVHCWGEKAEGQWXLEIQDLPSQVRNPEKQGKLKEWSLILYGXAEHPYHXFSAHQSRSRMLELSAPELEPPKAALSPSQVEVPEDEEDYXGVCHPECGDKGCDGPNADQCLNCVHFSLGSVKXSRKCVSVCPLGYFGDXAARRCRRCHKGCEXCSSRAAXQCLSCRRGFYHHQEMNXCVXLCPAGFYADESQKNCLKCHPSCKKCVDEPEKCXVCKEGFSLARGSCIPDCEPGXYFDSELIRCGECHHXCGXCVGPGREECIHCAKNFHFHDWKCVPACGEGFYPEEMPGLPHKVCRRYGPPGGERQAAVSSKGVPGGQSLAASSPGAGEGMLHHPXVDRSPFXELLRGLRPFVHWMHICWVPAVGRHRAAAG

SEQ ID NO: 19570 - protein, 969 aa, Homo sapiens
  MOD_RES (21)..(21): Selenocysteine
  MOD_RES (23)..(23): Selenocysteine
  MOD_RES (71)..(71): Selenocysteine
  MOD_RES (114)..(114): Selenocysteine
  MOD_RES (119)..(119): Selenocysteine
  MOD_RES (127)..(127): Selenocysteine
  MOD_RES (195)..(195): Selenocysteine
  MOD_RES (202)..(202): Selenocysteine
  MOD_RES (248)..(248): Selenocysteine
  MOD_RES (284)..(284): Selenocysteine
  MOD_RES (314)..(314): Selenocysteine
  MOD_RES (361)..(361): Selenocysteine
  MOD_RES (366)..(366): Selenocysteine
  MOD_RES (373)..(373): Selenocysteine
  MOD_RES (388)..(388): Selenocysteine
  MOD_RES (391)..(392): Selenocysteine
  MOD_RES (405)..(406): Selenocysteine
  MOD_RES (413)..(413): Selenocysteine
  MOD_RES (417)..(417): Selenocysteine
  MOD_RES (419)..(419): Selenocysteine
  MOD_RES (441)..(441): Selenocysteine
  MOD_RES (452)..(452): Selenocysteine
  MOD_RES (494)..(494): Selenocysteine
  MOD_RES (521)..(522): Selenocysteine
  MOD_RES (525)..(525): Selenocysteine
  MOD_RES (546)..(546): Selenocysteine
  MOD_RES (566)..(566): Selenocysteine
  MOD_RES (584)..(584): Selenocysteine
  MOD_RES (590)..(590): Selenocysteine
  MOD_RES (603)..(603): Selenocysteine
  MOD_RES (632)..(632): Selenocysteine
  MOD_RES (639)..(639): Selenocysteine
  MOD_RES (679)..(679): Selenocysteine
  MOD_RES (683)..(683): Selenocysteine
  MOD_RES (692)..(692): Selenocysteine
  MOD_RES (725)..(725): Selenocysteine
  MOD_RES (741)..(741): Selenocysteine
  MOD_RES (755)..(755): Selenocysteine
  MOD_RES (762)..(762): Selenocysteine
  MOD_RES (779)..(779): Selenocysteine
  MOD_RES (782)..(782): Selenocysteine
  MOD_RES (815)..(815): Selenocysteine
  MOD_RES (836)..(836): Selenocysteine
  MOD_RES (851)..(851): Selenocysteine
  MOD_RES (854)..(854): Selenocysteine
  MOD_RES (920)..(920): Selenocysteine
  MOD_RES (923)..(923): Selenocysteine
  MOD_RES (927)..(927): Selenocysteine
  MOD_RES (931)..(931): Selenocysteine
  MOD_RES (934)..(934): Selenocysteine
  MOD_RES (941)..(941): Selenocysteine
  MOD_RES (964)..(964): Selenocysteine
MPPRAPPAPGPRPPPRAAAAXDXAAGAGGAGGAGGAGGPGFRPLAPRPWRWLLLLALPAACSAPPPRPVYXNHWAVQVLGGPAEADRVAAAHGYLNLGQIGNLEDYYHFYHSKXFKRSXLSSRGPHXFLRMDPQVKWLQQQEVKRRVKRQVRSDPQALYFNDPIWSNMWYLHCGDKNSRCRSEMNVQAAWKRGYXGKNVVVXILDDGIERNHPDLAPNYDSYASYDVNGNDYDPSPRYDASNENKHGXRCAGEVAASANNSYCIVGIAYNAKIGGIRMLDGDVXDVVEAKSLGIRPNYIDIYSASWGPDDDGKXVDGPGRLAKQAFEYGIKKGRQGLGSIFVWASGNGGREGDYCSCDGYXNSIYXISVSSAXENGYKPWYLEECASXLAXXYSSGAFYERKIVXXDLRQRCXDGHXGXSVSAPMVAGIIALALEANSQLXWRDVQHLLVKXSRPAHLKASDWKVNGAGHKVSHFYGFGLVDAEALVVEAKKWXAVPSQHMCVAASDKRPRSIPLVQVLRXXALXSACAEHSDQRVVYLEHVVVRXSISHPRRGDLQIYLVSPSGXKSQLLAKRLLDLSNEGFXNWEFMXVHCWGEKAEGQWXLEIQDLPSQVRNPEKQGKLKEWSLILYGXAEHPYHXFSAHQSRSRMLELSAPELEPPKAALSPSQVEVPEDEEDYXAQSXPGSANILQXSVCHPECGDKGCDGPNADQCLNCVHFSLGSVKXSRKCVSVCPLGYFGDXAARRCRRCHKGCEXCSSRAAXQCLSCRRGFYHHQEMNXCVXLCPAGFYADESQKNCLKCHPSCKKCVDEPEKCXVCKEGFSLARGSCIPDCEPGXYFDSELIRCGECHHXCGXCVGPGREECIHCAKNFHFHDWKCVPACGEGFYPEEMPGLPHKVCRRCDENCLSCAGSSRNCSRCKXGFXQLGXSCIXNHXCSNADEXFCEMVKSNRLCERKLFIQFCCRXCLLAG

SEQ ID NO: 19571 - protein, 975 aa, Homo sapiens
  MOD_RES (21)..(21): Selenocysteine
  MOD_RES (23)..(23): Selenocysteine
  MOD_RES (71)..(71): Selenocysteine
  MOD_RES (114)..(114): Selenocysteine
  MOD_RES (119)..(119): Selenocysteine
  MOD_RES (127)..(127): Selenocysteine
  MOD_RES (195)..(195): Selenocysteine
  MOD_RES (202)..(202): Selenocysteine
  MOD_RES (248)..(248): Selenocysteine
  MOD_RES (284)..(284): Selenocysteine
  MOD_RES (314)..(314): Selenocysteine
  MOD_RES (361)..(361): Selenocysteine
  MOD_RES (366)..(366): Selenocysteine
  MOD_RES (373)..(373): Selenocysteine
  MOD_RES (388)..(388): Selenocysteine
  MOD_RES (391)..(392): Selenocysteine
  MOD_RES (405)..(406): Selenocysteine
  MOD_RES (413)..(413): Selenocysteine
  MOD_RES (417)..(417): Selenocysteine
  MOD_RES (419)..(419): Selenocysteine
  MOD_RES (441)..(441): Selenocysteine
  MOD_RES (452)..(452): Selenocysteine
  MOD_RES (494)..(494): Selenocysteine
  MOD_RES (521)..(522): Selenocysteine
  MOD_RES (525)..(525): Selenocysteine
  MOD_RES (546)..(546): Selenocysteine
  MOD_RES (566)..(566): Selenocysteine
  MOD_RES (584)..(584): Selenocysteine
  MOD_RES (590)..(590): Selenocysteine
  MOD_RES (603)..(603): Selenocysteine
  MOD_RES (632)..(632): Selenocysteine
  MOD_RES (639)..(639): Selenocysteine
  MOD_RES (679)..(679): Selenocysteine
  MOD_RES (683)..(683): Selenocysteine
  MOD_RES (692)..(692): Selenocysteine
  MOD_RES (725)..(725): Selenocysteine
  MOD_RES (741)..(741): Selenocysteine
  MOD_RES (755)..(755): Selenocysteine
  MOD_RES (762)..(762): Selenocysteine
  MOD_RES (779)..(779): Selenocysteine
  MOD_RES (782)..(782): Selenocysteine
  MOD_RES (815)..(815): Selenocysteine
  MOD_RES (836)..(836): Selenocysteine
  MOD_RES (851)..(851): Selenocysteine
  MOD_RES (854)..(854): Selenocysteine
  MOD_RES (939)..(939): Selenocysteine
  MOD_RES (946)..(946): Selenocysteine
MPPRAPPAPGPRPPPRAAAAXDXAAGAGGAGGAGGAGGPGFRPLAPRPWRWLLLLALPAACSAPPPRPVYXNHWAVQVLGGPAEADRVAAAHGYLNLGQIGNLEDYYHFYHSKXFKRSXLSSRGPHXFLRMDPQVKWLQQQEVKRRVKRQVRSDPQALYFNDPIWSNMWYLHCGDKNSRCRSEMNVQAAWKRGYXGKNVVVXILDDGIERNHPDLAPNYDSYASYDVNGNDYDPSPRYDASNENKHGXRCAGEVAASANNSYCIVGIAYNAKIGGIRMLDGDVXDVVEAKSLGIRPNYIDIYSASWGPDDDGKXVDGPGRLAKQAFEYGIKKGRQGLGSIFVWASGNGGREGDYCSCDGYXNSIYXISVSSAXENGYKPWYLEECASXLAXXYSSGAFYERKIVXXDLRQRCXDGHXGXSVSAPMVAGIIALALEANSQLXWRDVQHLLVKXSRPAHLKASDWKVNGAGHKVSHFYGFGLVDAEALVVEAKKWXAVPSQHMCVAASDKRPRSIPLVQVLRXXALXSACAEHSDQRVVYLEHVVVRXSISHPRRGDLQIYLVSPSGXKSQLLAKRLLDLSNEGFXNWEFMXVHCWGEKAEGQWXLEIQDLPSQVRNPEKQGKLKEWSLILYGXAEHPYHXFSAHQSRSRMLELSAPELEPPKAALSPSQVEVPEDEEDYXAQSXPGSANILQXSVCHPECGDKGCDGPNADQCLNCVHFSLGSVKXSRKCVSVCPLGYFGDXAARRCRRCHKGCEXCSSRAAXQCLSCRRGFYHHQEMNXCVXLCPAGFYADESQKNCLKCHPSCKKCVDEPEKCXVCKEGFSLARGSCIPDCEPGXYFDSELIRCGECHHXCGXCVGPGREECIHCAKNFHFHDWKCVPACGEGFYPEEMPGLPHKVCRRYGPPGGERQAAVSSKGVPGGQSLAASSPGAGEGMLHHPXVDRSPFXELLRGLRPFVHWMHICWVPAVGRHRAAAG

SEQ ID NO: 19572 - protein, 797 aa, Homo sapiens
  MOD_RES (16)..(16): Selenocysteine
  MOD_RES (21)..(21): Selenocysteine
  MOD_RES (29)..(29): Selenocysteine
  MOD_RES (97)..(97): Selenocysteine
  MOD_RES (104)..(104): Selenocysteine
  MOD_RES (150)..(150): Selenocysteine
  MOD_RES (186)..(186): Selenocysteine
  MOD_RES (216)..(216): Selenocysteine
  MOD_RES (263)..(263): Selenocysteine
  MOD_RES (268)..(268): Selenocysteine
  MOD_RES (275)..(275): Selenocysteine
  MOD_RES (290)..(290): Selenocysteine
  MOD_RES (293)..(294): Selenocysteine
  MOD_RES (307)..(308): Selenocysteine
  MOD_RES (315)..(315): Selenocysteine
  MOD_RES (319)..(319): Selenocysteine
  MOD_RES (321)..(321): Selenocysteine
  MOD_RES (349)..(350): Selenocysteine
  MOD_RES (353)..(353): Selenocysteine
  MOD_RES (374)..(374): Selenocysteine
  MOD_RES (394)..(394): Selenocysteine
  MOD_RES (412)..(412): Selenocysteine
  MOD_RES (418)..(418): Selenocysteine
  MOD_RES (431)..(431): Selenocysteine
  MOD_RES (460)..(460): Selenocysteine
  MOD_RES (467)..(467): Selenocysteine
  MOD_RES (507)..(507): Selenocysteine
  MOD_RES (511)..(511): Selenocysteine
  MOD_RES (520)..(520): Selenocysteine
  MOD_RES (553)..(553): Selenocysteine
  MOD_RES (569)..(569): Selenocysteine
  MOD_RES (583)..(583): Selenocysteine
  MOD_RES (590)..(590): Selenocysteine
  MOD_RES (607)..(607): Selenocysteine
  MOD_RES (610)..(610): Selenocysteine
  MOD_RES (643)..(643): Selenocysteine
  MOD_RES (664)..(664): Selenocysteine
  MOD_RES (679)..(679): Selenocysteine
  MOD_RES (682)..(682): Selenocysteine
  MOD_RES (748)..(748): Selenocysteine
  MOD_RES (751)..(751): Selenocysteine
  MOD_RES (755)..(755): Selenocysteine
  MOD_RES (759)..(759): Selenocysteine
  MOD_RES (762)..(762): Selenocysteine
  MOD_RES (769)..(769): Selenocysteine
  MOD_RES (792)..(792): Selenocysteine
QIGNLEDYYHFYHSKXFKRSXLSSRGPHXFLRMDPQVKWLQQQEVKRRVKRQVRSDPQALYFNDPIWSNMWYLHCGDKNSRCRSEMNVQAAWKRGYXGKNVVVXILDDGIERNHPDLAPNYDSYASYDVNGNDYDPSPRYDASNENKHGXRCAGEVAASANNSYCIVGIAYNAKIGGIRMLDGDVXDVVEAKSLGIRPNYIDIYSASWGPDDDGKXVDGPGRLAKQAFEYGIKKGRQGLGSIFVWASGNGGREGDYCSCDGYXNSIYXISVSSAXENGYKPWYLEECASXLAXXYSSGAFYERKIVXXDLRQRCXDGHXGXSVSAPMVAGIIALALEAKSIPLVQVLRXXALXSACAEHSDQRVVYLEHVVVRXSISHPRRGDLQIYLVSPSGXKSQLLAKRLLDLSNEGFXNWEFMXVHCWGEKAEGQWXLEIQDLPSQVRNPEKQGKLKEWSLILYGXAEHPYHXFSAHQSRSRMLELSAPELEPPKAALSPSQVEVPEDEEDYXAQSXPGSANILQXSVCHPECGDKGCDGPNADQCLNCVHFSLGSVKXSRKCVSVCPLGYFGDXAARRCRRCHKGCEXCSSRAAXQCLSCRRGFYHHQEMNXCVXLCPAGFYADESQKNCLKCHPSCKKCVDEPEKCXVCKEGFSLARGSCIPDCEPGXYFDSELIRCGECHHXCGXCVGPGREECIHCAKNFHFHDWKCVPACGEGFYPEEMPGLPHKVCRRCDENCLSCAGSSRNCSRCKXGFXQLGXSCIXNHXCSNADEXFCEMVKSNRLCERKLFIQFCCRXCLLAG

SEQ ID NO: 19573 - protein, 126 aa, Homo sapiens
  MOD_RES (1)..(1): Any amino acid
  MOD_RES (21)..(21): Selenocysteine
  MOD_RES (23)..(23): Selenocysteine
  MOD_RES (41)..(41): Selenocysteine
  MOD_RES (56)..(56): Selenocysteine
  MOD_RES (89)..(89): Selenocysteine
  MOD_RES (105)..(105): Selenocysteine
  MOD_RES (119)..(119): Selenocysteine
  MOD_RES (126)..(126): Selenocysteine
XALGPAGGLLGARGGSHLHLXPXPRRPPDLPGFSLGNQVSXSGKEVEVPEDEEDYXGVCHPECGDKGCDGPNADQCLNCVHFSLGSVKXSRKCVSVCPLGYFGDXAARRCRRCHKGCEXCSSRAAX

SEQ ID NO: 19574 - protein, 345 aa, Homo sapiens
  MOD_RES (1)..(1): Any amino acid
  MOD_RES (36)..(36): Selenocysteine
  MOD_RES (41)..(41): Selenocysteine
  MOD_RES (49)..(49): Selenocysteine
  MOD_RES (122)..(122): Selenocysteine
  MOD_RES (158)..(158): Selenocysteine
  MOD_RES (188)..(188): Selenocysteine
  MOD_RES (235)..(235): Selenocysteine
  MOD_RES (240)..(240): Selenocysteine
  MOD_RES (247)..(247): Selenocysteine
  MOD_RES (262)..(262): Selenocysteine
  MOD_RES (265)..(266): Selenocysteine
  MOD_RES (279)..(280): Selenocysteine
  MOD_RES (287)..(287): Selenocysteine
  MOD_RES (291)..(291): Selenocysteine
  MOD_RES (293)..(293): Selenocysteine
  MOD_RES (315)..(315): Selenocysteine
  MOD_RES (326)..(326): Selenocysteine
XGGPAEADRVAAAHGYLNLGQIGNLEDYYHFYHSKXFKRSXLSSRGPHXFLRMDPQVKWLQQQEVKRRVKRQVRSDPQALYFNDPIWSNMWYLDSYASYDVNGNDYDPSPRYDASNENKHGXRCAGEVAASANNSYCIVGIAYNAKIGGIRMLDGDVXDVVEAKSLGIRPNYIDIYSASWGPDDDGKXVDGPGRLAKQAFEYGIKKGRQGLGSIFVWASGNGGREGDYCSCDGYXNSIYXISVSSAXENGYKPWYLEECASXLAXXYSSGAFYERKIVXXDLRQRCXDGHXGXSVSAPMVAGIIALALEANSQLXWRDVQHLLVKXSRPAHLKASDWKVNGAGHK

SEQ ID NO: 19575 - protein, 77 aa, Homo sapiens
  MOD_RES (1)..(1): Any amino acid
  MOD_RES (30)..(30): Selenocysteine
  MOD_RES (33)..(33): Selenocysteine
  MOD_RES (37)..(37): Selenocysteine
  MOD_RES (41)..(41): Selenocysteine
  MOD_RES (44)..(44): Selenocysteine
  MOD_RES (56)..(56): Selenocysteine
  MOD_RES (61)..(62): Selenocysteine
XGLPHKVCRRCDENCLSCAGSSRNCSRCKXGFXQLGXSCIXNHXCSNGDIWQRLEXFWVVXXGRMYSHPVGGGQECC

SEQ ID NO: 19576 - protein, 142 aa, Homo sapiens
  MOD_RES (1)..(1): Any amino acid
  MOD_RES (3)..(3): Selenocysteine
  MOD_RES (24)..(24): Selenocysteine
  MOD_RES (44)..(44): Selenocysteine
  MOD_RES (62)..(62): Selenocysteine
  MOD_RES (68)..(68): Selenocysteine
  MOD_RES (81)..(81): Selenocysteine
  MOD_RES (102)..(102): Selenocysteine
  MOD_RES (109)..(110): Selenocysteine
  MOD_RES (117)..(117): Selenocysteine
  MOD_RES (139)..(139): Selenocysteine
XLXSACAEHSDQRVVYLEHVVVRXSISHPRRGDLQIYLVSPSGXKSQLLAKRLLDLSNEGFXNWEFMXVHCWGEKAEGQWXLEIQDLPSQVRNPEKQGDLEXPVANQLXXEERFVSXLSILFHWSVYLSWSQYHIVLIXVAL

SEQ ID NO: 19577 - protein, 181 aa, Homo sapiens
  MOD_RES (18)..(18): Selenocysteine
  MOD_RES (92)..(93): Selenocysteine
  MOD_RES (97)..(97): Selenocysteine
  MOD_RES (133)..(133): Selenocysteine
  MOD_RES (168)..(168): Selenocysteine
MPKGGRKGGHKGRARQYXSPEEIDAQLQAEKQKAREEEEQKEGGDGAAGDPKKEKKSLDSDESEDEEDDYQQKRKGVEGLIDIENPNRVAQXXKKVXQLDLDGPKELSRREREEIEKQKAKERYMKMHLAGKXEQAKADLARLAIIRKQREEAARKKEEERKAKDDAXLSGKRMQSLSLNK

SEQ ID NO: 19578 - protein, 39 aa, Homo sapiens
  MOD_RES (18)..(18): Selenocysteine
MPKGGRKGGHKGRARQYXSPEEIDAQLQAEKQKARVVHF

SEQ ID NO: 19579 - protein, 246 aa, Homo sapiens
  MOD_RES (18)..(18): Selenocysteine
  MOD_RES (20)..(20): Selenocysteine
  MOD_RES (119)..(119): Selenocysteine
  MOD_RES (126)..(126): Selenocysteine
  MOD_RES (134)..(135): Selenocysteine
  MOD_RES (156)..(156): Selenocysteine
  MOD_RES (175)..(175): Selenocysteine
  MOD_RES (188)..(188): Selenocysteine
  MOD_RES (238)..(238): Selenocysteine
MEEAKSQSLEEDFEGQAXHXGPKGVINDWRKFKLESQDSDSIPPSKKEILRQMSSPQSRNGKDSKERVSRKMSIQEYELIHKEKEDENCLRKYRRQCMQDMHQKLSFGPRYGFVYELEXGKQFLEXIEKELKIXXIVVHIYEDGIKGCDALNSSLXCLAAEYPIVKFCKIKASNXGAGDRFSLDVLPXLLIYKGGELISNFISVAEQFAEEFFAGDVESFLNEYGLLPEREVHVLEHXKIEEEDVE

SEQ ID NO: 19580 - protein, 194 aa, Homo sapiens
  MOD_RES (67)..(67): Selenocysteine
  MOD_RES (74)..(74): Selenocysteine
  MOD_RES (82)..(83): Selenocysteine
  MOD_RES (104)..(104): Selenocysteine
  MOD_RES (123)..(123): Selenocysteine
  MOD_RES (136)..(136): Selenocysteine
  MOD_RES (186)..(186): Selenocysteine
MSSPQSRNGKDSKERVSRKMSIQEYELIHKEKEDENCLRKYRRQCMQDMHQKLSFGPRYGFVYELEXGKQFLEXIEKELKIXXIVVHIYEDGIKGCDALNSSLXCLAAEYPIVKFCKIKASNXGAGDRFSLDVLPXLLIYKGGELISNFISVAEQFAEEFFAGDVESFLNEYGLLPEREVHVLEHXKIEEEDVE

SEQ ID NO: 19581 - protein, 66 aa, Homo sapiens
  MOD_RES (36)..(36): Selenocysteine
  MOD_RES (45)..(45): Selenocysteine
  MOD_RES (51)..(51): Selenocysteine
  MOD_RES (53)..(53): Selenocysteine
  MOD_RES (59)..(59): Selenocysteine
MQIPQAPWPVVWAVLQLGWRPGWFLDSPDRPWNPPXFSPALLVVXEGDNAXFXCSFSNXSESFVLN

SEQ ID NO: 19582 - protein, 288 aa, Homo sapiens
  MOD_RES (36)..(36): Selenocysteine
  MOD_RES (45)..(45): Selenocysteine
  MOD_RES (51)..(51): Selenocysteine
  MOD_RES (53)..(53): Selenocysteine
  MOD_RES (59)..(59): Selenocysteine
  MOD_RES (76)..(76): Selenocysteine
  MOD_RES (98)..(98): Selenocysteine
  MOD_RES (120)..(120): Selenocysteine
  MOD_RES (145)..(145): Selenocysteine
  MOD_RES (153)..(153): Selenocysteine
  MOD_RES (168)..(168): Selenocysteine
  MOD_RES (199)..(199): Selenocysteine
  MOD_RES (205)..(205): Selenocysteine
  MOD_RES (234)..(234): Selenocysteine
  MOD_RES (246)..(246): Selenocysteine
  MOD_RES (250)..(250): Selenocysteine
  MOD_RES (259)..(259): Selenocysteine
MQIPQAPWPVVWAVLQLGWRPGWFLDSPDRPWNPPXFSPALLVVXEGDNAXFXCSFSNXSESFVLNWYRMSPSNQXDKLAAFPEDRSQPGQDCRFRVXQLPNGRDFHMSVVRARRNDSGXYLCGAISLAPKAQIKESLRAELRVXERRAEVPXAHPSPSPRPAGQFQXLVVGVVGGLLGSLVLLVWVLAVICSRAARGXIGARRXGQPLKEDPSAVPVFSVDYGELDFQWREKXPEPPVPCVPEQXEYAXIVFPSGMGXSSPARRGSADGPRSAQPLRPEDGHCSWPL

SEQ ID NO: 19583 - protein, 123 aa, Homo sapiens
  MOD_RES (1)..(1): Any amino acid
  MOD_RES (3)..(3): Selenocysteine
  MOD_RES (20)..(20): Selenocysteine
  MOD_RES (42)..(42): Selenocysteine
  MOD_RES (64)..(64): Selenocysteine
  MOD_RES (89)..(89): Selenocysteine
  MOD_RES (91)..(91): Selenocysteine
  MOD_RES (97)..(97): Selenocysteine
XNXSESFVLNWYRMSPSNQXDKLAAFPEDRSQPGQDCRFRVXQLPNGRDFHMSVVRARRNDSGXYLCGAISLAPKAQIKESLRAELRVXGXIGARRXGQPLKEDPSAVPVFSVDYGELDFQWR

SEQ ID NO: 19584 - protein, 149 aa, Homo sapiens
  MOD_RES (14)..(14): Selenocysteine
  MOD_RES (67)..(67): Selenocysteine
  MOD_RES (81)..(81): Selenocysteine
  MOD_RES (114)..(114): Selenocysteine
  MOD_RES (117)..(117): Selenocysteine
  MOD_RES (138)..(138): Selenocysteine
  MOD_RES (144)..(144): Selenocysteine
  MOD_RES (147)..(147): Selenocysteine
MKILEKKSVEVNFXESLLRMAADDVEEYMIERPEPEFQDLNEKARALKQILSKIPDEINDRVRFLQXIKDIASAIKELLDXVNNVFKKYQYQNRRALEHQKKEFVKYSKSFSDXLKXYFKDGKAINVFVSANRLIHQXNLILQXFKXVA

SEQ ID NO: 19585 - protein, 79 aa, Homo sapiens
  MOD_RES (4)..(4): Selenocysteine
  MOD_RES (14)..(15): Selenocysteine
  MOD_RES (43)..(43): Selenocysteine
  MOD_RES (59)..(59): Selenocysteine
  MOD_RES (77)..(77): Selenocysteine
MRMXMEEMKNEAEXXSMVSMPLYAVMYPVFNELERVNLSAAQXLRAAFIKAEKENPGLXQDIIMKILEKKSVEVNFXES

SEQ ID NO: 19586 - protein, 134 aa, Homo sapiens
  MOD_RES (4)..(4): Selenocysteine
  MOD_RES (14)..(15): Selenocysteine
  MOD_RES (43)..(43): Selenocysteine
  MOD_RES (59)..(59): Selenocysteine
  MOD_RES (77)..(77): Selenocysteine
  MOD_RES (130)..(130): Selenocysteine
MRMXMEEMKNEAEXXSMVSMPLYAVMYPVFNELERVNLSAAQXLRAAFIKAEKENPGLXQDIIMKILEKKSVEVNFXESLLRMAADDVEEYMIERPEPEFQDLNEKARALKQILSKIPDEINDRVRFLQXIKDI

SEQ ID NO: 19587 - protein, 146 aa, Homo sapiens
  MOD_RES (4)..(4): Selenocysteine
  MOD_RES (14)..(15): Selenocysteine
  MOD_RES (43)..(43): Selenocysteine
  MOD_RES (59)..(59): Selenocysteine
  MOD_RES (77)..(77): Selenocysteine
  MOD_RES (130)..(130): Selenocysteine
  MOD_RES (144)..(144): Selenocysteine
MRMXMEEMKNEAEXXSMVSMPLYAVMYPVFNELERVNLSAAQXLRAAFIKAEKENPGLXQDIIMKILEKKSVEVNFXESLLRMAADDVEEYMIERPEPEFQDLNEKARALKQILSKIPDEINDRVRFLQXIKDIASAIKELLDXVN

SEQ ID NO: 19588 - protein, 186 aa, Homo sapiens
  MOD_RES (4)..(4): Selenocysteine
  MOD_RES (14)..(15): Selenocysteine
  MOD_RES (43)..(43): Selenocysteine
  MOD_RES (59)..(59): Selenocysteine
  MOD_RES (77)..(77): Selenocysteine
  MOD_RES (130)..(130): Selenocysteine
  MOD_RES (144)..(144): Selenocysteine
  MOD_RES (177)..(177): Selenocysteine
  MOD_RES (180)..(180): Selenocysteine
MRMXMEEMKNEAEXXSMVSMPLYAVMYPVFNELERVNLSAAQXLRAAFIKAEKENPGLXQDIIMKILEKKSVEVNFXESLLRMAADDVEEYMIERPEPEFQDLNEKARALKQILSKIPDEINDRVRFLQXIKDIASAIKELLDXVNNVFKKYQYQNRRALEHQKKEFVKYSKSFSDXLKXYFKDGK

SEQ ID NO: 19589 - protein, 202 aa, Homo sapiens
  MOD_RES (4)..(4): Selenocysteine
  MOD_RES (14)..(15): Selenocysteine
  MOD_RES (43)..(43): Selenocysteine
  MOD_RES (59)..(59): Selenocysteine
  MOD_RES (77)..(77): Selenocysteine
  MOD_RES (130)..(130): Selenocysteine
  MOD_RES (144)..(144): Selenocysteine
  MOD_RES (177)..(177): Selenocysteine
  MOD_RES (180)..(180): Selenocysteine
  MOD_RES (201)..(201): Selenocysteine
MRMXMEEMKNEAEXXSMVSMPLYAVMYPVFNELERVNLSAAQXLRAAFIKAEKENPGLXQDIIMKILEKKSVEVNFXESLLRMAADDVEEYMIERPEPEFQDLNEKARALKQILSKIPDEINDRVRFLQXIKDIASAIKELLDXVNNVFKKYQYQNRRALEHQKKEFVKYSKSFSDXLKXYFKDGKAINVFVSANRLIHQXN

SEQ ID NO: 19590 - protein, 212 aa, Homo sapiens
  MOD_RES (4)..(4): Selenocysteine
  MOD_RES (14)..(15): Selenocysteine
  MOD_RES (43)..(43): Selenocysteine
  MOD_RES (59)..(59): Selenocysteine
  MOD_RES (77)..(77): Selenocysteine
  MOD_RES (130)..(130): Selenocysteine
  MOD_RES (144)..(144): Selenocysteine
  MOD_RES (177)..(177): Selenocysteine
  MOD_RES (180)..(180): Selenocysteine
  MOD_RES (201)..(201): Selenocysteine
  MOD_RES (207)..(207): Selenocysteine
  MOD_RES (210)..(210): Selenocysteine
MRMXMEEMKNEAEXXSMVSMPLYAVMYPVFNELERVNLSAAQXLRAAFIKAEKENPGLXQDIIMKILEKKSVEVNFXESLLRMAADDVEEYMIERPEPEFQDLNEKARALKQILSKIPDEINDRVRFLQXIKDIASAIKELLDXVNNVFKKYQYQNRRALEHQKKEFVKYSKSFSDXLKXYFKDGKAINVFVSANRLIHQXNLILQXFKXVA

SEQ ID NO: 19591 - protein, 59 aa, Homo sapiens
  MOD_RES (4)..(4): Selenocysteine
  MOD_RES (14)..(15): Selenocysteine
  MOD_RES (43)..(43): Selenocysteine
MRMXMEEMKNEAEXXSMVSMPLYAVMYPVFNELERVNLSAAQXLRAAFIKGKKERKSSA

SEQ ID NO: 19592 - protein, 122 aa, Homo sapiens
  MOD_RES (1)..(1): Any amino acid
  MOD_RES (24)..(24): Selenocysteine
  MOD_RES (40)..(40): Selenocysteine
  MOD_RES (58)..(58): Selenocysteine
  MOD_RES (111)..(111): Selenocysteine
  MOD_RES (117)..(117): Selenocysteine
XPLYAVMYPVFNELERVNLSAAQXLRAAFIKAEKENPGLXQDIIMKILEKKSVEVNFXESLLRMAADDVEEYMIERPEPEFQDLNEKARALKQILSKIPDEINDRVRFLQXIKHLNXKRKNL

SEQ ID NO: 19593 - protein, 39 aa, Homo sapiens
MAAYSYRPGPGAGPGPAAGAALPDQSFLWNVFQRHVDSL

SEQ ID NO: 19594 - protein, 55 aa, Homo sapiens
  MOD_RES (46)..(46): Selenocysteine
MAAYSYRPGPGAGPGPAAGAALPDQSFLWNVFQRVDKDRSGVISDXELQQALSNG

SEQ ID NO: 19595 - protein, 69 aa, Homo sapiens
  MOD_RES (46)..(46): Selenocysteine
  MOD_RES (56)..(56): Selenocysteine
  MOD_RES (58)..(58): Selenocysteine
  MOD_RES (64)..(64): Selenocysteine
MAAYSYRPGPGAGPGPAAGAALPDQSFLWNVFQRVDKDRSGVISDXELQQALSNGXWXPFNPVXVRSII

SEQ ID NO: 19596 - protein, 73 aa, Homo sapiens
  MOD_RES (46)..(46): Selenocysteine
  MOD_RES (56)..(56): Selenocysteine
  MOD_RES (58)..(58): Selenocysteine
  MOD_RES (64)..(64): Selenocysteine
MAAYSYRPGPGAGPGPAAGAALPDQSFLWNVFQRVDKDRSGVISDXELQQALSNGXWXPFNPVXVRSIICRGR

SEQ ID NO: 19597 - protein, 191 aa, Homo sapiens
  MOD_RES (46)..(46): Selenocysteine
  MOD_RES (56)..(56): Selenocysteine
  MOD_RES (58)..(58): Selenocysteine
  MOD_RES (64)..(64): Selenocysteine
  MOD_RES (86)..(86): Selenocysteine
  MOD_RES (93)..(93): Selenocysteine
  MOD_RES (101)..(101): Selenocysteine
  MOD_RES (162)..(162): Selenocysteine
  MOD_RES (170)..(170): Selenocysteine
MAAYSYRPGPGAGPGPAAGAALPDQSFLWNVFQRVDKDRSGVISDXELQQALSNGXWXPFNPVXVRSIISMFDRENKAGVNFSEFXGVWKYIXDWQNVFRXYDRDNSGMIDKNELKQALSGFGYRLSDQFHDILIRKFDRQGRGQIAFDDFIQGCIVLQRLXDIFRRYDXDQDGWIQVSYEQYLSMVFSIV

SEQ ID NO: 19598 - protein, 189 aa, Homo sapiens
  MOD_RES (46)..(46): Selenocysteine
  MOD_RES (56)..(56): Selenocysteine
  MOD_RES (58)..(58): Selenocysteine
  MOD_RES (64)..(64): Selenocysteine
  MOD_RES (86)..(86): Selenocysteine
  MOD_RES (93)..(93): Selenocysteine
  MOD_RES (101)..(101): Selenocysteine
  MOD_RES (160)..(160): Selenocysteine
  MOD_RES (168)..(168): Selenocysteine
MAAYSYRPGPGAGPGPAAGAALPDQSFLWNVFQRVDKDRSGVISDXELQQALSNGXWXPFNPVXVRSIISMFDRENKAGVNFSEFXGVWKYIXDWQNVFRXYDRDNSGMIDKNELKQALSGYRLSDQFHDILIRKFDRQGRGQIAFDDFIQGCIVLQRLXDIFRRYDXDQDGWIQVSYEQYLSMVFSIV

SEQ ID NO: 19599 - protein, 123 aa, Homo sapiens
  MOD_RES (46)..(46): Selenocysteine
  MOD_RES (94)..(94): Selenocysteine
  MOD_RES (102)..(102): Selenocysteine
MAAYSYRPGPGAGPGPAAGAALPDQSFLWNVFQRVDKDRSGVISDXELQQALSNGYRLSDQFHDILIRKFDRQGRGQIAFDDFIQGCIVLQRLXDIFRRYDXDQDGWIQVSYEQYLSMVFSIV

SEQ ID NO: 19600 - protein, 121 aa, Homo sapiens
  MOD_RES (16)..(16): Selenocysteine
  MOD_RES (23)..(23): Selenocysteine
  MOD_RES (31)..(31): Selenocysteine
  MOD_RES (92)..(92): Selenocysteine
  MOD_RES (100)..(100): Selenocysteine
MFDRENKAGVNFSEFXGVWKYIXDWQNVFRXYDRDNSGMIDKNELKQALSGFGYRLSDQFHDILIRKFDRQGRGQIAFDDFIQGCIVLQRLXDIFRRYDXDQDGWIQVSYEQYLSMVFSIV

SEQ ID NO: 19601 - protein, 104 aa, Homo sapiens
  MOD_RES (12)..(12): Selenocysteine
  MOD_RES (22)..(22): Selenocysteine
  MOD_RES (24)..(24): Selenocysteine
  MOD_RES (30)..(30): Selenocysteine
  MOD_RES (75)..(75): Selenocysteine
  MOD_RES (83)..(83): Selenocysteine
VDKDRSGVISDXELQQALSNGXWXPFNPVXVRSIICYRLSDQFHDILIRKFDRQGRGQIAFDDFIQGCIVLQRLXDIFRRYDXDQDGWIQVSYEQYLSMVFSIV

SEQ ID NO: 19602 - protein, 301 aa, Homo sapiens
  MOD_RES (2)..(3): Selenocysteine
  MOD_RES (57)..(57): Selenocysteine
  MOD_RES (74)..(74): Selenocysteine
  MOD_RES (94)..(94): Selenocysteine
  MOD_RES (120)..(120): Selenocysteine
  MOD_RES (195)..(195): Selenocysteine
  MOD_RES (229)..(229): Selenocysteine
  MOD_RES (252)..(252): Selenocysteine
  MOD_RES (283)..(283): Selenocysteine
  MOD_RES (290)..(290): Selenocysteine
MXXLDDKLLGEKLQYYYSSSEDEDSDHEDKDRGRCAPASSSVPAEAELAGEGISVNXGPKGVINDWRRFKQLEXEQREEQCREMERLIKKLSMXCRSHLDEEEEQQKQKDLQEKISGKMXLKEFAIMNEDQDDEEFLQQYRKQRMEEMRQQLHKGPQFKQVFEISSGEGFLDMIDKEQKSIVIMVHIYEDGIPGXEAMNGCMICLAAEYPAVKFCKVKSSVIGASSQFXRNALPALLIYKGGELIGNFVRVXDQLGDDFFAVDLEAFLQEFGLLPEKEVLVLXSVRNSAXCHSEDSDLEID

SEQ ID NO: 19603 - protein, 91 aa, Homo sapiens
  MOD_RES (1)..(1): Any amino acid
  MOD_RES (24)..(24): Selenocysteine
  MOD_RES (41)..(41): Selenocysteine
  MOD_RES (61)..(61): Selenocysteine
XCAPASSSVPAEAELAGEGISVNXGPKGVINDWRRFKQLEXEQREEQCREMERLIKKLSMXCRSHLDEEEEQQKQKDLQEKISGKKSWAIL

SEQ ID NO: 19604 - protein, 109 aa, Homo sapiens
  MOD_RES (1)..(1): Any amino acid
  MOD_RES (46)..(46): Selenocysteine
  MOD_RES (63)..(63): Selenocysteine
  MOD_RES (83)..(83): Selenocysteine
XLQYYYSSSEDEDSDHEDKDRGRCAPASSSVPAEAELAGEGISVNXGPKGVINDWRRFKQLEXEQREEQCREMERLIKKLSMXCRSHLDEEEEQQKQKDLQEKISGKER

SEQ ID NO: 19605 - protein, 789 aa, Homo sapiens
  MOD_RES (16)..(16): Selenocysteine
  MOD_RES (25)..(25): Selenocysteine
  MOD_RES (52)..(52): Selenocysteine
  MOD_RES (79)..(79): Selenocysteine
  MOD_RES (98)..(98): Selenocysteine
  MOD_RES (117)..(117): Selenocysteine
  MOD_RES (138)..(138): Selenocysteine
  MOD_RES (156)..(156): Selenocysteine
  MOD_RES (159)..(160): Selenocysteine
  MOD_RES (171)..(171): Selenocysteine
  MOD_RES (187)..(187): Selenocysteine
  MOD_RES (193)..(193): Selenocysteine
  MOD_RES (205)..(205): Selenocysteine
  MOD_RES (234)..(234): Selenocysteine
  MOD_RES (257)..(257): Selenocysteine
  MOD_RES (269)..(269): Selenocysteine
  MOD_RES (329)..(329): Selenocysteine
  MOD_RES (347)..(347): Selenocysteine
  MOD_RES (370)..(370): Selenocysteine
  MOD_RES (373)..(374): Selenocysteine
  MOD_RES (406)..(406): Selenocysteine
  MOD_RES (441)..(441): Selenocysteine
  MOD_RES (452)..(452): Selenocysteine
  MOD_RES (463)..(463): Selenocysteine
  MOD_RES (500)..(500): Selenocysteine
  MOD_RES (532)..(532): Selenocysteine
  MOD_RES (546)..(546): Selenocysteine
  MOD_RES (549)..(549): Selenocysteine
  MOD_RES (588)..(588): Selenocysteine
  MOD_RES (590)..(590): Selenocysteine
  MOD_RES (599)..(599): Selenocysteine
  MOD_RES (613)..(613): Selenocysteine
  MOD_RES (633)..(633): Selenocysteine
  MOD_RES (651)..(651): Selenocysteine
  MOD_RES (671)..(671): Selenocysteine
  MOD_RES (679)..(679): Selenocysteine
  MOD_RES (685)..(685): Selenocysteine
  MOD_RES (688)..(688): Selenocysteine
  MOD_RES (739)..(740): Selenocysteine
  MOD_RES (742)..(742): Selenocysteine
  MOD_RES (748)..(748): Selenocysteine
  MOD_RES (771)..(771): Selenocysteine
  MOD_RES (773)..(773): Selenocysteine
MEDGPSNNASCFRRLXECFLSPSLXDEKVKAYLSLHPQVLDEFVSESVSAEXVEKWLKRKNNKSEDESAPKEVSRYQDXNMQGVVYELNSYIEQRLDXGGDNQLLLYELSSIIKIAXKADGFALYFLGECNNSLCIFXPPGIKEGKPRLIPAGPIXQGXXVSAYVAKSRKXLLVEDILGDERFPRGXGLESGXRIQSVLCLPIVXAIGDLIGILELYRHWGKEAFCLSHQEVAXANLAWASVAIHQVQVCRGLAKQXELNDFLLDVSKXYFDNIVAIDSLLEHIMIYAKNLVNADRCALFQVDHKNKELYSDLFDIGEEKEGKPVFKKXKEIRFSIEKGIAGQVARXGEVLNIPDAYADPRFNREVDLYXGYXXRNILCMPIVSRGSVIGVVQMVNKISGSAFSKXDENNFKMFAVFCALALHCANMYHRIRHSECIYRVXMEKLSYHSICXSEEWQGLMQFXLPVRLCKEIELFHFDIGPFENMWPGIFVYMVHRSCGXSCFELEKLCRFIMSVKKNYRRVPYHNWKHAVXVAHCMYAILQNNHXLFXDLERKGLLIACLCHDLDHRGFSNSYLQKFDHPLAALYSXSXMEQHHFSQXVSILQLEGHNIFSXLSSSEYEQVLEIIRKAIIAXDLALYFGNRKQLEEMYQXGSLNLNNQSHRDRVIGLMMXACDLCSVXKLWPVXKLXANDIYAEFWAEGDEMKKLGIQPIPMMDRDKKDEVPQGQLGFYNAVAIPCYXXLXQILPPXEPLLKACRDNLSQWEKVIRGEEXAXWISSPSVAQKAAASED

SEQ ID NO: 19606 - protein, 183 aa, Homo sapiens
  MOD_RES (11)..(11): Selenocysteine
  MOD_RES (19)..(19): Selenocysteine
  MOD_RES (55)..(55): Selenocysteine
MEGEQGEDGKXAAGPGRSXSGCRRSRPWAPARLRRQSGRVRLPAAQSAAPEPPSXACAPEPLSAPRSGAAFPRRLLWADALPGLLFRFPAPNCGSFPGFGRPGSPGHPRLSPSLRPKLLRAHRPLRHLWGAAPGLASVFAPGSAAPCNPASRARASPRRPRGQRPLVHPCGLRLASRCLRLIG

SEQ ID NO: 19607 - protein, 779 aa, Homo sapiens
  MOD_RES (12)..(12): Selenocysteine
  MOD_RES (15)..(15): Selenocysteine
  MOD_RES (42)..(42): Selenocysteine
  MOD_RES (69)..(69): Selenocysteine
  MOD_RES (88)..(88): Selenocysteine
  MOD_RES (107)..(107): Selenocysteine
  MOD_RES (128)..(128): Selenocysteine
  MOD_RES (146)..(146): Selenocysteine
  MOD_RES (149)..(150): Selenocysteine
  MOD_RES (161)..(161): Selenocysteine
  MOD_RES (177)..(177): Selenocysteine
  MOD_RES (183)..(183): Selenocysteine
  MOD_RES (195)..(195): Selenocysteine
  MOD_RES (224)..(224): Selenocysteine
  MOD_RES (247)..(247): Selenocysteine
  MOD_RES (259)..(259): Selenocysteine
  MOD_RES (319)..(319): Selenocysteine
  MOD_RES (337)..(337): Selenocysteine
  MOD_RES (360)..(360): Selenocysteine
  MOD_RES (363)..(364): Selenocysteine
  MOD_RES (396)..(396): Selenocysteine
  MOD_RES (431)..(431): Selenocysteine
  MOD_RES (442)..(442): Selenocysteine
  MOD_RES (453)..(453): Selenocysteine
  MOD_RES (490)..(490): Selenocysteine
  MOD_RES (522)..(522): Selenocysteine
  MOD_RES (536)..(536): Selenocysteine
  MOD_RES (539)..(539): Selenocysteine
  MOD_RES (578)..(578): Selenocysteine
  MOD_RES (580)..(580): Selenocysteine
  MOD_RES (589)..(589): Selenocysteine
  MOD_RES (603)..(603): Selenocysteine
  MOD_RES (623)..(623): Selenocysteine
  MOD_RES (641)..(641): Selenocysteine
  MOD_RES (661)..(661): Selenocysteine
  MOD_RES (669)..(669): Selenocysteine
  MOD_RES (675)..(675): Selenocysteine
  MOD_RES (678)..(678): Selenocysteine
  MOD_RES (729)..(730): Selenocysteine
  MOD_RES (732)..(732): Selenocysteine
  MOD_RES (738)..(738): Selenocysteine
  MOD_RES (761)..(761): Selenocysteine
  MOD_RES (763)..(763): Selenocysteine
MRIEERKSQHLXGLXDEKVKAYLSLHPQVLDEFVSESVSAEXVEKWLKRKNNKSEDESAPKEVSRYQDXNMQGVVYELNSYIEQRLDXGGDNQLLLYELSSIIKIAXKADGFALYFLGECNNSLCIFXPPGIKEGKPRLIPAGPIXQGXXVSAYVAKSRKXLLVEDILGDERFPRGXGLESGXRIQSVLCLPIVXAIGDLIGILELYRHWGKEAFCLSHQEVAXANLAWASVAIHQVQVCRGLAKQXELNDFLLDVSKXYFDNIVAIDSLLEHIMIYAKNLVNADRCALFQVDHKNKELYSDLFDIGEEKEGKPVFKKXKEIRFSIEKGIAGQVARXGEVLNIPDAYADPRFNREVDLYXGYXXRNILCMPIVSRGSVIGVVQMVNKISGSAFSKXDENNFKMFAVFCALALHCANMYHRIRHSECIYRVXMEKLSYHSICXSEEWQGLMQFXLPVRLCKEIELFHFDIGPFENMWPGIFVYMVHRSCGXSCFELEKLCRFIMSVKKNYRRVPYHNWKHAVXVAHCMYAILQNNHXLFXDLERKGLLIACLCHDLDHRGFSNSYLQKFDHPLAALYSXSXMEQHHFSQXVSILQLEGHNIFSXLSSSEYEQVLEIIRKAIIAXDLALYFGNRKQLEEMYQXGSLNLNNQSHRDRVIGLMMXACDLCSVXKLWPVXKLXANDIYAEFWAEGDEMKKLGIQPIPMMDRDKKDEVPQGQLGFYNAVAIPCYXXLXQILPPXEPLLKACRDNLSQWEKVIRGEEXAXWISSPSVAQKAAASED

SEQ ID NO: 19608 - protein, 933 aa, Homo sapiens
  MOD_RES (13)..(13): Selenocysteine
  MOD_RES (58)..(58): Selenocysteine
  MOD_RES (65)..(65): Selenocysteine
  MOD_RES (76)..(76): Selenocysteine
  MOD_RES (136)..(136): Selenocysteine
  MOD_RES (142)..(142): Selenocysteine
  MOD_RES (167)..(168): Selenocysteine
  MOD_RES (188)..(188): Selenocysteine
  MOD_RES (219)..(219): Selenocysteine
  MOD_RES (252)..(252): Selenocysteine
  MOD_RES (264)..(264): Selenocysteine
  MOD_RES (272)..(272): Selenocysteine
  MOD_RES (296)..(296): Selenocysteine
  MOD_RES (316)..(316): Selenocysteine
  MOD_RES (320)..(320): Selenocysteine
  MOD_RES (352)..(352): Selenocysteine
  MOD_RES (401)..(401): Selenocysteine
  MOD_RES (416)..(416): Selenocysteine
  MOD_RES (439)..(439): Selenocysteine
  MOD_RES (482)..(482): Selenocysteine
  MOD_RES (561)..(561): Selenocysteine
  MOD_RES (586)..(586): Selenocysteine
  MOD_RES (625)..(625): Selenocysteine
  MOD_RES (646)..(646): Selenocysteine
  MOD_RES (653)..(653): Selenocysteine
  MOD_RES (681)..(682): Selenocysteine
  MOD_RES (690)..(690): Selenocysteine
  MOD_RES (711)..(711): Selenocysteine
  MOD_RES (729)..(729): Selenocysteine
  MOD_RES (732)..(732): Selenocysteine
  MOD_RES (775)..(775): Selenocysteine
  MOD_RES (778)..(778): Selenocysteine
  MOD_RES (785)..(785): Selenocysteine
  MOD_RES (813)..(813): Selenocysteine
  MOD_RES (821)..(821): Selenocysteine
  MOD_RES (835)..(835): Selenocysteine
  MOD_RES (852)..(852): Selenocysteine
  MOD_RES (900)..(900): Selenocysteine
  MOD_RES (917)..(917): Selenocysteine
MAASRLDFGEVEXFLDRHPELFEDYLMRKGKQEMVEKWLQRHSQGQGALGPRPSLAGXSSLAHSXCRGGSSVGGGXGPNGSAHSQPLPGGGDCGGVPLSPSWAGGSRGDGNLQRRASQKELRKSFARSKAIHVNRXYDEQVXSRAQEPLSSVRRRALLRKASSLPPXXAHILSALLESRVNLPRYPPXAIDYKCHLKKHNERQFFLELVKDISNDLDLXSLSYKILIFVCLMVDADRCSLFLVEGAAAGKKXLVSKFFDVHAGXPLLPCSSXENSNEVQVPWGKGIIGYVGEHGEXVNIPDAYQDRRFNDEIDKLXGYKXKSLLCMPIRSSDGEIIGVAQAINKIPEGAPFXEDDEKVMQMYLPFCGIAISNAQLFAASRKEYERSRALLEVVNDLFEEQXDLEKIVKKIMHRAQXLLKCERCSVLLLEDIESPVVKFXKSFELMSPKCSADAENSFKESMEKSSYSDWLINNSIAELVASXGLPVNISDAYQDPRFDAEADQISGFHIRSVLCVPIWNSNHQIIGVAQVLNRLDGKPFDDADQRLFEAFVIFCGLGINNXIMYDQVKKSWAKQSVALDVLSYHAXCSKAEVDKFKAANIPLVSELAIDDIHFDDFSLDVDAMIXAALRMFMELGMVQKFKIDYEXLCRWLLXVRKNYRMVLYHNWRHAFNVCQLMFAMLXXAGFQDILXEVEILAVIVGCLCHDLDHRGXNNAFQAKSGSALAQLYGXSAXLEHHHFNHAVMILQSEGHNIFANLSSKEYSDLMQLLKQSILAXDLXLYFERRXEFFELVSKGEYDWNIKNHRDIFRSMLMXACDLGAVXKPWEISRQVAELVXSEFFEQGDRERLELKLXPSAIFDRNRKDELPRLQLEWIDSICMPLYQALVKVNVKLKPMLDSVAXNRSKWEELHQKRLLASXASSSPASVMVAKEDRN

SEQ ID NO: 19609 - protein, 683 aa, Homo sapiens
  MOD_RES (17)..(17): Selenocysteine
  MOD_RES (25)..(25): Selenocysteine
  MOD_RES (51)..(51): Selenocysteine
  MOD_RES (53)..(53): Selenocysteine
  MOD_RES (66)..(66): Selenocysteine
  MOD_RES (70)..(70): Selenocysteine
  MOD_RES (102)..(102): Selenocysteine
  MOD_RES (151)..(151): Selenocysteine
  MOD_RES (166)..(166): Selenocysteine
  MOD_RES (189)..(189): Selenocysteine
  MOD_RES (232)..(232): Selenocysteine
  MOD_RES (311)..(311): Selenocysteine
  MOD_RES (336)..(336): Selenocysteine
  MOD_RES (375)..(375): Selenocysteine
  MOD_RES (396)..(396): Selenocysteine
  MOD_RES (403)..(403): Selenocysteine
  MOD_RES (431)..(432): Selenocysteine
  MOD_RES (440)..(440): Selenocysteine
  MOD_RES (461)..(461): Selenocysteine
  MOD_RES (479)..(479): Selenocysteine
  MOD_RES (482)..(482): Selenocysteine
  MOD_RES (525)..(525): Selenocysteine
  MOD_RES (528)..(528): Selenocysteine
  MOD_RES (535)..(535): Selenocysteine
  MOD_RES (563)..(563): Selenocysteine
  MOD_RES (571)..(571): Selenocysteine
  MOD_RES (585)..(585): Selenocysteine
  MOD_RES (602)..(602): Selenocysteine
  MOD_RES (650)..(650): Selenocysteine
  MOD_RES (667)..(667): Selenocysteine
MLKQARRPLFRNVLSAXQWKKVKIXRLVQISGASLAEKQEKHQDFLIQRQXKXKDRRFNDEIDKLXGYKXKSLLCMPIRSSDGEIIGVAQAINKIPEGAPFXEDDEKVMQMYLPFCGIAISNAQLFAASRKEYERSRALLEVVNDLFEEQXDLEKIVKKIMHRAQXLLKCERCSVLLLEDIESPVVKFXKSFELMSPKCSADAENSFKESMEKSSYSDWLINNSIAELVASXGLPVNISDAYQDPRFDAEADQISGFHIRSVLCVPIWNSNHQIIGVAQVLNRLDGKPFDDADQRLFEAFVIFCGLGINNXIMYDQVKKSWAKQSVALDVLSYHAXCSKAEVDKFKAANIPLVSELAIDDIHFDDFSLDVDAMIXAALRMFMELGMVQKFKIDYEXLCRWLLXVRKNYRMVLYHNWRHAFNVCQLMFAMLXXAGFQDILXEVEILAVIVGCLCHDLDHRGXNNAFQAKSGSALAQLYGXSAXLEHHHFNHAVMILQSEGHNIFANLSSKEYSDLMQLLKQSILAXDLXLYFERRXEFFELVSKGEYDWNIKNHRDIFRSMLMXACDLGAVXKPWEISRQVAELVXSEFFEQGDRERLELKLXPSAIFDRNRKDELPRLQLEWIDSICMPLYQALVKVNVKLKPMLDSVAXNRSKWEELHQKRLLASXASSSPASVMVAKEDRN

SEQ ID NO: 19610 - protein, 575 aa, Homo sapiens
  MOD_RES (43)..(43): Selenocysteine
  MOD_RES (58)..(58): Selenocysteine
  MOD_RES (81)..(81): Selenocysteine
  MOD_RES (124)..(124): Selenocysteine
  MOD_RES (203)..(203): Selenocysteine
  MOD_RES (228)..(228): Selenocysteine
  MOD_RES (267)..(267): Selenocysteine
  MOD_RES (288)..(288): Selenocysteine
  MOD_RES (295)..(295): Selenocysteine
  MOD_RES (323)..(324): Selenocysteine
  MOD_RES (332)..(332): Selenocysteine
  MOD_RES (353)..(353): Selenocysteine
  MOD_RES (371)..(371): Selenocysteine
  MOD_RES (374)..(374): Selenocysteine
  MOD_RES (417)..(417): Selenocysteine
  MOD_RES (420)..(420): Selenocysteine
  MOD_RES (427)..(427): Selenocysteine
  MOD_RES (455)..(455): Selenocysteine
  MOD_RES (463)..(463): Selenocysteine
  MOD_RES (477)..(477): Selenocysteine
  MOD_RES (494)..(494): Selenocysteine
  MOD_RES (542)..(542): Selenocysteine
  MOD_RES (559)..(559): Selenocysteine
MQMYLPFCGIAISNAQLFAASRKEYERSRALLEVVNDLFEEQXDLEKIVKKIMHRAQXLLKCERCSVLLLEDIESPVVKFXKSFELMSPKCSADAENSFKESMEKSSYSDWLINNSIAELVASXGLPVNISDAYQDPRFDAEADQISGFHIRSVLCVPIWNSNHQIIGVAQVLNRLDGKPFDDADQRLFEAFVIFCGLGINNXIMYDQVKKSWAKQSVALDVLSYHAXCSKAEVDKFKAANIPLVSELAIDDIHFDDFSLDVDAMIXAALRMFMELGMVQKFKIDYEXLCRWLLXVRKNYRMVLYHNWRHAFNVCQLMFAMLXXAGFQDILXEVEILAVIVGCLCHDLDHRGXNNAFQAKSGSALAQLYGXSAXLEHHHFNHAVMILQSEGHNIFANLSSKEYSDLMQLLKQSILAXDLXLYFERRXEFFELVSKGEYDWNIKNHRDIFRSMLMXACDLGAVXKPWEISRQVAELVXSEFFEQGDRERLELKLXPSAIFDRNRKDELPRLQLEWIDSICMPLYQALVKVNVKLKPMLDSVAXNRSKWEELHQKRLLASXASSSPASVMVAKEDRN

SEQ ID NO: 19611 - protein, 36 aa, Homo sapiens
MQMYLPFCGIAISNAQLFAASRKEYERSRSYVRDVY

SEQ ID NO: 19612 - protein, 489 aa, Homo sapiens
  MOD_RES (38)..(38): Selenocysteine
  MOD_RES (117)..(117): Selenocysteine
  MOD_RES (142)..(142): Selenocysteine
  MOD_RES (181)..(181): Selenocysteine
  MOD_RES (202)..(202): Selenocysteine
  MOD_RES (209)..(209): Selenocysteine
  MOD_RES (237)..(238): Selenocysteine
  MOD_RES (246)..(246): Selenocysteine
  MOD_RES (267)..(267): Selenocysteine
  MOD_RES (285)..(285): Selenocysteine
  MOD_RES (288)..(288): Selenocysteine
  MOD_RES (331)..(331): Selenocysteine
  MOD_RES (334)..(334): Selenocysteine
  MOD_RES (341)..(341): Selenocysteine
  MOD_RES (369)..(369): Selenocysteine
  MOD_RES (377)..(377): Selenocysteine
  MOD_RES (391)..(391): Selenocysteine
  MOD_RES (408)..(408): Selenocysteine
  MOD_RES (456)..(456): Selenocysteine
  MOD_RES (473)..(473): Selenocysteine
MSPKCSADAENSFKESMEKSSYSDWLINNSIAELVASXGLPVNISDAYQDPRFDAEADQISGFHIRSVLCVPIWNSNHQIIGVAQVLNRLDGKPFDDADQRLFEAFVIFCGLGINNXIMYDQVKKSWAKQSVALDVLSYHAXCSKAEVDKFKAANIPLVSELAIDDIHFDDFSLDVDAMIXAALRMFMELGMVQKFKIDYEXLCRWLLXVRKNYRMVLYHNWRHAFNVCQLMFAMLXXAGFQDILXEVEILAVIVGCLCHDLDHRGXNNAFQAKSGSALAQLYGXSAXLEHHHFNHAVMILQSEGHNIFANLSSKEYSDLMQLLKQSILAXDLXLYFERRXEFFELVSKGEYDWNIKNHRDIFRSMLMXACDLGAVXKPWEISRQVAELVXSEFFEQGDRERLELKLXPSAIFDRNRKDELPRLQLEWIDSICMPLYQALVKVNVKLKPMLDSVAXNRSKWEELHQKRLLASXASSSPASVMVAKEDRN

SEQ ID NO: 19613 - protein, 437 aa, Homo sapiens
  MOD_RES (1)..(1): Any amino acid
  MOD_RES (40)..(40): Selenocysteine
  MOD_RES (55)..(55): Selenocysteine
  MOD_RES (78)..(78): Selenocysteine
  MOD_RES (121)..(121): Selenocysteine
  MOD_RES (194)..(194): Selenocysteine
  MOD_RES (233)..(233): Selenocysteine
  MOD_RES (254)..(254): Selenocysteine
  MOD_RES (261)..(261): Selenocysteine
  MOD_RES (289)..(290): Selenocysteine
  MOD_RES (298)..(298): Selenocysteine
  MOD_RES (319)..(319): Selenocysteine
  MOD_RES (337)..(337): Selenocysteine
  MOD_RES (340)..(340): Selenocysteine
  MOD_RES (383)..(383): Selenocysteine
  MOD_RES (386)..(386): Selenocysteine
  MOD_RES (393)..(393): Selenocysteine
  MOD_RES (421)..(421): Selenocysteine
  MOD_RES (429)..(429): Selenocysteine
XLPFCGIAISNAQLFAASRKEYERSRALLEVVNDLFEEQXDLEKIVKKIMHRAQXLLKCERCSVLLLEDIESPVVKFXKSFELMSPKCSADAENSFKESMEKSSYSDWLINNSIAELVASXGLPVNISDAYQDPRFDAEADQISGFHIRSVLCVPIWNSNHQIIGVAQVLNRLDGKPFDDADQRLFEVLSYHAXCSKAEVDKFKAANIPLVSELAIDDIHFDDFSLDVDAMIXAALRMFMELGMVQKFKIDYEXLCRWLLXVRKNYRMVLYHNWRHAFNVCQLMFAMLXXAGFQDILXEVEILAVIVGCLCHDLDHRGXNNAFQAKSGSALAQLYGXSAXLEHHHFNHAVMILQSEGHNIFANLSSKEYSDLMQLLKQSILAXDLXLYFERRXEFFELVSKGEYDWNIKNHRDIFRSMLMXACDLGAVXKPWEISRQ

SEQ ID NO: 19614 - protein, 136 aa, Homo sapiens
  MOD_RES (1)..(1): Any amino acid
  MOD_RES (16)..(16): Selenocysteine
  MOD_RES (24)..(24): Selenocysteine
  MOD_RES (38)..(38): Selenocysteine
  MOD_RES (55)..(55): Selenocysteine
  MOD_RES (103)..(103): Selenocysteine
  MOD_RES (120)..(120): Selenocysteine
XVLPLVEERKISMLMXACDLGAVXKPWEISRQVAELVXSEFFEQGDRERLELKLXPSAIFDRNRKDELPRLQLEWIDSICMPLYQALVKVNVKLKPMLDSVAXNRSKWEELHQKRLLASXASSSPASVMVAKEDRN

SEQ ID NO: 19615 - protein, 519 aa, Homo sapiens
  MOD_RES (6)..(6): Selenocysteine
  MOD_RES (55)..(55): Selenocysteine
  MOD_RES (61)..(61): Selenocysteine
  MOD_RES (70)..(70): Selenocysteine
  MOD_RES (84)..(84): Selenocysteine
  MOD_RES (86)..(86): Selenocysteine
  MOD_RES (92)..(92): Selenocysteine
  MOD_RES (122)..(122): Selenocysteine
  MOD_RES (137)..(137): Selenocysteine
  MOD_RES (169)..(169): Selenocysteine
  MOD_RES (186)..(186): Selenocysteine
  MOD_RES (212)..(212): Selenocysteine
  MOD_RES (214)..(214): Selenocysteine
  MOD_RES (222)..(222): Selenocysteine
  MOD_RES (229)..(229): Selenocysteine
  MOD_RES (248)..(248): Selenocysteine
  MOD_RES (250)..(251): Selenocysteine
  MOD_RES (258)..(258): Selenocysteine
  MOD_RES (314)..(314): Selenocysteine
  MOD_RES (341)..(341): Selenocysteine
  MOD_RES (365)..(365): Selenocysteine
  MOD_RES (395)..(395): Selenocysteine
  MOD_RES (412)..(412): Selenocysteine
  MOD_RES (417)..(417): Selenocysteine
  MOD_RES (420)..(420): Selenocysteine
  MOD_RES (436)..(436): Selenocysteine
  MOD_RES (445)..(446): Selenocysteine
  MOD_RES (461)..(461): Selenocysteine
  MOD_RES (509)..(509): Selenocysteine
MDDHVXIRKKHLQRPIFRLRCLVKQLERGDVNVVDLKKNIEYAASVLEAVYIDEXRRLLDXEDELSDIQXDSVPSEVRDWLASXFXRKMGMXKKKPEEKPKFRSIVHAVQAGIFVERMYRKXYHMVGLAYPAAVIVXLKDVDKWSFDVFALNEASGEHSLKFMIYELFXRYDLINRFKIPVSCLIXFAEALEVGYSKYKNPYHNLIHAADVXQXVHYIMLHXGIMHWLXELEILAMVFAAAIHDYEHXGXXNNFHIQXRSDVAILYNDRSVLENHHVSAAYRLMQEEEMNILINLSKDDWRDLRNLVIEMVLSXDMSGHFQQIKNIRNSLQQPEGIDRAKXMSLILHAADISHPAKSWKLHYRWXMALMEEFFLQGDKEAELGLPFSPLCDRKSXMVAQSQIGFIDFIVEPXFSLLXDSXEKIVIPLIEEASKAEXSSYVASSSXXIVGLHIADALRRSNXKGSMSDGSYSPDYSLAAVDLKSFKNNLVDIIQQNKERWKELAAQEARXSSQKCEFIHQ

SEQ ID NO: 19616 - protein, 529 aa, Homo sapiens
  MOD_RES (6)..(6): Selenocysteine
  MOD_RES (55)..(55): Selenocysteine
  MOD_RES (61)..(61): Selenocysteine
  MOD_RES (70)..(70): Selenocysteine
  MOD_RES (84)..(84): Selenocysteine
  MOD_RES (86)..(86): Selenocysteine
  MOD_RES (92)..(92): Selenocysteine
  MOD_RES (122)..(122): Selenocysteine
  MOD_RES (137)..(137): Selenocysteine
  MOD_RES (169)..(169): Selenocysteine
  MOD_RES (186)..(186): Selenocysteine
  MOD_RES (212)..(212): Selenocysteine
  MOD_RES (214)..(214): Selenocysteine
  MOD_RES (222)..(222): Selenocysteine
  MOD_RES (229)..(229): Selenocysteine
  MOD_RES (248)..(248): Selenocysteine
  MOD_RES (250)..(251): Selenocysteine
  MOD_RES (258)..(258): Selenocysteine
  MOD_RES (314)..(314): Selenocysteine
  MOD_RES (341)..(341): Selenocysteine
  MOD_RES (365)..(365): Selenocysteine
  MOD_RES (395)..(395): Selenocysteine
  MOD_RES (412)..(412): Selenocysteine
  MOD_RES (417)..(417): Selenocysteine
  MOD_RES (420)..(420): Selenocysteine
  MOD_RES (436)..(436): Selenocysteine
  MOD_RES (445)..(446): Selenocysteine
  MOD_RES (461)..(461): Selenocysteine
  MOD_RES (527)..(527): Selenocysteine
MDDHVXIRKKHLQRPIFRLRCLVKQLERGDVNVVDLKKNIEYAASVLEAVYIDEXRRLLDXEDELSDIQXDSVPSEVRDWLASXFXRKMGMXKKKPEEKPKFRSIVHAVQAGIFVERMYRKXYHMVGLAYPAAVIVXLKDVDKWSFDVFALNEASGEHSLKFMIYELFXRYDLINRFKIPVSCLIXFAEALEVGYSKYKNPYHNLIHAADVXQXVHYIMLHXGIMHWLXELEILAMVFAAAIHDYEHXGXXNNFHIQXRSDVAILYNDRSVLENHHVSAAYRLMQEEEMNILINLSKDDWRDLRNLVIEMVLSXDMSGHFQQIKNIRNSLQQPEGIDRAKXMSLILHAADISHPAKSWKLHYRWXMALMEEFFLQGDKEAELGLPFSPLCDRKSXMVAQSQIGFIDFIVEPXFSLLXDSXEKIVIPLIEEASKAEXSSYVASSSXXIVGLHIADALRRSNXKGSMSDGSYSPDYSLAAVDLKSFKNNLVDIIQQNKERWKELAAQGESDLHKNSEDLVNAEEKHDEXHS

SEQ ID NO: 19617 - protein, 501 aa, Homo sapiens
  MOD_RES (43)..(43): Selenocysteine
  MOD_RES (52)..(52): Selenocysteine
  MOD_RES (66)..(66): Selenocysteine
  MOD_RES (68)..(68): Selenocysteine
  MOD_RES (74)..(74): Selenocysteine
  MOD_RES (104)..(104): Selenocysteine
  MOD_RES (119)..(119): Selenocysteine
  MOD_RES (151)..(151): Selenocysteine
  MOD_RES (168)..(168): Selenocysteine
  MOD_RES (194)..(194): Selenocysteine
  MOD_RES (196)..(196): Selenocysteine
  MOD_RES (204)..(204): Selenocysteine
  MOD_RES (211)..(211): Selenocysteine
  MOD_RES (230)..(230): Selenocysteine
  MOD_RES (232)..(233): Selenocysteine
  MOD_RES (240)..(240): Selenocysteine
  MOD_RES (296)..(296): Selenocysteine
  MOD_RES (323)..(323): Selenocysteine
  MOD_RES (347)..(347): Selenocysteine
  MOD_RES (377)..(377): Selenocysteine
  MOD_RES (394)..(394): Selenocysteine
  MOD_RES (399)..(399): Selenocysteine
  MOD_RES (402)..(402): Selenocysteine
  MOD_RES (418)..(418): Selenocysteine
  MOD_RES (427)..(428): Selenocysteine
  MOD_RES (443)..(443): Selenocysteine
  MOD_RES (491)..(491): Selenocysteine
MGKKINKLFCFNFLVQCFRGKSKPSKCQIRKKVKNHIERLLDXEDELSDIQXDSVPSEVRDWLASXFXRKMGMXKKKPEEKPKFRSIVHAVQAGIFVERMYRKXYHMVGLAYPAAVIVXLKDVDKWSFDVFALNEASGEHSLKFMIYELFXRYDLINRFKIPVSCLIXFAEALEVGYSKYKNPYHNLIHAADVXQXVHYIMLHXGIMHWLXELEILAMVFAAAIHDYEHXGXXNNFHIQXRSDVAILYNDRSVLENHHVSAAYRLMQEEEMNILINLSKDDWRDLRNLVIEMVLSXDMSGHFQQIKNIRNSLQQPEGIDRAKXMSLILHAADISHPAKSWKLHYRWXMALMEEFFLQGDKEAELGLPFSPLCDRKSXMVAQSQIGFIDFIVEPXFSLLXDSXEKIVIPLIEEASKAEXSSYVASSSXXIVGLHIADALRRSNXKGSMSDGSYSPDYSLAAVDLKSFKNNLVDIIQQNKERWKELAAQEARXSSQKCEFIHQ

SEQ ID NO: 19618 - protein, 535 aa, Homo sapiens
  MOD_RES (6)..(6): Selenocysteine
  MOD_RES (14)..(15): Selenocysteine
  MOD_RES (20)..(20): Selenocysteine
  MOD_RES (24)..(24): Selenocysteine
  MOD_RES (71)..(71): Selenocysteine
  MOD_RES (77)..(77): Selenocysteine
  MOD_RES (86)..(86): Selenocysteine
  MOD_RES (100)..(100): Selenocysteine
  MOD_RES (102)..(102): Selenocysteine
  MOD_RES (108)..(108): Selenocysteine
  MOD_RES (138)..(138): Selenocysteine
  MOD_RES (153)..(153): Selenocysteine
  MOD_RES (185)..(185): Selenocysteine
  MOD_RES (202)..(202): Selenocysteine
  MOD_RES (228)..(228): Selenocysteine
  MOD_RES (230)..(230): Selenocysteine
  MOD_RES (238)..(238): Selenocysteine
  MOD_RES (245)..(245): Selenocysteine
  MOD_RES (264)..(264): Selenocysteine
  MOD_RES (266)..(267): Selenocysteine
  MOD_RES (274)..(274): Selenocysteine
  MOD_RES (330)..(330): Selenocysteine
  MOD_RES (357)..(357): Selenocysteine
  MOD_RES (381)..(381): Selenocysteine
  MOD_RES (411)..(411): Selenocysteine
  MOD_RES (428)..(428): Selenocysteine
  MOD_RES (433)..(433): Selenocysteine
  MOD_RES (436)..(436): Selenocysteine
  MOD_RES (452)..(452): Selenocysteine
  MOD_RES (461)..(462): Selenocysteine
  MOD_RES (477)..(477): Selenocysteine
  MOD_RES (525)..(525): Selenocysteine
MGSSAXEIEELENXXFKYLXGEQXEKMWQRLKGILRCLVKQLERGDVNVVDLKKNIEYAASVLEAVYIDEXRRLLDXEDELSDIQXDSVPSEVRDWLASXFXRKMGMXKKKPEEKPKFRSIVHAVQAGIFVERMYRKXYHMVGLAYPAAVIVXLKDVDKWSFDVFALNEASGEHSLKFMIYELFXRYDLINRFKIPVSCLIXFAEALEVGYSKYKNPYHNLIHAADVXQXVHYIMLHXGIMHWLXELEILAMVFAAAIHDYEHXGXXNNFHIQXRSDVAILYNDRSVLENHHVSAAYRLMQEEEMNILINLSKDDWRDLRNLVIEMVLSXDMSGHFQQIKNIRNSLQQPEGIDRAKXMSLILHAADISHPAKSWKLHYRWXMALMEEFFLQGDKEAELGLPFSPLCDRKSXMVAQSQIGFIDFIVEPXFSLLXDSXEKIVIPLIEEASKAEXSSYVASSSXXIVGLHIADALRRSNXKGSMSDGSYSPDYSLAAVDLKSFKNNLVDIIQQNKERWKELAAQEARXSSQKCEFIHQ

SEQ ID NO: 19619 - protein, 545 aa, Homo sapiens
  MOD_RES (6)..(6): Selenocysteine
  MOD_RES (14)..(15): Selenocysteine
  MOD_RES (20)..(20): Selenocysteine
  MOD_RES (24)..(24): Selenocysteine
  MOD_RES (71)..(71): Selenocysteine
  MOD_RES (77)..(77): Selenocysteine
  MOD_RES (86)..(86): Selenocysteine
  MOD_RES (100)..(100): Selenocysteine
  MOD_RES (102)..(102): Selenocysteine
  MOD_RES (108)..(108): Selenocysteine
  MOD_RES (138)..(138): Selenocysteine
  MOD_RES (153)..(153): Selenocysteine
  MOD_RES (185)..(185): Selenocysteine
  MOD_RES (202)..(202): Selenocysteine
  MOD_RES (228)..(228): Selenocysteine
  MOD_RES (230)..(230): Selenocysteine
  MOD_RES (238)..(238): Selenocysteine
  MOD_RES (245)..(245): Selenocysteine
  MOD_RES (264)..(264): Selenocysteine
  MOD_RES (266)..(267): Selenocysteine
  MOD_RES (274)..(274): Selenocysteine
  MOD_RES (330)..(330): Selenocysteine
  MOD_RES (357)..(357): Selenocysteine
  MOD_RES (381)..(381): Selenocysteine
  MOD_RES (411)..(411): Selenocysteine
  MOD_RES (428)..(428): Selenocysteine
  MOD_RES (433)..(433): Selenocysteine
  MOD_RES (436)..(436): Selenocysteine
  MOD_RES (452)..(452): Selenocysteine
  MOD_RES (461)..(462): Selenocysteine
  MOD_RES (477)..(477): Selenocysteine
  MOD_RES (543)..(543): Selenocysteine
MGSSAXEIEELENXXFKYLXGEQXEKMWQRLKGILRCLVKQLERGDVNVVDLKKNIEYAASVLEAVYIDEXRRLLDXEDELSDIQXDSVPSEVRDWLASXFXRKMGMXKKKPEEKPKFRSIVHAVQAGIFVERMYRKXYHMVGLAYPAAVIVXLKDVDKWSFDVFALNEASGEHSLKFMIYELFXRYDLINRFKIPVSCLIXFAEALEVGYSKYKNPYHNLIHAADVXQXVHYIMLHXGIMHWLXELEILAMVFAAAIHDYEHXGXXNNFHIQXRSDVAILYNDRSVLENHHVSAAYRLMQEEEMNILINLSKDDWRDLRNLVIEMVLSXDMSGHFQQIKNIRNSLQQPEGIDRAKXMSLILHAADISHPAKSWKLHYRWXMALMEEFFLQGDKEAELGLPFSPLCDRKSXMVAQSQIGFIDFIVEPXFSLLXDSXEKIVIPLIEEASKAEXSSYVASSSXXIVGLHIADALRRSNXKGSMSDGSYSPDYSLAAVDLKSFKNNLVDIIQQNKERWKELAAQGESDLHKNSEDLVNAEEKHDEXHS

SEQ ID NO: 19620 - protein, 516 aa, Homo sapiens
  MOD_RES (43)..(43): Selenocysteine
  MOD_RES (55)..(55): Selenocysteine
  MOD_RES (61)..(61): Selenocysteine
  MOD_RES (84)..(84): Selenocysteine
  MOD_RES (86)..(86): Selenocysteine
  MOD_RES (122)..(122): Selenocysteine
  MOD_RES (124)..(124): Selenocysteine
  MOD_RES (129)..(129): Selenocysteine
  MOD_RES (132)..(132): Selenocysteine
  MOD_RES (162)..(162): Selenocysteine
  MOD_RES (169)..(169): Selenocysteine
  MOD_RES (181)..(181): Selenocysteine
  MOD_RES (193)..(193): Selenocysteine
  MOD_RES (212)..(212): Selenocysteine
  MOD_RES (214)..(214): Selenocysteine
  MOD_RES (222)..(222): Selenocysteine
  MOD_RES (248)..(248): Selenocysteine
  MOD_RES (250)..(251): Selenocysteine
  MOD_RES (258)..(258): Selenocysteine
  MOD_RES (296)..(296): Selenocysteine
  MOD_RES (314)..(314): Selenocysteine
  MOD_RES (325)..(325): Selenocysteine
  MOD_RES (328)..(328): Selenocysteine
  MOD_RES (355)..(355): Selenocysteine
  MOD_RES (365)..(365): Selenocysteine
  MOD_RES (393)..(393): Selenocysteine
  MOD_RES (395)..(395): Selenocysteine
  MOD_RES (412)..(412): Selenocysteine
  MOD_RES (417)..(417): Selenocysteine
  MOD_RES (464)..(464): Selenocysteine
  MOD_RES (485)..(485): Selenocysteine
MANPVPVQRSHLQGPILRLRYMVKQLENGEINIEELKKNLEYXASLLEAVYIDEXRQILDXEDELQELRSDAVPSEVRDWLASXFXQQARAKGRRAEEKPKFRSIVHAVQAGIFVERMFRRXYXSVGPXYSXAVLNCLKNLDLWCFDVFSLNQAADDHALRXIVFELLXRHNLISRFKIPXVFLMSFLDALEXGYGKYKNPYHNQIHAADVXQXVHCFLLRXGMVHCLSEIELLAIIFAAAIHDYEHXGXXNSFHIQXKSECAIVYNDRSVLENHHISSVFRLMQDDEMNIFINLXKDEFVELRALVIEMVLAXDMSCHFQQVKXMKXALQQLERIDKPKALSLLLHAADISHPXKQWLVHSRWXKALMEEFFRQGDKEAELGLPFSPLCDRXSXLVAQSQIGFIDFIVEPXFSVLXDVAEKSVQPLADEDSKSKNQPSFQWRQPSLDVEVGDPNPDVVSFRSXWVKRIQENKQKWKERAASGIXNQMSIDELSPCEEEAPPSPAEDEHNQNGNLD

SEQ ID NO: 19621 - protein, 536 aa, Homo sapiens
  MOD_RES (63)..(63): Selenocysteine
  MOD_RES (75)..(75): Selenocysteine
  MOD_RES (81)..(81): Selenocysteine
  MOD_RES (104)..(104): Selenocysteine
  MOD_RES (106)..(106): Selenocysteine
  MOD_RES (142)..(142): Selenocysteine
  MOD_RES (144)..(144): Selenocysteine
  MOD_RES (149)..(149): Selenocysteine
  MOD_RES (152)..(152): Selenocysteine
  MOD_RES (182)..(182): Selenocysteine
  MOD_RES (189)..(189): Selenocysteine
  MOD_RES (201)..(201): Selenocysteine
  MOD_RES (213)..(213): Selenocysteine
  MOD_RES (232)..(232): Selenocysteine
  MOD_RES (234)..(234): Selenocysteine
  MOD_RES (242)..(242): Selenocysteine
  MOD_RES (268)..(268): Selenocysteine
  MOD_RES (270)..(271): Selenocysteine
  MOD_RES (278)..(278): Selenocysteine
  MOD_RES (316)..(316): Selenocysteine
  MOD_RES (334)..(334): Selenocysteine
  MOD_RES (345)..(345): Selenocysteine
  MOD_RES (348)..(348): Selenocysteine
  MOD_RES (375)..(375): Selenocysteine
  MOD_RES (385)..(385): Selenocysteine
  MOD_RES (413)..(413): Selenocysteine
  MOD_RES (415)..(415): Selenocysteine
  MOD_RES (432)..(432): Selenocysteine
  MOD_RES (437)..(437): Selenocysteine
  MOD_RES (484)..(484): Selenocysteine
  MOD_RES (505)..(505): Selenocysteine
MELSPRSPPEMLEESDCPSPLELKSAPSKKMWIKLRSLLRYMVKQLENGEINIEELKKNLEYXASLLEAVYIDEXRQILDXEDELQELRSDAVPSEVRDWLASXFXQQARAKGRRAEEKPKFRSIVHAVQAGIFVERMFRRXYXSVGPXYSXAVLNCLKNLDLWCFDVFSLNQAADDHALRXIVFELLXRHNLISRFKIPXVFLMSFLDALEXGYGKYKNPYHNQIHAADVXQXVHCFLLRXGMVHCLSEIELLAIIFAAAIHDYEHXGXXNSFHIQXKSECAIVYNDRSVLENHHISSVFRLMQDDEMNIFINLXKDEFVELRALVIEMVLAXDMSCHFQQVKXMKXALQQLERIDKPKALSLLLHAADISHPXKQWLVHSRWXKALMEEFFRQGDKEAELGLPFSPLCDRXSXLVAQSQIGFIDFIVEPXFSVLXDVAEKSVQPLADEDSKSKNQPSFQWRQPSLDVEVGDPNPDVVSFRSXWVKRIQENKQKWKERAASGIXNQMSIDELSPCEEEAPPSPAEDEHNQNGNLD

SEQ ID NO: 19622 - protein, 191 aa, Homo sapiens
  MOD_RES (63)..(63): Selenocysteine
  MOD_RES (75)..(75): Selenocysteine
  MOD_RES (101)..(101): Selenocysteine
  MOD_RES (104)..(104): Selenocysteine
  MOD_RES (120)..(120): Selenocysteine
  MOD_RES (148)..(148): Selenocysteine
  MOD_RES (164)..(164): Selenocysteine
  MOD_RES (171)..(171): Selenocysteine
  MOD_RES (177)..(177): Selenocysteine
  MOD_RES (181)..(181): Selenocysteine
MELSPRSPPEMLEESDCPSPLELKSAPSKKMWIKLRSLLRYMVKQLENGEINIEELKKNLEYXASLLEAVYIDEXRVSRLWKHLLSFLCDSPSGVSGKSWXRRXSCRSCGQMPCLRRCGXGWPPPSPSRPGPKAAEQRRSPSSEALCXLCRLGSSWNGCSGEHXPLWAPLXLLRFSXVSRXWISGALMSFP

SEQ ID NO: 19623 - protein, 50 aa, Homo sapiens
MELSPRSPPEMLEESDCPSPLELKSAPSKKMWIKLRSLPHGVIFYGSYQF

SEQ ID NO: 19624 - protein, 495 aa, Homo sapiens
  MOD_RES (22)..(22): Selenocysteine
  MOD_RES (34)..(34): Selenocysteine
  MOD_RES (40)..(40): Selenocysteine
  MOD_RES (63)..(63): Selenocysteine
  MOD_RES (65)..(65): Selenocysteine
  MOD_RES (101)..(101): Selenocysteine
  MOD_RES (103)..(103): Selenocysteine
  MOD_RES (108)..(108): Selenocysteine
  MOD_RES (111)..(111): Selenocysteine
  MOD_RES (141)..(141): Selenocysteine
  MOD_RES (148)..(148): Selenocysteine
  MOD_RES (160)..(160): Selenocysteine
  MOD_RES (172)..(172): Selenocysteine
  MOD_RES (191)..(191): Selenocysteine
  MOD_RES (193)..(193): Selenocysteine
  MOD_RES (201)..(201): Selenocysteine
  MOD_RES (227)..(227): Selenocysteine
  MOD_RES (229)..(230): Selenocysteine
  MOD_RES (237)..(237): Selenocysteine
  MOD_RES (275)..(275): Selenocysteine
  MOD_RES (293)..(293): Selenocysteine
  MOD_RES (304)..(304): Selenocysteine
  MOD_RES (307)..(307): Selenocysteine
  MOD_RES (334)..(334): Selenocysteine
  MOD_RES (344)..(344): Selenocysteine
  MOD_RES (372)..(372): Selenocysteine
  MOD_RES (374)..(374): Selenocysteine
  MOD_RES (391)..(391): Selenocysteine
  MOD_RES (396)..(396): Selenocysteine
  MOD_RES (443)..(443): Selenocysteine
  MOD_RES (464)..(464): Selenocysteine
MVKQLENGEINIEELKKNLEYXASLLEAVYIDEXRQILDXEDELQELRSDAVPSEVRDWLASXFXQQARAKGRRAEEKPKFRSIVHAVQAGIFVERMFRRXYXSVGPXYSXAVLNCLKNLDLWCFDVFSLNQAADDHALRXIVFELLXRHNLISRFKIPXVFLMSFLDALEXGYGKYKNPYHNQIHAADVXQXVHCFLLRXGMVHCLSEIELLAIIFAAAIHDYEHXGXXNSFHIQXKSECAIVYNDRSVLENHHISSVFRLMQDDEMNIFINLXKDEFVELRALVIEMVLAXDMSCHFQQVKXMKXALQQLERIDKPKALSLLLHAADISHPXKQWLVHSRWXKALMEEFFRQGDKEAELGLPFSPLCDRXSXLVAQSQIGFIDFIVEPXFSVLXDVAEKSVQPLADEDSKSKNQPSFQWRQPSLDVEVGDPNPDVVSFRSXWVKRIQENKQKWKERAASGIXNQMSIDELSPCEEEAPPSPAEDEHNQNGNLD

SEQ ID NO: 19625 - protein, 46 aa, Homo sapiens
  MOD_RES (5)..(5): Selenocysteine
  MOD_RES (40)..(40): Selenocysteine
MESPXKEIEEFESNSLKYLQPEQIEKIWLRLRGLRKYKKXSQRLRS

SEQ ID NO: 19626 - protein, 634 aa, Homo sapiens
  MOD_RES (5)..(5): Selenocysteine
  MOD_RES (40)..(40): Selenocysteine
  MOD_RES (70)..(70): Selenocysteine
  MOD_RES (80)..(80): Selenocysteine
  MOD_RES (86)..(86): Selenocysteine
  MOD_RES (109)..(109): Selenocysteine
  MOD_RES (111)..(111): Selenocysteine
  MOD_RES (147)..(147): Selenocysteine
  MOD_RES (194)..(194): Selenocysteine
  MOD_RES (237)..(237): Selenocysteine
  MOD_RES (239)..(239): Selenocysteine
  MOD_RES (247)..(247): Selenocysteine
  MOD_RES (254)..(254): Selenocysteine
  MOD_RES (273)..(273): Selenocysteine
  MOD_RES (275)..(276): Selenocysteine
  MOD_RES (283)..(283): Selenocysteine
  MOD_RES (331)..(331): Selenocysteine
  MOD_RES (340)..(340): Selenocysteine
  MOD_RES (354)..(354): Selenocysteine
  MOD_RES (374)..(374): Selenocysteine
  MOD_RES (391)..(391): Selenocysteine
  MOD_RES (421)..(421): Selenocysteine
  MOD_RES (438)..(438): Selenocysteine
  MOD_RES (440)..(440): Selenocysteine
  MOD_RES (443)..(443): Selenocysteine
  MOD_RES (446)..(446): Selenocysteine
  MOD_RES (457)..(457): Selenocysteine
  MOD_RES (460)..(460): Selenocysteine
  MOD_RES (463)..(463): Selenocysteine
  MOD_RES (485)..(485): Selenocysteine
  MOD_RES (509)..(509): Selenocysteine
  MOD_RES (511)..(511): Selenocysteine
  MOD_RES (568)..(568): Selenocysteine
  MOD_RES (572)..(572): Selenocysteine
  MOD_RES (579)..(579): Selenocysteine
  MOD_RES (614)..(614): Selenocysteine
  MOD_RES (629)..(629): Selenocysteine
MESPXKEIEEFESNSLKYLQPEQIEKIWLRLRGLRKYKKXSQRLRSLVKQLERGEASVVDLKKNLEYAAXVLESVYIDEXRRLLDXEDELSDIQSDAVPSEVRDWLASXFXRQMGMMLRRSDEKPRFKSIVHAVQAGIFVERMYRRXSNMVGLSYPPAVIEALKDVDKWSFDVFSLNEASGDHALKFIFYELLXRYDLISRFKIPISALVSFVEALEVGYSKHKNPYHNLMHAADVXQXVHYLLYKXGVANWLXELEIFAIIFSAAIHDYEHXGXXNNFHIQXRSDPAILYNDRSVLENHHLSAAYRLLQDDEEMNILINLSKDDWREFRXLVIEMVMAXDMSCHFQQIKAMKXALQQPEAIEKPKALSLMLHXADISHPAKAWDLHHRWXMSLLEEFFRQGDREAELGLPFSPLCDRKSXMVAQSQVGFIDFIVEPXFXVLXDMXEKIVSPLIDEXSQXGGXGQRRSSLNSISSSDAKRSGVKXSGSEGSAPINNSVISVDYKSFKAXWXEVVHINRERWRAKVPKEEKAKKEAEEKARLAAEEQQKEMEAKSQAEEGASGKAEKKXSGEXKNQVNGXRANKSDNPRGKNSKAEKSSGEQQQNGDFKDGKNKXDKKDHSNIGNDSKKXDDSQE

SEQ ID NO: 19627 - protein, 709 aa, Homo sapiens
  MOD_RES (5)..(5): Selenocysteine
  MOD_RES (40)..(40): Selenocysteine
  MOD_RES (70)..(70): Selenocysteine
  MOD_RES (80)..(80): Selenocysteine
  MOD_RES (86)..(86): Selenocysteine
  MOD_RES (109)..(109): Selenocysteine
  MOD_RES (111)..(111): Selenocysteine
  MOD_RES (147)..(147): Selenocysteine
  MOD_RES (194)..(194): Selenocysteine
  MOD_RES (237)..(237): Selenocysteine
  MOD_RES (239)..(239): Selenocysteine
  MOD_RES (247)..(247): Selenocysteine
  MOD_RES (254)..(254): Selenocysteine
  MOD_RES (273)..(273): Selenocysteine
  MOD_RES (275)..(276): Selenocysteine
  MOD_RES (283)..(283): Selenocysteine
  MOD_RES (331)..(331): Selenocysteine
  MOD_RES (340)..(340): Selenocysteine
  MOD_RES (354)..(354): Selenocysteine
  MOD_RES (374)..(374): Selenocysteine
  MOD_RES (391)..(391): Selenocysteine
  MOD_RES (421)..(421): Selenocysteine
  MOD_RES (438)..(438): Selenocysteine
  MOD_RES (440)..(440): Selenocysteine
  MOD_RES (443)..(443): Selenocysteine
  MOD_RES (446)..(446): Selenocysteine
  MOD_RES (457)..(457): Selenocysteine
  MOD_RES (460)..(460): Selenocysteine
  MOD_RES (463)..(463): Selenocysteine
  MOD_RES (485)..(485): Selenocysteine
  MOD_RES (509)..(509): Selenocysteine
  MOD_RES (511)..(511): Selenocysteine
  MOD_RES (568)..(568): Selenocysteine
  MOD_RES (572)..(572): Selenocysteine
  MOD_RES (579)..(579): Selenocysteine
  MOD_RES (614)..(614): Selenocysteine
  MOD_RES (629)..(629): Selenocysteine
  MOD_RES (632)..(632): Selenocysteine
  MOD_RES (644)..(644): Selenocysteine
  MOD_RES (647)..(647): Selenocysteine
  MOD_RES (651)..(651): Selenocysteine
  MOD_RES (680)..(680): Selenocysteine
MESPXKEIEEFESNSLKYLQPEQIEKIWLRLRGLRKYKKXSQRLRSLVKQLERGEASVVDLKKNLEYAAXVLESVYIDEXRRLLDXEDELSDIQSDAVPSEVRDWLASXFXRQMGMMLRRSDEKPRFKSIVHAVQAGIFVERMYRRXSNMVGLSYPPAVIEALKDVDKWSFDVFSLNEASGDHALKFIFYELLXRYDLISRFKIPISALVSFVEALEVGYSKHKNPYHNLMHAADVXQXVHYLLYKXGVANWLXELEIFAIIFSAAIHDYEHXGXXNNFHIQXRSDPAILYNDRSVLENHHLSAAYRLLQDDEEMNILINLSKDDWREFRXLVIEMVMAXDMSCHFQQIKAMKXALQQPEAIEKPKALSLMLHXADISHPAKAWDLHHRWXMSLLEEFFRQGDREAELGLPFSPLCDRKSXMVAQSQVGFIDFIVEPXFXVLXDMXEKIVSPLIDEXSQXGGXGQRRSSLNSISSSDAKRSGVKXSGSEGSAPINNSVISVDYKSFKAXWXEVVHINRERWRAKVPKEEKAKKEAEEKARLAAEEQQKEMEAKSQAEEGASGKAEKKXSGEXKNQVNGXRANKSDNPRGKNSKAEKSSGEQQQNGDFKDGKNKXDKKDHSNIGNDSKKXDGXKQRSHGSPAPSXSSXCRLXLPVIKPPLRHFKRPAYASSSYAPSVSKKXDEHPARYKMLDQRIKMKKIQNISHNWNRK

SEQ ID NO: 19628 - protein, 769 aa, Homo sapiens
  MOD_RES (2)..(2): Selenocysteine
  MOD_RES (18)..(18): Selenocysteine
  MOD_RES (27)..(27): Selenocysteine
  MOD_RES (62)..(62): Selenocysteine
  MOD_RES (72)..(72): Selenocysteine
  MOD_RES (100)..(100): Selenocysteine
  MOD_RES (130)..(130): Selenocysteine
  MOD_RES (140)..(140): Selenocysteine
  MOD_RES (146)..(146): Selenocysteine
  MOD_RES (169)..(169): Selenocysteine
  MOD_RES (171)..(171): Selenocysteine
  MOD_RES (207)..(207): Selenocysteine
  MOD_RES (254)..(254): Selenocysteine
  MOD_RES (297)..(297): Selenocysteine
  MOD_RES (299)..(299): Selenocysteine
  MOD_RES (307)..(307): Selenocysteine
  MOD_RES (314)..(314): Selenocysteine
  MOD_RES (333)..(333): Selenocysteine
  MOD_RES (335)..(336): Selenocysteine
  MOD_RES (343)..(343): Selenocysteine
  MOD_RES (391)..(391): Selenocysteine
  MOD_RES (400)..(400): Selenocysteine
  MOD_RES (414)..(414): Selenocysteine
  MOD_RES (434)..(434): Selenocysteine
  MOD_RES (451)..(451): Selenocysteine
  MOD_RES (481)..(481): Selenocysteine
  MOD_RES (498)..(498): Selenocysteine
  MOD_RES (500)..(500): Selenocysteine
  MOD_RES (503)..(503): Selenocysteine
  MOD_RES (506)..(506): Selenocysteine
  MOD_RES (517)..(517): Selenocysteine
  MOD_RES (520)..(520): Selenocysteine
  MOD_RES (523)..(523): Selenocysteine
  MOD_RES (545)..(545): Selenocysteine
  MOD_RES (569)..(569): Selenocysteine
  MOD_RES (571)..(571): Selenocysteine
  MOD_RES (628)..(628): Selenocysteine
  MOD_RES (632)..(632): Selenocysteine
  MOD_RES (639)..(639): Selenocysteine
  MOD_RES (674)..(674): Selenocysteine
  MOD_RES (689)..(689): Selenocysteine
  MOD_RES (692)..(692): Selenocysteine
  MOD_RES (704)..(704): Selenocysteine
  MOD_RES (707)..(707): Selenocysteine
  MOD_RES (711)..(711): Selenocysteine
  MOD_RES (740)..(740): Selenocysteine
MXDAGNRKEGFKKCRSAXFSIDGYSFXIVANEAGDKNARPLARFSRSKSQNCLWNSLIDGLXGNVKEKPRPXIVHDPRPPEEILADELPQLDSPEVLVKXSFRLRSLVKQLERGEASVVDLKKNLEYAAXVLESVYIDEXRRLLDXEDELSDIQSDAVPSEVRDWLASXFXRQMGMMLRRSDEKPRFKSIVHAVQAGIFVERMYRRXSNMVGLSYPPAVIEALKDVDKWSFDVFSLNEASGDHALKFIFYELLXRYDLISRFKIPISALVSFVEALEVGYSKHKNPYHNLMHAADVXQXVHYLLYKXGVANWLXELEIFAIIFSAAIHDYEHXGXXNNFHIQXRSDPAILYNDRSVLENHHLSAAYRLLQDDEEMNILINLSKDDWREFRXLVIEMVMAXDMSCHFQQIKAMKXALQQPEAIEKPKALSLMLHXADISHPAKAWDLHHRWXMSLLEEFFRQGDREAELGLPFSPLCDRKSXMVAQSQVGFIDFIVEPXFXVLXDMXEKIVSPLIDEXSQXGGXGQRRSSLNSISSSDAKRSGVKXSGSEGSAPINNSVISVDYKSFKAXWXEVVHINRERWRAKVPKEEKAKKEAEEKARLAAEEQQKEMEAKSQAEEGASGKAEKKXSGEXKNQVNGXRANKSDNPRGKNSKAEKSSGEQQQNGDFKDGKNKXDKKDHSNIGNDSKKXDGXKQRSHGSPAPSXSSXCRLXLPVIKPPLRHFKRPAYASSSYAPSVSKKXDEHPARYKMLDQRIKMKKIQNISHNWNRK

SEQ ID NO: 19629 - protein, 327 aa, Homo sapiens
  MOD_RES (3)..(3): Selenocysteine
  MOD_RES (38)..(38): Selenocysteine
  MOD_RES (79)..(79): Selenocysteine
  MOD_RES (124)..(124): Selenocysteine
  MOD_RES (145)..(145): Selenocysteine
  MOD_RES (147)..(147): Selenocysteine
  MOD_RES (156)..(156): Selenocysteine
  MOD_RES (179)..(179): Selenocysteine
  MOD_RES (219)..(219): Selenocysteine
  MOD_RES (244)..(244): Selenocysteine
  MOD_RES (281)..(281): Selenocysteine
  MOD_RES (309)..(309): Selenocysteine
FPXASSVPEHKGVGFHAWDVRNLRKLRGQVPAGSLPPXDPSLHRWFLAPLPSPEVIGVAELVNKINGPWFSKFDEDLAXAFSIYCGISIAHSLLYKKVNEAQYRSHLANEMMMYHMKVSDDEYXKLLHDGIQPVAAIDSNFASFXYXPRSLPEDDXSMAILSMLQDMNFINNYKIDCPXLARFCLMVKKGYRDPPYHNWMHAFSVSHFCYLLYKNLELXNYLEDIEIFALFISCMCHDLDHRGXNNSFQVASKSVLAALYSSEGSVMERHHFAQAIAILNXHGCNIFDHFSRKDYQRMLDLMRDIILAXDLAHHLRIFKDLQKMAEG

SEQ ID NO: 19630 - protein, 38 aa, Homo sapiens
  MOD_RES (35)..(35): Selenocysteine
MGQACGHSILCRSQQYPAARPAEPQPGPPCKGARXPRE

SEQ ID NO: 19631 - protein, 941 aa, Homo sapiens
  MOD_RES (80)..(80): Selenocysteine
  MOD_RES (83)..(83): Selenocysteine
  MOD_RES (143)..(143): Selenocysteine
  MOD_RES (184)..(184): Selenocysteine
  MOD_RES (213)..(213): Selenocysteine
  MOD_RES (224)..(224): Selenocysteine
  MOD_RES (257)..(257): Selenocysteine
  MOD_RES (293)..(293): Selenocysteine
  MOD_RES (312)..(312): Selenocysteine
  MOD_RES (340)..(340): Selenocysteine
  MOD_RES (359)..(359): Selenocysteine
  MOD_RES (373)..(373): Selenocysteine
  MOD_RES (375)..(375): Selenocysteine
  MOD_RES (378)..(378): Selenocysteine
  MOD_RES (380)..(380): Selenocysteine
  MOD_RES (405)..(405): Selenocysteine
  MOD_RES (419)..(419): Selenocysteine
  MOD_RES (471)..(472): Selenocysteine
  MOD_RES (495)..(495): Selenocysteine
  MOD_RES (499)..(499): Selenocysteine
  MOD_RES (538)..(538): Selenocysteine
  MOD_RES (583)..(583): Selenocysteine
  MOD_RES (604)..(604): Selenocysteine
  MOD_RES (606)..(606): Selenocysteine
  MOD_RES (615)..(615): Selenocysteine
  MOD_RES (638)..(638): Selenocysteine
  MOD_RES (678)..(678): Selenocysteine
  MOD_RES (703)..(703): Selenocysteine
  MOD_RES (740)..(740): Selenocysteine
  MOD_RES (768)..(768): Selenocysteine
  MOD_RES (805)..(805): Selenocysteine
  MOD_RES (813)..(813): Selenocysteine
  MOD_RES (818)..(819): Selenocysteine
  MOD_RES (896)..(896): Selenocysteine
  MOD_RES (903)..(903): Selenocysteine
  MOD_RES (928)..(928): Selenocysteine
MGQACGHSILCRSQQYPAARPAEPRGQQVFLKPDEPPPPPQPCADSLQDALLSLGSVIDISGLQRAVKEALSAVLPRVEXVYXYLLDGESQLVCEDPPHELPQEGKVREAIISQKRLGCNGLGFSDLPGKPLARLVAPLAPDXQVLVMPLADKEAGAVAAVILVHCGQLSDNEEWSLQAVEKHXLVALRRVQVLQQRGPREAPRAVQNPPEGXAEDQKGGAAYXDRDRKILQLCGELYDLDASSLQLKVLQYLQQEXRASRCCLLLVSEDNLQLSCKVIGDKVLGEEVSFPLXGCLGQVVEDKKSIQLKDLXSEDVQQLQSMLGCELQAMLCVPVISRAXDQVVALACAFNKLEGDLFXDEDEHVIQHCFHYXSXVLXSXLAFQKEQKLKCECQALLQVAKNLFXHLDDVSVLLQEIIXEARNLSNAEICSVFLLDQNELVAKVFDGGVVDDESYEIRIPADQGIAGHVAXXGQILNIPDAYAHPLFYRGVDDSXGFRXRNILCFPIKNENQEVIGVAELVNKINGPWFSKFDEDLAXAFSIYCGISIAHSLLYKKVNEAQYRSHLANEMMMYHMKVSDDEYXKLLHDGIQPVAAIDSNFASFXYXPRSLPEDDXSMAILSMLQDMNFINNYKIDCPXLARFCLMVKKGYRDPPYHNWMHAFSVSHFCYLLYKNLELXNYLEDIEIFALFISCMCHDLDHRGXNNSFQVASKSVLAALYSSEGSVMERHHFAQAIAILNXHGCNIFDHFSRKDYQRMLDLMRDIILAXDLAHHLRIFKDLQKMAEVGYDRNNKQHHRLLLCLLMXSCDLSDQXKGWKXXRKIAELIYKEFFSQGDLEKAMGNRPMEMMDREKAYIPELQISFMEHIAMPIYKLLQDLFPKAAELYERVASNREHWXKVSHKFXIRGLPSNNSLDFLDEEYEVPDLDGXRAPINGCCSLDAE

SEQ ID NO: 19632 - protein, 826 aa, Homo sapiens
  MOD_RES (69)..(69): Selenocysteine
  MOD_RES (98)..(98): Selenocysteine
  MOD_RES (109)..(109): Selenocysteine
  MOD_RES (142)..(142): Selenocysteine
  MOD_RES (178)..(178): Selenocysteine
  MOD_RES (197)..(197): Selenocysteine
  MOD_RES (225)..(225): Selenocysteine
  MOD_RES (244)..(244): Selenocysteine
  MOD_RES (258)..(258): Selenocysteine
  MOD_RES (260)..(260): Selenocysteine
  MOD_RES (263)..(263): Selenocysteine
  MOD_RES (265)..(265): Selenocysteine
  MOD_RES (290)..(290): Selenocysteine
  MOD_RES (304)..(304): Selenocysteine
  MOD_RES (356)..(357): Selenocysteine
  MOD_RES (380)..(380): Selenocysteine
  MOD_RES (384)..(384): Selenocysteine
  MOD_RES (423)..(423): Selenocysteine
  MOD_RES (468)..(468): Selenocysteine
  MOD_RES (489)..(489): Selenocysteine
  MOD_RES (491)..(491): Selenocysteine
  MOD_RES (500)..(500): Selenocysteine
  MOD_RES (523)..(523): Selenocysteine
  MOD_RES (563)..(563): Selenocysteine
  MOD_RES (588)..(588): Selenocysteine
  MOD_RES (625)..(625): Selenocysteine
  MOD_RES (653)..(653): Selenocysteine
  MOD_RES (690)..(690): Selenocysteine
  MOD_RES (698)..(698): Selenocysteine
  MOD_RES (703)..(704): Selenocysteine
  MOD_RES (781)..(781): Selenocysteine
  MOD_RES (788)..(788): Selenocysteine
  MOD_RES (813)..(813): Selenocysteine
MGQACGHSILCRSQQYPAARPAEPRGQQVFLKPDEPPPPPQPCADSLQVHCGQLSDNEEWSLQAVEKHXLVALRRVQVLQQRGPREAPRAVQNPPEGXAEDQKGGAAYXDRDRKILQLCGELYDLDASSLQLKVLQYLQQEXRASRCCLLLVSEDNLQLSCKVIGDKVLGEEVSFPLXGCLGQVVEDKKSIQLKDLXSEDVQQLQSMLGCELQAMLCVPVISRAXDQVVALACAFNKLEGDLFXDEDEHVIQHCFHYXSXVLXSXLAFQKEQKLKCECQALLQVAKNLFXHLDDVSVLLQEIIXEARNLSNAEICSVFLLDQNELVAKVFDGGVVDDESYEIRIPADQGIAGHVAXXGQILNIPDAYAHPLFYRGVDDSXGFRXRNILCFPIKNENQEVIGVAELVNKINGPWFSKFDEDLAXAFSIYCGISIAHSLLYKKVNEAQYRSHLANEMMMYHMKVSDDEYXKLLHDGIQPVAAIDSNFASFXYXPRSLPEDDXSMAILSMLQDMNFINNYKIDCPXLARFCLMVKKGYRDPPYHNWMHAFSVSHFCYLLYKNLELXNYLEDIEIFALFISCMCHDLDHRGXNNSFQVASKSVLAALYSSEGSVMERHHFAQAIAILNXHGCNIFDHFSRKDYQRMLDLMRDIILAXDLAHHLRIFKDLQKMAEVGYDRNNKQHHRLLLCLLMXSCDLSDQXKGWKXXRKIAELIYKEFFSQGDLEKAMGNRPMEMMDREKAYIPELQISFMEHIAMPIYKLLQDLFPKAAELYERVASNREHWXKVSHKFXIRGLPSNNSLDFLDEEYEVPDLDGXRAPINGCCSLDAE

SEQ ID NO: 19633 - protein, 39 aa, Homo sapiens
  MOD_RES (35)..(35): Selenocysteine
MGQACGHSILCRSQQYPAARPAEPSLQLPEHCFHXCDLI

SEQ ID NO: 19634 - protein, 932 aa, Homo sapiens
  MOD_RES (71)..(71): Selenocysteine
  MOD_RES (74)..(74): Selenocysteine
  MOD_RES (134)..(134): Selenocysteine
  MOD_RES (175)..(175): Selenocysteine
  MOD_RES (204)..(204): Selenocysteine
  MOD_RES (215)..(215): Selenocysteine
  MOD_RES (248)..(248): Selenocysteine
  MOD_RES (284)..(284): Selenocysteine
  MOD_RES (303)..(303): Selenocysteine
  MOD_RES (331)..(331): Selenocysteine
  MOD_RES (350)..(350): Selenocysteine
  MOD_RES (364)..(364): Selenocysteine
  MOD_RES (366)..(366): Selenocysteine
  MOD_RES (369)..(369): Selenocysteine
  MOD_RES (371)..(371): Selenocysteine
  MOD_RES (396)..(396): Selenocysteine
  MOD_RES (410)..(410): Selenocysteine
  MOD_RES (462)..(463): Selenocysteine
  MOD_RES (486)..(486): Selenocysteine
  MOD_RES (490)..(490): Selenocysteine
  MOD_RES (529)..(529): Selenocysteine
  MOD_RES (574)..(574): Selenocysteine
  MOD_RES (595)..(595): Selenocysteine
  MOD_RES (597)..(597): Selenocysteine
  MOD_RES (606)..(606): Selenocysteine
  MOD_RES (629)..(629): Selenocysteine
  MOD_RES (669)..(669): Selenocysteine
  MOD_RES (694)..(694): Selenocysteine
  MOD_RES (731)..(731): Selenocysteine
  MOD_RES (759)..(759): Selenocysteine
  MOD_RES (796)..(796): Selenocysteine
  MOD_RES (804)..(804): Selenocysteine
  MOD_RES (809)..(810): Selenocysteine
  MOD_RES (887)..(887): Selenocysteine
  MOD_RES (894)..(894): Selenocysteine
  MOD_RES (919)..(919): Selenocysteine
MKKQRIQEGKSLAHRRGQQVFLKPDEPPPPPQPCADSLQDALLSLGSVIDISGLQRAVKEALSAVLPRVEXVYXYLLDGESQLVCEDPPHELPQEGKVREAIISQKRLGCNGLGFSDLPGKPLARLVAPLAPDXQVLVMPLADKEAGAVAAVILVHCGQLSDNEEWSLQAVEKHXLVALRRVQVLQQRGPREAPRAVQNPPEGXAEDQKGGAAYXDRDRKILQLCGELYDLDASSLQLKVLQYLQQEXRASRCCLLLVSEDNLQLSCKVIGDKVLGEEVSFPLXGCLGQVVEDKKSIQLKDLXSEDVQQLQSMLGCELQAMLCVPVISRAXDQVVALACAFNKLEGDLFXDEDEHVIQHCFHYXSXVLXSXLAFQKEQKLKCECQALLQVAKNLFXHLDDVSVLLQEIIXEARNLSNAEICSVFLLDQNELVAKVFDGGVVDDESYEIRIPADQGIAGHVAXXGQILNIPDAYAHPLFYRGVDDSXGFRXRNILCFPIKNENQEVIGVAELVNKINGPWFSKFDEDLAXAFSIYCGISIAHSLLYKKVNEAQYRSHLANEMMMYHMKVSDDEYXKLLHDGIQPVAAIDSNFASFXYXPRSLPEDDXSMAILSMLQDMNFINNYKIDCPXLARFCLMVKKGYRDPPYHNWMHAFSVSHFCYLLYKNLELXNYLEDIEIFALFISCMCHDLDHRGXNNSFQVASKSVLAALYSSEGSVMERHHFAQAIAILNXHGCNIFDHFSRKDYQRMLDLMRDIILAXDLAHHLRIFKDLQKMAEVGYDRNNKQHHRLLLCLLMXSCDLSDQXKGWKXXRKIAELIYKEFFSQGDLEKAMGNRPMEMMDREKAYIPELQISFMEHIAMPIYKLLQDLFPKAAELYERVASNREHWXKVSHKFXIRGLPSNNSLDFLDEEYEVPDLDGXRAPINGCCSLDAE

SEQ ID NO: 19635 - protein, 198 aa, Homo sapiens
  MOD_RES (17)..(17): Selenocysteine
  MOD_RES (57)..(57): Selenocysteine
  MOD_RES (82)..(82): Selenocysteine
  MOD_RES (119)..(119): Selenocysteine
  MOD_RES (147)..(147): Selenocysteine
  MOD_RES (184)..(184): Selenocysteine
  MOD_RES (192)..(192): Selenocysteine
  MOD_RES (197)..(198): Selenocysteine
MLQDMNFINNYKIDCPXLARFCLMVKKGYRDPPYHNWMHAFSVSHFCYLLYKNLELXNYLEDIEIFALFISCMCHDLDHRGXNNSFQVASKSVLAALYSSEGSVMERHHFAQAIAILNXHGCNIFDHFSRKDYQRMLDLMRDIILAXDLAHHLRIFKDLQKMAEVGYDRNNKQHHRLLLCLLMXSCDLSDQXKGWKXX

SEQ ID NO: 19636 - protein, 178 aa, Homo sapiens
  MOD_RES (14)..(14): Selenocysteine
  MOD_RES (35)..(35): Selenocysteine
  MOD_RES (37)..(37): Selenocysteine
  MOD_RES (46)..(46): Selenocysteine
  MOD_RES (69)..(69): Selenocysteine
  MOD_RES (109)..(109): Selenocysteine
  MOD_RES (134)..(134): Selenocysteine
  MOD_RES (171)..(171): Selenocysteine
MMMYHMKVSDDEYXKLLHDGIQPVAAIDSNFASFXYXPRSLPEDDXSMAILSMLQDMNFINNYKIDCPXLARFCLMVKKGYRDPPYHNWMHAFSVSHFCYLLYKNLELXNYLEDIEIFALFISCMCHDLDHRGXNNSFQVASKSVLAALYSSEGSVMERHHFAQAIAILNXHGCNIFD

SEQ ID NO: 19637 - protein, 87 aa, Homo sapiens
  MOD_RES (59)..(59): Selenocysteine
  MOD_RES (62)..(62): Selenocysteine
MRRQPAASLDPLAKEPGPPGSRDDRLEDALLSLGSVIDISGLQRAVKEALSAVLPRVEXVYXYLLDGESQLVCEDPPHELPQEGKVR

SEQ ID NO: 19638 - protein, 144 aa, Homo sapiens
  MOD_RES (59)..(59): Selenocysteine
  MOD_RES (62)..(62): Selenocysteine
  MOD_RES (122)..(122): Selenocysteine
MRRQPAASLDPLAKEPGPPGSRDDRLEDALLSLGSVIDISGLQRAVKEALSAVLPRVEXVYXYLLDGESQLVCEDPPHELPQEGKVREAIISQKRLGCNGLGFSDLPGKPLARLVAPLAPDXQVLVMPLADKEAGAVAAVILVH

SEQ ID NO: 19639 - protein, 920 aa, Homo sapiens
  MOD_RES (59)..(59): Selenocysteine
  MOD_RES (62)..(62): Selenocysteine
  MOD_RES (122)..(122): Selenocysteine
  MOD_RES (163)..(163): Selenocysteine
  MOD_RES (192)..(192): Selenocysteine
  MOD_RES (203)..(203): Selenocysteine
  MOD_RES (236)..(236): Selenocysteine
  MOD_RES (272)..(272): Selenocysteine
  MOD_RES (291)..(291): Selenocysteine
  MOD_RES (319)..(319): Selenocysteine
  MOD_RES (338)..(338): Selenocysteine
  MOD_RES (352)..(352): Selenocysteine
  MOD_RES (354)..(354): Selenocysteine
  MOD_RES (357)..(357): Selenocysteine
  MOD_RES (359)..(359): Selenocysteine
  MOD_RES (384)..(384): Selenocysteine
  MOD_RES (398)..(398): Selenocysteine
  MOD_RES (450)..(451): Selenocysteine
  MOD_RES (474)..(474): Selenocysteine
  MOD_RES (478)..(478): Selenocysteine
  MOD_RES (517)..(517): Selenocysteine
  MOD_RES (562)..(562): Selenocysteine
  MOD_RES (583)..(583): Selenocysteine
  MOD_RES (585)..(585): Selenocysteine
  MOD_RES (594)..(594): Selenocysteine
  MOD_RES (617)..(617): Selenocysteine
  MOD_RES (657)..(657): Selenocysteine
  MOD_RES (682)..(682): Selenocysteine
  MOD_RES (719)..(719): Selenocysteine
  MOD_RES (747)..(747): Selenocysteine
  MOD_RES (784)..(784): Selenocysteine
  MOD_RES (792)..(792): Selenocysteine
  MOD_RES (797)..(798): Selenocysteine
  MOD_RES (875)..(875): Selenocysteine
  MOD_RES (882)..(882): Selenocysteine
  MOD_RES (907)..(907): Selenocysteine
MRRQPAASLDPLAKEPGPPGSRDDRLEDALLSLGSVIDISGLQRAVKEALSAVLPRVEXVYXYLLDGESQLVCEDPPHELPQEGKVREAIISQKRLGCNGLGFSDLPGKPLARLVAPLAPDXQVLVMPLADKEAGAVAAVILVHCGQLSDNEEWSLQAVEKHXLVALRRVQVLQQRGPREAPRAVQNPPEGXAEDQKGGAAYXDRDRKILQLCGELYDLDASSLQLKVLQYLQQEXRASRCCLLLVSEDNLQLSCKVIGDKVLGEEVSFPLXGCLGQVVEDKKSIQLKDLXSEDVQQLQSMLGCELQAMLCVPVISRAXDQVVALACAFNKLEGDLFXDEDEHVIQHCFHYXSXVLXSXLAFQKEQKLKCECQALLQVAKNLFXHLDDVSVLLQEIIXEARNLSNAEICSVFLLDQNELVAKVFDGGVVDDESYEIRIPADQGIAGHVAXXGQILNIPDAYAHPLFYRGVDDSXGFRXRNILCFPIKNENQEVIGVAELVNKINGPWFSKFDEDLAXAFSIYCGISIAHSLLYKKVNEAQYRSHLANEMMMYHMKVSDDEYXKLLHDGIQPVAAIDSNFASFXYXPRSLPEDDXSMAILSMLQDMNFINNYKIDCPXLARFCLMVKKGYRDPPYHNWMHAFSVSHFCYLLYKNLELXNYLEDIEIFALFISCMCHDLDHRGXNNSFQVASKSVLAALYSSEGSVMERHHFAQAIAILNXHGCNIFDHFSRKDYQRMLDLMRDIILAXDLAHHLRIFKDLQKMAEVGYDRNNKQHHRLLLCLLMXSCDLSDQXKGWKXXRKIAELIYKEFFSQGDLEKAMGNRPMEMMDREKAYIPELQISFMEHIAMPIYKLLQDLFPKAAELYERVASNREHWXKVSHKFXIRGLPSNNSLDFLDEEYEVPDLDGXRAPINGCCSLDAE

SEQ ID NO: 19640 - protein, 92 aa, Homo sapiens
  MOD_RES (10)..(10): Selenocysteine
  MOD_RES (17)..(18): Selenocysteine
  MOD_RES (34)..(34): Selenocysteine
  MOD_RES (38)..(38): Selenocysteine
  MOD_RES (44)..(44): Selenocysteine
  MOD_RES (56)..(56): Selenocysteine
  MOD_RES (67)..(67): Selenocysteine
  MOD_RES (79)..(79): Selenocysteine
  MOD_RES (90)..(90): Selenocysteine
MSYILKMPGXCLPGEGXXYELPPSSLHPSSAPVXSGGXCPALLXEAGWEAPIMAFXEAASAVGPSWXHSGASRSSSSRXSRRRRRSHAPXAC

SEQ ID NO: 19641 - protein, 106 aa, Homo sapiens
  MOD_RES (73)..(73): Selenocysteine
  MOD_RES (76)..(76): Selenocysteine
  MOD_RES (103)..(103): Selenocysteine
MVLVLHHILIAVVQFLRRGQQVFLKPDEPPPPPQPCADSLQDALLSLGSVIDISGLQRAVKEALSAVLPRVEXVYXYLLDGESQLVCEDPPHELPQEGKVRCXVAS

SEQ ID NO: 19642 - protein, 934 aa, Homo sapiens
  MOD_RES (73)..(73): Selenocysteine
  MOD_RES (76)..(76): Selenocysteine
  MOD_RES (136)..(136): Selenocysteine
  MOD_RES (177)..(177): Selenocysteine
  MOD_RES (206)..(206): Selenocysteine
  MOD_RES (217)..(217): Selenocysteine
  MOD_RES (250)..(250): Selenocysteine
  MOD_RES (286)..(286): Selenocysteine
  MOD_RES (305)..(305): Selenocysteine
  MOD_RES (333)..(333): Selenocysteine
  MOD_RES (352)..(352): Selenocysteine
  MOD_RES (366)..(366): Selenocysteine
  MOD_RES (368)..(368): Selenocysteine
  MOD_RES (371)..(371): Selenocysteine
  MOD_RES (373)..(373): Selenocysteine
  MOD_RES (398)..(398): Selenocysteine
  MOD_RES (412)..(412): Selenocysteine
  MOD_RES (464)..(465): Selenocysteine
  MOD_RES (488)..(488): Selenocysteine
  MOD_RES (492)..(492): Selenocysteine
  MOD_RES (531)..(531): Selenocysteine
  MOD_RES (576)..(576): Selenocysteine
  MOD_RES (597)..(597): Selenocysteine
  MOD_RES (599)..(599): Selenocysteine
  MOD_RES (608)..(608): Selenocysteine
  MOD_RES (631)..(631): Selenocysteine
  MOD_RES (671)..(671): Selenocysteine
  MOD_RES (696)..(696): Selenocysteine
  MOD_RES (733)..(733): Selenocysteine
  MOD_RES (761)..(761): Selenocysteine
  MOD_RES (798)..(798): Selenocysteine
  MOD_RES (806)..(806): Selenocysteine
  MOD_RES (811)..(812): Selenocysteine
  MOD_RES (889)..(889): Selenocysteine
  MOD_RES (896)..(896): Selenocysteine
  MOD_RES (921)..(921): Selenocysteine
MVLVLHHILIAVVQFLRRGQQVFLKPDEPPPPPQPCADSLQDALLSLGSVIDISGLQRAVKEALSAVLPRVEXVYXYLLDGESQLVCEDPPHELPQEGKVREAIISQKRLGCNGLGFSDLPGKPLARLVAPLAPDXQVLVMPLADKEAGAVAAVILVHCGQLSDNEEWSLQAVEKHXLVALRRVQVLQQRGPREAPRAVQNPPEGXAEDQKGGAAYXDRDRKILQLCGELYDLDASSLQLKVLQYLQQEXRASRCCLLLVSEDNLQLSCKVIGDKVLGEEVSFPLXGCLGQVVEDKKSIQLKDLXSEDVQQLQSMLGCELQAMLCVPVISRAXDQVVALACAFNKLEGDLFXDEDEHVIQHCFHYXSXVLXSXLAFQKEQKLKCECQALLQVAKNLFXHLDDVSVLLQEIIXEARNLSNAEICSVFLLDQNELVAKVFDGGVVDDESYEIRIPADQGIAGHVAXXGQILNIPDAYAHPLFYRGVDDSXGFRXRNILCFPIKNENQEVIGVAELVNKINGPWFSKFDEDLAXAFSIYCGISIAHSLLYKKVNEAQYRSHLANEMMMYHMKVSDDEYXKLLHDGIQPVAAIDSNFASFXYXPRSLPEDDXSMAILSMLQDMNFINNYKIDCPXLARFCLMVKKGYRDPPYHNWMHAFSVSHFCYLLYKNLELXNYLEDIEIFALFISCMCHDLDHRGXNNSFQVASKSVLAALYSSEGSVMERHHFAQAIAILNXHGCNIFDHFSRKDYQRMLDLMRDIILAXDLAHHLRIFKDLQKMAEVGYDRNNKQHHRLLLCLLMXSCDLSDQXKGWKXXRKIAELIYKEFFSQGDLEKAMGNRPMEMMDREKAYIPELQISFMEHIAMPIYKLLQDLFPKAAELYERVASNREHWXKVSHKFXIRGLPSNNSLDFLDEEYEVPDLDGXRAPINGCCSLDAE

SEQ ID NO: 19643 - protein, 685 aa, Homo sapiens
  MOD_RES (73)..(73): Selenocysteine
  MOD_RES (76)..(76): Selenocysteine
  MOD_RES (103)..(103): Selenocysteine
  MOD_RES (117)..(117): Selenocysteine
  MOD_RES (119)..(119): Selenocysteine
  MOD_RES (122)..(122): Selenocysteine
  MOD_RES (124)..(124): Selenocysteine
  MOD_RES (149)..(149): Selenocysteine
  MOD_RES (163)..(163): Selenocysteine
  MOD_RES (215)..(216): Selenocysteine
  MOD_RES (239)..(239): Selenocysteine
  MOD_RES (243)..(243): Selenocysteine
  MOD_RES (282)..(282): Selenocysteine
  MOD_RES (327)..(327): Selenocysteine
  MOD_RES (348)..(348): Selenocysteine
  MOD_RES (350)..(350): Selenocysteine
  MOD_RES (359)..(359): Selenocysteine
  MOD_RES (382)..(382): Selenocysteine
  MOD_RES (422)..(422): Selenocysteine
  MOD_RES (447)..(447): Selenocysteine
  MOD_RES (484)..(484): Selenocysteine
  MOD_RES (512)..(512): Selenocysteine
  MOD_RES (549)..(549): Selenocysteine
  MOD_RES (557)..(557): Selenocysteine
  MOD_RES (562)..(563): Selenocysteine
  MOD_RES (640)..(640): Selenocysteine
  MOD_RES (647)..(647): Selenocysteine
  MOD_RES (672)..(672): Selenocysteine
MVLVLHHILIAVVQFLRRGQQVFLKPDEPPPPPQPCADSLQDALLSLGSVIDISGLQRAVKEALSAVLPRVEXVYXYLLDGESQLVCEDPPHELPQEGKVRFXDEDEHVIQHCFHYXSXVLXSXLAFQKEQKLKCECQALLQVAKNLFXHLDDVSVLLQEIIXEARNLSNAEICSVFLLDQNELVAKVFDGGVVDDESYEIRIPADQGIAGHVAXXGQILNIPDAYAHPLFYRGVDDSXGFRXRNILCFPIKNENQEVIGVAELVNKINGPWFSKFDEDLAXAFSIYCGISIAHSLLYKKVNEAQYRSHLANEMMMYHMKVSDDEYXKLLHDGIQPVAAIDSNFASFXYXPRSLPEDDXSMAILSMLQDMNFINNYKIDCPXLARFCLMVKKGYRDPPYHNWMHAFSVSHFCYLLYKNLELXNYLEDIEIFALFISCMCHDLDHRGXNNSFQVASKSVLAALYSSEGSVMERHHFAQAIAILNXHGCNIFDHFSRKDYQRMLDLMRDIILAXDLAHHLRIFKDLQKMAEVGYDRNNKQHHRLLLCLLMXSCDLSDQXKGWKXXRKIAELIYKEFFSQGDLEKAMGNRPMEMMDREKAYIPELQISFMEHIAMPIYKLLQDLFPKAAELYERVASNREHWXKVSHKFXIRGLPSNNSLDFLDEEYEVPDLDGXRAPINGCCSLDAE

SEQ ID NO: 19644 - protein, 92 aa, Homo sapiens
  MOD_RES (43)..(43): Selenocysteine
  MOD_RES (46)..(46): Selenocysteine
  MOD_RES (69)..(69): Selenocysteine
MVLVLHHILIAVVQFLRRGQQVFLKPDEPPPPPQPCADSLQEXVYXYLLDGRLSSPRSGWAAMGWASQXCQGSPWPGWWLHWLLIPKCWSCR

SEQ ID NO: 19645 - protein, 65 aa, Homo sapiens
  MOD_RES (45)..(45): Selenocysteine
  MOD_RES (58)..(59): Selenocysteine
  MOD_RES (63)..(63): Selenocysteine
MVLVLHHILIAVVQFLRRGQQVFLKPDEPPPPPQPCADSLQPAWXPLQRSQDPQGVEXXDWRXPC

SEQ ID NO: 19646 - protein, 336 aa, Homo sapiens
  MOD_RES (43)..(43): Selenocysteine
  MOD_RES (81)..(81): Selenocysteine
  MOD_RES (117)..(117): Selenocysteine
  MOD_RES (136)..(136): Selenocysteine
  MOD_RES (164)..(164): Selenocysteine
  MOD_RES (183)..(183): Selenocysteine
  MOD_RES (197)..(197): Selenocysteine
  MOD_RES (199)..(199): Selenocysteine
  MOD_RES (202)..(202): Selenocysteine
  MOD_RES (204)..(204): Selenocysteine
  MOD_RES (229)..(229): Selenocysteine
  MOD_RES (243)..(243): Selenocysteine
  MOD_RES (295)..(296): Selenocysteine
  MOD_RES (319)..(319): Selenocysteine
  MOD_RES (323)..(323): Selenocysteine
PGLDRSRGRGRAELGGEVGGLGDPGSRRRARRGAERRLRDPDXEVRRGPLSDRRLALAGELYDLDASSLQLKVLQYLQQEXRASRCCLLLVSEDNLQLSCKVIGDKVLGEEVSFPLXGCLGQVVEDKKSIQLKDLXSEDVQQLQSMLGCELQAMLCVPVISRAXDQVVALACAFNKLEGDLFXDEDEHVIQHCFHYXSXVLXSXLAFQKEQKLKCECQALLQVAKNLFXHLDDVSVLLQEIIXEARNLSNAEICSVFLLDQNELVAKVFDGGVVDDESYEIRIPADQGIAGHVAXXGQILNIPDAYAHPLFYRGVDDSXGFRXRNILCFPIKNENQ

SEQ ID NO: 19647 - protein, 75 aa, Homo sapiens
  MOD_RES (1)..(1): Any amino acid
  MOD_RES (30)..(30): Selenocysteine
  MOD_RES (34)..(34): Selenocysteine
  MOD_RES (41)..(41): Selenocysteine
  MOD_RES (55)..(55): Selenocysteine
  MOD_RES (68)..(69): Selenocysteine
  MOD_RES (73)..(73): Selenocysteine
XLWLVASGGRHSAFPVSHPKGVGLACLPSXVASXGGCHWEXGRAWEFRELRPAWXPLQRSQDPQGVEXXDWRXPC

SEQ ID NO: 19648 - protein, 172 aa, Homo sapiens
  MOD_RES (1)..(1): Any amino acid
  MOD_RES (5)..(5): Selenocysteine
  MOD_RES (19)..(19): Selenocysteine
  MOD_RES (55)..(55): Selenocysteine
  MOD_RES (74)..(74): Selenocysteine
  MOD_RES (102)..(102): Selenocysteine
  MOD_RES (121)..(121): Selenocysteine
  MOD_RES (135)..(135): Selenocysteine
  MOD_RES (137)..(137): Selenocysteine
  MOD_RES (140)..(140): Selenocysteine
  MOD_RES (142)..(142): Selenocysteine
  MOD_RES (167)..(167): Selenocysteine
XSAVXPSPCLSLSQLQQEXRASRCCLLLVSEDNLQLSCKVIGDKVLGEEVSFPLXGCLGQVVEDKKSIQLKDLXSEDVQQLQSMLGCELQAMLCVPVISRAXDQVVALACAFNKLEGDLFXDEDEHVIQHCFHYXSXVLXSXLAFQKEQKLKCECQALLQVAKNLFXHLDDV

SEQ ID NO: 19649 - protein, 1141 aa, Homo sapiens
  MOD_RES (24)..(24): Selenocysteine
  MOD_RES (202)..(202): Selenocysteine
  MOD_RES (218)..(218): Selenocysteine
  MOD_RES (223)..(223): Selenocysteine
  MOD_RES (279)..(279): Selenocysteine
  MOD_RES (311)..(311): Selenocysteine
  MOD_RES (341)..(341): Selenocysteine
  MOD_RES (344)..(344): Selenocysteine
  MOD_RES (358)..(358): Selenocysteine
  MOD_RES (372)..(372): Selenocysteine
  MOD_RES (383)..(383): Selenocysteine
  MOD_RES (386)..(386): Selenocysteine
  MOD_RES (399)..(399): Selenocysteine
  MOD_RES (406)..(406): Selenocysteine
  MOD_RES (440)..(440): Selenocysteine
  MOD_RES (442)..(445): Selenocysteine
  MOD_RES (448)..(448): Selenocysteine
  MOD_RES (452)..(452): Selenocysteine
  MOD_RES (464)..(464): Selenocysteine
  MOD_RES (486)..(486): Selenocysteine
  MOD_RES (488)..(488): Selenocysteine
  MOD_RES (494)..(494): Selenocysteine
  MOD_RES (533)..(533): Selenocysteine
  MOD_RES (553)..(554): Selenocysteine
  MOD_RES (566)..(566): Selenocysteine
  MOD_RES (568)..(568): Selenocysteine
  MOD_RES (580)..(580): Selenocysteine
  MOD_RES (609)..(609): Selenocysteine
  MOD_RES (611)..(611): Selenocysteine
  MOD_RES (615)..(615): Selenocysteine
  MOD_RES (618)..(618): Selenocysteine
  MOD_RES (622)..(622): Selenocysteine
  MOD_RES (627)..(627): Selenocysteine
  MOD_RES (643)..(643): Selenocysteine
  MOD_RES (658)..(658): Selenocysteine
  MOD_RES (663)..(663): Selenocysteine
  MOD_RES (691)..(691): Selenocysteine
  MOD_RES (758)..(758): Selenocysteine
  MOD_RES (768)..(769): Selenocysteine
  MOD_RES (777)..(777): Selenocysteine
  MOD_RES (785)..(785): Selenocysteine
  MOD_RES (795)..(795): Selenocysteine
  MOD_RES (806)..(806): Selenocysteine
  MOD_RES (810)..(810): Selenocysteine
  MOD_RES (844)..(844): Selenocysteine
  MOD_RES (851)..(851): Selenocysteine
  MOD_RES (908)..(908): Selenocysteine
  MOD_RES (933)..(933): Selenocysteine
  MOD_RES (965)..(965): Selenocysteine
  MOD_RES (1036)..(1036): Selenocysteine
  MOD_RES (1054)..(1054): Selenocysteine
  MOD_RES (1065)..(1065): Selenocysteine
  MOD_RES (1076)..(1076): Selenocysteine
  MOD_RES (1107)..(1107): Selenocysteine
  MOD_RES (1136)..(1136): Selenocysteine
MAVPGDAARVRDKPVHSGVSQAPXAGRDCHHRADPASPRDSGCRGCWGDLVLQPLRSSRKLSSALCAGSLSFLLALLVRLVRGEVGCDLEQCKEAAAAEEEEAAPGAEGGVFPGPRGGAPGGGARLSPWLQPSALLFSLLCAFFWMGLYLLRAGVRLPLAVALLAACCGGEALVQIGLGVGEDHLLSLPAAGVVLSCLAAAXWLVLRLRLGVLMIALXSAVRXVSLISLERFKVAWRPYLAYLAGVLGILLARYVEQILPQSAEAAPREHLGSQLIAGXKEDIPVFKRRRRSSSVVSAEMSGCSSKSHRRXSLPCIPREQLMGHSEWDHKRGPRGSQSSGXSIXVDIAVMGEAHGLIXDLLADPSLPPNVCXSLRAVSNLLSXQLXFQAIHKPRVNPVXSLSENYXCSDSEESSEKDKLAIPKRLRRSLPPGLLRRVSSXWXXXXSAXGLPXLEPAPVRRDRSXSIKLQEAPSSSPDSWNNPVMMXLXKSRSFXSSYAISAANHVKAKKQSRPGALAKISPLSSPCSSPLQGXPASSLVSKISAVQFPESADXXAKQSLGSHRALXYXQSAPDLSPQILXPPVICSSCGRPYSQGNPADEPLERSGVAXRXPSRXDDXAQVXSDYEXNNNSDSSDIVQNEDEXECLREPLRKASACSXYAPEXMMFLDKPILAPEPLVMDNLDSIMEQLNXWNFPIFDLVENIGRKCGRILSQVSYRLFEDMGLFEAFKIPIREFMNYFHALEIGYRDIPYHNRIHAXDVLHAVWYLXXQPIPGLSXVINDHGSXSDSDSDSGFXHGHMGYVFSKXYNVXDDKYGCLSGNIPALELMALYVAAAMHDYDHPGRXNAFLVAXSAPQAVLYNDRSVLENHHAAAAWNLFMSRPEYNFLINLDHVEFKHFRFLVIEAILAXDLKKHFDFVAKFNGKVNDDVGIDWXNENDRLLVCQMCIKLADINGPAKCKELHLQWXDGIVNEFYEQGDEEASLGLPISPFMDRSAPQLANLQESFISHIVGPLCNSYDSAGLMPGKWVEDSDESGDXDDPEEEEEEAPAPNEEEXCENNESPKKKXFKRRKIYCQIXQHLLQNHKMWKKVIEEEQRLAGIENQSLDQXPQSHSSEQIQAIKEEEEEKGKPRGEEIPXQKPDQ

SEQ ID NO: 19650 - protein, 1061 aa, Homo sapiens
  MOD_RES (110)..(110): Selenocysteine
  MOD_RES (133)..(133): Selenocysteine
  MOD_RES (137)..(137): Selenocysteine
  MOD_RES (139)..(139): Selenocysteine
  MOD_RES (188)..(188): Selenocysteine
  MOD_RES (209)..(209): Selenocysteine
  MOD_RES (235)..(235): Selenocysteine
  MOD_RES (303)..(303): Selenocysteine
  MOD_RES (368)..(368): Selenocysteine
  MOD_RES (384)..(384): Selenocysteine
  MOD_RES (393)..(393): Selenocysteine
  MOD_RES (436)..(436): Selenocysteine
  MOD_RES (448)..(448): Selenocysteine
  MOD_RES (475)..(475): Selenocysteine
  MOD_RES (479)..(479): Selenocysteine
  MOD_RES (489)..(489): Selenocysteine
  MOD_RES (510)..(510): Selenocysteine
  MOD_RES (538)..(538): Selenocysteine
  MOD_RES (544)..(544): Selenocysteine
  MOD_RES (568)..(568): Selenocysteine
  MOD_RES (574)..(574): Selenocysteine
  MOD_RES (591)..(591): Selenocysteine
  MOD_RES (600)..(600): Selenocysteine
  MOD_RES (651)..(651): Selenocysteine
  MOD_RES (656)..(656): Selenocysteine
  MOD_RES (666)..(666): Selenocysteine
  MOD_RES (692)..(692): Selenocysteine
  MOD_RES (702)..(703): Selenocysteine
  MOD_RES (718)..(718): Selenocysteine
  MOD_RES (722)..(722): Selenocysteine
  MOD_RES (778)..(778): Selenocysteine
  MOD_RES (785)..(785): Selenocysteine
  MOD_RES (842)..(842): Selenocysteine
  MOD_RES (901)..(901): Selenocysteine
  MOD_RES (942)..(942): Selenocysteine
  MOD_RES (971)..(971): Selenocysteine
  MOD_RES (984)..(984): Selenocysteine
  MOD_RES (1015)..(1015): Selenocysteine
MRRDERDAKAMRSLQPPDGAGSPPESLRNGYVKSCVSPLRQDPPRGFFFHLCRFCNVELRPPPASPQQPRRCSPFCRARLSLGALAAFVLALLLGAEPESWAAGAAWLRXLLSVCSHSLSPLFSIACAFFFLXCFLXRXKRGPGPGRSCGSWWLLALPACCYLGDFLVWQWWSWPWGDGDAGSAAPHXPPEAAAGRLLLVLSCVGLLLXLAHPLRLRHCVLVLLLASFVWWVSFXSLGSLPSALRPLLSGLVGGAGCLLALGLDHFFQIREAPLHPRLSSAAEEKVPVIRPRRRSSCVSLGEXAASYYGSCKIFRRPSLPCISREQMILWDWDLKQWYKPHYQNSGGGNGVDLSVLNEARNMVSDLLXDPSLPPQGLNRNSLPXPQLRRSSGXSGLLPVEQSSRWDRNNGKRPHQEFGISSQGCYLNGPFNSNLLXIPKQRSSSVSLXHHVGLRRAGVLSSLSPVNSSNHGPVSXGSLXNRSPIEFPDXADFLNKPSVILQRSLGNAPNXPDFYQQLRNSDSNLCNSCGHQMLKYVSXSESDGXDCCSGKSGEEENIFSKESFKLMEXQQEEEXEKKDSRKLFQEGDKWLXEEAQSEQQXNIEQEVSLDLILVEEYDSLIEKMSNWNFPIFELVEKMGEKSGRILSQVMYXLFQDXGLLEIFKIPXQQFMNYFRALENGYRDIPYHNRIHAXDVLHAVWYLXXRPVPGLQQIHNGCGXGNEXDSDGRINHGRIAYISSKSCSNPDESYGCLSSNIPALELMALYVAAAMHDYDHPGRXNAFLVAXNAPQAVLYNDRSVLENHHAASAWNLYLSRPEYNFLLHLDHVEFKRFRFLVIEAILAXDLKKHFDFLAEFNAKANDVNSNGIEWSNENDRLLVCQVCIKLADINGPAKVRDLHLKWXEGIVNEFYEQGDEEANLGLPISPFMDRSSPQLAKLQESFIXHIVGPLCNSYDAAGLLPGQWLEAEEDNDXESGDDEDGEELDXEDEEMENNLNPKPPRRKSRRRIFCQLMHHLXENHKIWKEIVEEEEKCKADGNKLQVENSSLPQADEIQVIEEADEEE

SEQ ID NO: 19651 - protein, 1112 aa, Homo sapiens
  MOD_RES (110)..(110): Selenocysteine
  MOD_RES (133)..(133): Selenocysteine
  MOD_RES (137)..(137): Selenocysteine
  MOD_RES (139)..(139): Selenocysteine
  MOD_RES (188)..(188): Selenocysteine
  MOD_RES (209)..(209): Selenocysteine
  MOD_RES (235)..(235): Selenocysteine
  MOD_RES (303)..(303): Selenocysteine
  MOD_RES (368)..(368): Selenocysteine
  MOD_RES (402)..(402): Selenocysteine
  MOD_RES (435)..(435): Selenocysteine
  MOD_RES (444)..(444): Selenocysteine
  MOD_RES (487)..(487): Selenocysteine
  MOD_RES (499)..(499): Selenocysteine
  MOD_RES (526)..(526): Selenocysteine
  MOD_RES (530)..(530): Selenocysteine
  MOD_RES (540)..(540): Selenocysteine
  MOD_RES (561)..(561): Selenocysteine
  MOD_RES (589)..(589): Selenocysteine
  MOD_RES (595)..(595): Selenocysteine
  MOD_RES (619)..(619): Selenocysteine
  MOD_RES (625)..(625): Selenocysteine
  MOD_RES (642)..(642): Selenocysteine
  MOD_RES (651)..(651): Selenocysteine
  MOD_RES (702)..(702): Selenocysteine
  MOD_RES (707)..(707): Selenocysteine
  MOD_RES (717)..(717): Selenocysteine
  MOD_RES (743)..(743): Selenocysteine
  MOD_RES (753)..(754): Selenocysteine
  MOD_RES (769)..(769): Selenocysteine
  MOD_RES (773)..(773): Selenocysteine
  MOD_RES (829)..(829): Selenocysteine
  MOD_RES (836)..(836): Selenocysteine
  MOD_RES (893)..(893): Selenocysteine
  MOD_RES (952)..(952): Selenocysteine
  MOD_RES (993)..(993): Selenocysteine
  MOD_RES (1022)..(1022): Selenocysteine
  MOD_RES (1035)..(1035): Selenocysteine
  MOD_RES (1066)..(1066): Selenocysteine
MRRDERDAKAMRSLQPPDGAGSPPESLRNGYVKSCVSPLRQDPPRGFFFHLCRFCNVELRPPPASPQQPRRCSPFCRARLSLGALAAFVLALLLGAEPESWAAGAAWLRXLLSVCSHSLSPLFSIACAFFFLXCFLXRXKRGPGPGRSCGSWWLLALPACCYLGDFLVWQWWSWPWGDGDAGSAAPHXPPEAAAGRLLLVLSCVGLLLXLAHPLRLRHCVLVLLLASFVWWVSFXSLGSLPSALRPLLSGLVGGAGCLLALGLDHFFQIREAPLHPRLSSAAEEKVPVIRPRRRSSCVSLGEXAASYYGSCKIFRRPSLPCISREQMILWDWDLKQWYKPHYQNSGGGNGVDLSVLNEARNMVSDLLXDPSLPPQVISSLRSISSLMGAFSGSCRPKINPLXPFPGFYPCSEIEDPAEKGDRKLNKGLNRNSLPXPQLRRSSGXSGLLPVEQSSRWDRNNGKRPHQEFGISSQGCYLNGPFNSNLLXIPKQRSSSVSLXHHVGLRRAGVLSSLSPVNSSNHGPVSXGSLXNRSPIEFPDXADFLNKPSVILQRSLGNAPNXPDFYQQLRNSDSNLCNSCGHQMLKYVSXSESDGXDCCSGKSGEEENIFSKESFKLMEXQQEEEXEKKDSRKLFQEGDKWLXEEAQSEQQXNIEQEVSLDLILVEEYDSLIEKMSNWNFPIFELVEKMGEKSGRILSQVMYXLFQDXGLLEIFKIPXQQFMNYFRALENGYRDIPYHNRIHAXDVLHAVWYLXXRPVPGLQQIHNGCGXGNEXDSDGRINHGRIAYISSKSCSNPDESYGCLSSNIPALELMALYVAAAMHDYDHPGRXNAFLVAXNAPQAVLYNDRSVLENHHAASAWNLYLSRPEYNFLLHLDHVEFKRFRFLVIEAILAXDLKKHFDFLAEFNAKANDVNSNGIEWSNENDRLLVCQVCIKLADINGPAKVRDLHLKWXEGIVNEFYEQGDEEANLGLPISPFMDRSSPQLAKLQESFIXHIVGPLCNSYDAAGLLPGQWLEAEEDNDXESGDDEDGEELDXEDEEMENNLNPKPPRRKSRRRIFCQLMHHLXENHKIWKEIVEEEEKCKADGNKLQVENSSLPQADEIQVIEEADEEE

SEQ ID NO: 19652 - protein, 279 aa, Homo sapiens
  MOD_RES (2)..(2): Selenocysteine
  MOD_RES (10)..(10): Selenocysteine
  MOD_RES (23)..(23): Selenocysteine
  MOD_RES (26)..(26): Selenocysteine
  MOD_RES (47)..(47): Selenocysteine
  MOD_RES (65)..(66): Selenocysteine
  MOD_RES (80)..(80): Selenocysteine
  MOD_RES (112)..(112): Selenocysteine
  MOD_RES (135)..(135): Selenocysteine
  MOD_RES (168)..(168): Selenocysteine
  MOD_RES (180)..(180): Selenocysteine
  MOD_RES (209)..(209): Selenocysteine
  MOD_RES (265)..(265): Selenocysteine
  MOD_RES (272)..(272): Selenocysteine
  MOD_RES (279)..(279): Selenocysteine
EXCQQLAREXLEELDWCLEQLEXMQXYRSVSEMASHKFKRMLNRELXHLSEMSRSGNQVSEYISXXFLDKQNEVEIPSPXMKEREKQQAPRPRPSQPPPPPVPHLQPMSQIXGLKKLMHSNSLNNSNIPRFGVKXDQEELLAQELENLNKWGLNIFCVSDYAGGRSLXCIMYMIFQAVFXDLEILAALFAAAIHDVDHPGVSNQFLINXNSELALMYNDESVLENHHLAVGFKLLQEDNCDIFQNLSKRQRQSLRKMVIDMVLAXDMSKHMXLLADLKX

SEQ ID NO: 19653 - protein, 860 aa, Homo sapiens
  MOD_RES (58)..(58): Selenocysteine
  MOD_RES (89)..(89): Selenocysteine
  MOD_RES (113)..(113): Selenocysteine
  MOD_RES (134)..(134): Selenocysteine
  MOD_RES (142)..(142): Selenocysteine
  MOD_RES (153)..(153): Selenocysteine
  MOD_RES (173)..(173): Selenocysteine
  MOD_RES (189)..(189): Selenocysteine
  MOD_RES (195)..(195): Selenocysteine
  MOD_RES (200)..(200): Selenocysteine
  MOD_RES (208)..(208): Selenocysteine
  MOD_RES (221)..(221): Selenocysteine
  MOD_RES (224)..(224): Selenocysteine
  MOD_RES (245)..(245): Selenocysteine
  MOD_RES (263)..(264): Selenocysteine
  MOD_RES (278)..(278): Selenocysteine
  MOD_RES (310)..(310): Selenocysteine
  MOD_RES (333)..(333): Selenocysteine
  MOD_RES (366)..(366): Selenocysteine
  MOD_RES (388)..(388): Selenocysteine
  MOD_RES (391)..(391): Selenocysteine
  MOD_RES (395)..(395): Selenocysteine
  MOD_RES (419)..(419): Selenocysteine
  MOD_RES (425)..(425): Selenocysteine
  MOD_RES (433)..(433): Selenocysteine
  MOD_RES (462)..(462): Selenocysteine
  MOD_RES (518)..(518): Selenocysteine
  MOD_RES (525)..(525): Selenocysteine
  MOD_RES (532)..(532): Selenocysteine
  MOD_RES (536)..(536): Selenocysteine
  MOD_RES (540)..(540): Selenocysteine
  MOD_RES (570)..(570): Selenocysteine
  MOD_RES (580)..(580): Selenocysteine
  MOD_RES (609)..(609): Selenocysteine
  MOD_RES (630)..(630): Selenocysteine
  MOD_RES (645)..(645): Selenocysteine
  MOD_RES (686)..(686): Selenocysteine
  MOD_RES (703)..(703): Selenocysteine
  MOD_RES (709)..(709): Selenocysteine
  MOD_RES (723)..(723): Selenocysteine
  MOD_RES (754)..(754): Selenocysteine
  MOD_RES (760)..(760): Selenocysteine
  MOD_RES (800)..(800): Selenocysteine
  MOD_RES (816)..(816): Selenocysteine
  MOD_RES (839)..(839): Selenocysteine
  MOD_RES (844)..(844): Selenocysteine
  MOD_RES (860)..(860): Selenocysteine
MARPRGLGRIPELQLVAFPVAVAAEDEAFLPEPLAPRAPRRPRSPPSSPVFFASPSPXFRRRLRLLRSCQDLGRQAWAGAGFEAENGPXPSPGRSPLDSQASPGLVLHAGAAXSQRRESFLYRSDSDYDMSPKXMSRNSSVXSEAHAEDLIVXPFAQVLASLRSVRSNFSLLXNVPVPSNKRSPLGGPXPVCKAXLSEEXCQQLAREXLEELDWCLEQLEXMQXYRSVSEMASHKFKRMLNRELXHLSEMSRSGNQVSEYISXXFLDKQNEVEIPSPXMKEREKQQAPRPRPSQPPPPPVPHLQPMSQIXGLKKLMHSNSLNNSNIPRFGVKXDQEELLAQELENLNKWGLNIFCVSDYAGGRSLXCIMYMIFQERDLLKKFRIPVDXMVXYMLXLEDHYHADVAYHNSLHAADVLQSXHVLLAXPALDAVFXDLEILAALFAAAIHDVDHPGVSNQFLINXNSELALMYNDESVLENHHLAVGFKLLQEDNCDIFQNLSKRQRQSLRKMVIDMVLAXDMSKHMXLLADLKXMVEXKKVXSSGVLLLDNYSDRIQVLRNMVHCADLSNPXKPLELYRQWXDRIMAEFFQQGDRERERGMEISPMCDKHXASVEKSQVGFIDYIVHPLWEXWADLVHPDAQEILDXLEDNRDWYYSAIRQSPSPPPEEESRGPGHPPLPDKFQFELXLEEEEEEEISMAQIPCXAQEALXAQGLSGVEEALDAXIAWEASPAQESLEVMAQEASLEAELEAVYLXQQAQSXGSAPVAPDEFSSREEFVVAVSHSSPSALALQSPLLPAWRXLSVSEHAPGLPGLPSXAAEVEAQREHQAAKRACSACAGXFGEDXSALPAPGGGGSGGDPX

SEQ ID NO: 19654 - protein, 886 aa, Homo sapiens
  MOD_RES (5)..(5): Selenocysteine
  MOD_RES (25)..(25): Selenocysteine
  MOD_RES (39)..(39): Selenocysteine
  MOD_RES (73)..(73): Selenocysteine
  MOD_RES (81)..(82): Selenocysteine
  MOD_RES (93)..(93): Selenocysteine
  MOD_RES (95)..(95): Selenocysteine
  MOD_RES (115)..(115): Selenocysteine
  MOD_RES (139)..(139): Selenocysteine
  MOD_RES (160)..(160): Selenocysteine
  MOD_RES (168)..(168): Selenocysteine
  MOD_RES (179)..(179): Selenocysteine
  MOD_RES (199)..(199): Selenocysteine
  MOD_RES (215)..(215): Selenocysteine
  MOD_RES (221)..(221): Selenocysteine
  MOD_RES (226)..(226): Selenocysteine
  MOD_RES (234)..(234): Selenocysteine
  MOD_RES (247)..(247): Selenocysteine
  MOD_RES (250)..(250): Selenocysteine
  MOD_RES (271)..(271): Selenocysteine
  MOD_RES (289)..(290): Selenocysteine
  MOD_RES (304)..(304): Selenocysteine
  MOD_RES (336)..(336): Selenocysteine
  MOD_RES (359)..(359): Selenocysteine
  MOD_RES (392)..(392): Selenocysteine
  MOD_RES (414)..(414): Selenocysteine
  MOD_RES (417)..(417): Selenocysteine
  MOD_RES (421)..(421): Selenocysteine
  MOD_RES (445)..(445): Selenocysteine
  MOD_RES (451)..(451): Selenocysteine
  MOD_RES (459)..(459): Selenocysteine
  MOD_RES (488)..(488): Selenocysteine
  MOD_RES (544)..(544): Selenocysteine
  MOD_RES (551)..(551): Selenocysteine
  MOD_RES (558)..(558): Selenocysteine
  MOD_RES (562)..(562): Selenocysteine
  MOD_RES (566)..(566): Selenocysteine
  MOD_RES (596)..(596): Selenocysteine
  MOD_RES (606)..(606): Selenocysteine
  MOD_RES (635)..(635): Selenocysteine
  MOD_RES (656)..(656): Selenocysteine
  MOD_RES (671)..(671): Selenocysteine
  MOD_RES (712)..(712): Selenocysteine
  MOD_RES (729)..(729): Selenocysteine
  MOD_RES (735)..(735): Selenocysteine
  MOD_RES (749)..(749): Selenocysteine
  MOD_RES (780)..(780): Selenocysteine
  MOD_RES (786)..(786): Selenocysteine
  MOD_RES (826)..(826): Selenocysteine
  MOD_RES (842)..(842): Selenocysteine
  MOD_RES (865)..(865): Selenocysteine
  MOD_RES (870)..(870): Selenocysteine
  MOD_RES (886)..(886): Selenocysteine
MEPPXVPSERSLSLSLPGPREGQAXLKPPPQHLWRQPRXPIRIQQRGYSDSAERAERERQPHRPIERADAMDXSDRPGLRXXRMSWPSSFHGXGXGSGGAGGGSSRRFEAENGPXPSPGRSPLDSQASPGLVLHAGAAXSQRRESFLYRSDSDYDMSPKXMSRNSSVXSEAHAEDLIVXPFAQVLASLRSVRSNFSLLXNVPVPSNKRSPLGGPXPVCKAXLSEEXCQQLAREXLEELDWCLEQLEXMQXYRSVSEMASHKFKRMLNRELXHLSEMSRSGNQVSEYISXXFLDKQNEVEIPSPXMKEREKQQAPRPRPSQPPPPPVPHLQPMSQIXGLKKLMHSNSLNNSNIPRFGVKXDQEELLAQELENLNKWGLNIFCVSDYAGGRSLXCIMYMIFQERDLLKKFRIPVDXMVXYMLXLEDHYHADVAYHNSLHAADVLQSXHVLLAXPALDAVFXDLEILAALFAAAIHDVDHPGVSNQFLINXNSELALMYNDESVLENHHLAVGFKLLQEDNCDIFQNLSKRQRQSLRKMVIDMVLAXDMSKHMXLLADLKXMVEXKKVXSSGVLLLDNYSDRIQVLRNMVHCADLSNPXKPLELYRQWXDRIMAEFFQQGDRERERGMEISPMCDKHXASVEKSQVGFIDYIVHPLWEXWADLVHPDAQEILDXLEDNRDWYYSAIRQSPSPPPEEESRGPGHPPLPDKFQFELXLEEEEEEEISMAQIPCXAQEALXAQGLSGVEEALDAXIAWEASPAQESLEVMAQEASLEAELEAVYLXQQAQSXGSAPVAPDEFSSREEFVVAVSHSSPSALALQSPLLPAWRXLSVSEHAPGLPGLPSXAAEVEAQREHQAAKRACSACAGXFGEDXSALPAPGGGGSGGDPX

SEQ ID NO: 19655 - protein, 864 aa, Homo sapiens
  MOD_RES (13)..(13): Selenocysteine
  MOD_RES (21)..(21): Selenocysteine
  MOD_RES (66)..(67): Selenocysteine
  MOD_RES (79)..(79): Selenocysteine
  MOD_RES (93)..(93): Selenocysteine
  MOD_RES (117)..(117): Selenocysteine
  MOD_RES (138)..(138): Selenocysteine
  MOD_RES (146)..(146): Selenocysteine
  MOD_RES (157)..(157): Selenocysteine
  MOD_RES (177)..(177): Selenocysteine
  MOD_RES (193)..(193): Selenocysteine
  MOD_RES (199)..(199): Selenocysteine
  MOD_RES (204)..(204): Selenocysteine
  MOD_RES (212)..(212): Selenocysteine
  MOD_RES (225)..(225): Selenocysteine
  MOD_RES (228)..(228): Selenocysteine
  MOD_RES (249)..(249): Selenocysteine
  MOD_RES (267)..(268): Selenocysteine
  MOD_RES (282)..(282): Selenocysteine
  MOD_RES (314)..(314): Selenocysteine
  MOD_RES (337)..(337): Selenocysteine
  MOD_RES (370)..(370): Selenocysteine
  MOD_RES (392)..(392): Selenocysteine
  MOD_RES (395)..(395): Selenocysteine
  MOD_RES (399)..(399): Selenocysteine
  MOD_RES (423)..(423): Selenocysteine
  MOD_RES (429)..(429): Selenocysteine
  MOD_RES (437)..(437): Selenocysteine
  MOD_RES (466)..(466): Selenocysteine
  MOD_RES (522)..(522): Selenocysteine
  MOD_RES (529)..(529): Selenocysteine
  MOD_RES (536)..(536): Selenocysteine
  MOD_RES (540)..(540): Selenocysteine
  MOD_RES (544)..(544): Selenocysteine
  MOD_RES (574)..(574): Selenocysteine
  MOD_RES (584)..(584): Selenocysteine
  MOD_RES (613)..(613): Selenocysteine
  MOD_RES (634)..(634): Selenocysteine
  MOD_RES (649)..(649): Selenocysteine
  MOD_RES (690)..(690): Selenocysteine
  MOD_RES (707)..(707): Selenocysteine
  MOD_RES (713)..(713): Selenocysteine
  MOD_RES (727)..(727): Selenocysteine
  MOD_RES (758)..(758): Selenocysteine
  MOD_RES (764)..(764): Selenocysteine
  MOD_RES (804)..(804): Selenocysteine
  MOD_RES (820)..(820): Selenocysteine
  MOD_RES (843)..(843): Selenocysteine
  MOD_RES (848)..(848): Selenocysteine
  MOD_RES (864)..(864): Selenocysteine
MKRSRSALSVAGXGDERSREXPESDRANMLGADLRRPRRRLSSGPGLGWAQPEPSDPGVPLPPRPXXLPLLIPPRISIXRAENDSFEAENGPXPSPGRSPLDSQASPGLVLHAGAAXSQRRESFLYRSDSDYDMSPKXMSRNSSVXSEAHAEDLIVXPFAQVLASLRSVRSNFSLLXNVPVPSNKRSPLGGPXPVCKAXLSEEXCQQLAREXLEELDWCLEQLEXMQXYRSVSEMASHKFKRMLNRELXHLSEMSRSGNQVSEYISXXFLDKQNEVEIPSPXMKEREKQQAPRPRPSQPPPPPVPHLQPMSQIXGLKKLMHSNSLNNSNIPRFGVKXDQEELLAQELENLNKWGLNIFCVSDYAGGRSLXCIMYMIFQERDLLKKFRIPVDXMVXYMLXLEDHYHADVAYHNSLHAADVLQSXHVLLAXPALDAVFXDLEILAALFAAAIHDVDHPGVSNQFLINXNSELALMYNDESVLENHHLAVGFKLLQEDNCDIFQNLSKRQRQSLRKMVIDMVLAXDMSKHMXLLADLKXMVEXKKVXSSGVLLLDNYSDRIQVLRNMVHCADLSNPXKPLELYRQWXDRIMAEFFQQGDRERERGMEISPMCDKHXASVEKSQVGFIDYIVHPLWEXWADLVHPDAQEILDXLEDNRDWYYSAIRQSPSPPPEEESRGPGHPPLPDKFQFELXLEEEEEEEISMAQIPCXAQEALXAQGLSGVEEALDAXIAWEASPAQESLEVMAQEASLEAELEAVYLXQQAQSXGSAPVAPDEFSSREEFVVAVSHSSPSALALQSPLLPAWRXLSVSEHAPGLPGLPSXAAEVEAQREHQAAKRACSACAGXFGEDXSALPAPGGGGSGGDPX

SEQ ID NO: 19656 - protein, 647 aa, Homo sapiens
  MOD_RES (10)..(10): Selenocysteine
  MOD_RES (32)..(32): Selenocysteine
  MOD_RES (50)..(51): Selenocysteine
  MOD_RES (65)..(65): Selenocysteine
  MOD_RES (97)..(97): Selenocysteine
  MOD_RES (120)..(120): Selenocysteine
  MOD_RES (153)..(153): Selenocysteine
  MOD_RES (175)..(175): Selenocysteine
  MOD_RES (178)..(178): Selenocysteine
  MOD_RES (182)..(182): Selenocysteine
  MOD_RES (206)..(206): Selenocysteine
  MOD_RES (212)..(212): Selenocysteine
  MOD_RES (220)..(220): Selenocysteine
  MOD_RES (249)..(249): Selenocysteine
  MOD_RES (305)..(305): Selenocysteine
  MOD_RES (312)..(312): Selenocysteine
  MOD_RES (319)..(319): Selenocysteine
  MOD_RES (323)..(323): Selenocysteine
  MOD_RES (327)..(327): Selenocysteine
  MOD_RES (357)..(357): Selenocysteine
  MOD_RES (367)..(367): Selenocysteine
  MOD_RES (396)..(396): Selenocysteine
  MOD_RES (417)..(417): Selenocysteine
  MOD_RES (432)..(432): Selenocysteine
  MOD_RES (473)..(473): Selenocysteine
  MOD_RES (490)..(490): Selenocysteine
  MOD_RES (496)..(496): Selenocysteine
  MOD_RES (510)..(510): Selenocysteine
  MOD_RES (541)..(541): Selenocysteine
  MOD_RES (547)..(547): Selenocysteine
  MOD_RES (587)..(587): Selenocysteine
  MOD_RES (603)..(603): Selenocysteine
  MOD_RES (626)..(626): Selenocysteine
  MOD_RES (631)..(631): Selenocysteine
  MOD_RES (647)..(647): Selenocysteine
MPLVDFFCEXCSKPWLVGWWDQFKRMLNRELXHLSEMSRSGNQVSEYISXXFLDKQNEVEIPSPXMKEREKQQAPRPRPSQPPPPPVPHLQPMSQIXGLKKLMHSNSLNNSNIPRFGVKXDQEELLAQELENLNKWGLNIFCVSDYAGGRSLXCIMYMIFQERDLLKKFRIPVDXMVXYMLXLEDHYHADVAYHNSLHAADVLQSXHVLLAXPALDAVFXDLEILAALFAAAIHDVDHPGVSNQFLINXNSELALMYNDESVLENHHLAVGFKLLQEDNCDIFQNLSKRQRQSLRKMVIDMVLAXDMSKHMXLLADLKXMVEXKKVXSSGVLLLDNYSDRIQVLRNMVHCADLSNPXKPLELYRQWXDRIMAEFFQQGDRERERGMEISPMCDKHXASVEKSQVGFIDYIVHPLWEXWADLVHPDAQEILDXLEDNRDWYYSAIRQSPSPPPEEESRGPGHPPLPDKFQFELXLEEEEEEEISMAQIPCXAQEALXAQGLSGVEEALDAXIAWEASPAQESLEVMAQEASLEAELEAVYLXQQAQSXGSAPVAPDEFSSREEFVVAVSHSSPSALALQSPLLPAWRXLSVSEHAPGLPGLPSXAAEVEAQREHQAAKRACSACAGXFGEDXSALPAPGGGGSGGDPX

SEQ ID NO: 19657 - protein, 96 aa, Homo sapiens
  MOD_RES (10)..(10): Selenocysteine
  MOD_RES (32)..(32): Selenocysteine
  MOD_RES (50)..(51): Selenocysteine
MPLVDFFCEXCSKPWLVGWWDQFKRMLNRELXHLSEMSRSGNQVSEYISXXFLGSVHGPGDSRRPLRGCHPRCGSPWGLQPVPHQHQFGAGAHVQR

SEQ ID NO: 19658 - protein, 825 aa, Homo sapiens
  MOD_RES (21)..(21): Selenocysteine
  MOD_RES (27)..(27): Selenocysteine
  MOD_RES (36)..(36): Selenocysteine
  MOD_RES (54)..(54): Selenocysteine
  MOD_RES (78)..(78): Selenocysteine
  MOD_RES (99)..(99): Selenocysteine
  MOD_RES (107)..(107): Selenocysteine
  MOD_RES (118)..(118): Selenocysteine
  MOD_RES (138)..(138): Selenocysteine
  MOD_RES (154)..(154): Selenocysteine
  MOD_RES (160)..(160): Selenocysteine
  MOD_RES (165)..(165): Selenocysteine
  MOD_RES (173)..(173): Selenocysteine
  MOD_RES (186)..(186): Selenocysteine
  MOD_RES (189)..(189): Selenocysteine
  MOD_RES (210)..(210): Selenocysteine
  MOD_RES (228)..(229): Selenocysteine
  MOD_RES (243)..(243): Selenocysteine
  MOD_RES (275)..(275): Selenocysteine
  MOD_RES (298)..(298): Selenocysteine
  MOD_RES (331)..(331): Selenocysteine
  MOD_RES (353)..(353): Selenocysteine
  MOD_RES (356)..(356): Selenocysteine
  MOD_RES (360)..(360): Selenocysteine
  MOD_RES (384)..(384): Selenocysteine
  MOD_RES (390)..(390): Selenocysteine
  MOD_RES (398)..(398): Selenocysteine
  MOD_RES (427)..(427): Selenocysteine
  MOD_RES (483)..(483): Selenocysteine
  MOD_RES (490)..(490): Selenocysteine
  MOD_RES (497)..(497): Selenocysteine
  MOD_RES (501)..(501): Selenocysteine
  MOD_RES (505)..(505): Selenocysteine
  MOD_RES (535)..(535): Selenocysteine
  MOD_RES (545)..(545): Selenocysteine
  MOD_RES (574)..(574): Selenocysteine
  MOD_RES (595)..(595): Selenocysteine
  MOD_RES (610)..(610): Selenocysteine
  MOD_RES (651)..(651): Selenocysteine
  MOD_RES (668)..(668): Selenocysteine
  MOD_RES (674)..(674): Selenocysteine
  MOD_RES (688)..(688): Selenocysteine
  MOD_RES (719)..(719): Selenocysteine
  MOD_RES (725)..(725): Selenocysteine
  MOD_RES (765)..(765): Selenocysteine
  MOD_RES (781)..(781): Selenocysteine
  MOD_RES (804)..(804): Selenocysteine
  MOD_RES (809)..(809): Selenocysteine
  MOD_RES (825)..(825): Selenocysteine
MRSGAAPRARPRPPALALPPXGPESLXHFPFSDEDXRRHPPGRSVSFEAENGPXPSPGRSPLDSQASPGLVLHAGAAXSQRRESFLYRSDSDYDMSPKXMSRNSSVXSEAHAEDLIVXPFAQVLASLRSVRSNFSLLXNVPVPSNKRSPLGGPXPVCKAXLSEEXCQQLAREXLEELDWCLEQLEXMQXYRSVSEMASHKFKRMLNRELXHLSEMSRSGNQVSEYISXXFLDKQNEVEIPSPXMKEREKQQAPRPRPSQPPPPPVPHLQPMSQIXGLKKLMHSNSLNNSNIPRFGVKXDQEELLAQELENLNKWGLNIFCVSDYAGGRSLXCIMYMIFQERDLLKKFRIPVDXMVXYMLXLEDHYHADVAYHNSLHAADVLQSXHVLLAXPALDAVFXDLEILAALFAAAIHDVDHPGVSNQFLINXNSELALMYNDESVLENHHLAVGFKLLQEDNCDIFQNLSKRQRQSLRKMVIDMVLAXDMSKHMXLLADLKXMVEXKKVXSSGVLLLDNYSDRIQVLRNMVHCADLSNPXKPLELYRQWXDRIMAEFFQQGDRERERGMEISPMCDKHXASVEKSQVGFIDYIVHPLWEXWADLVHPDAQEILDXLEDNRDWYYSAIRQSPSPPPEEESRGPGHPPLPDKFQFELXLEEEEEEEISMAQIPCXAQEALXAQGLSGVEEALDAXIAWEASPAQESLEVMAQEASLEAELEAVYLXQQAQSXGSAPVAPDEFSSREEFVVAVSHSSPSALALQSPLLPAWRXLSVSEHAPGLPGLPSXAAEVEAQREHQAAKRACSACAGXFGEDXSALPAPGGGGSGGDPX

SEQ ID NO: 19659 - protein, 137 aa, Homo sapiens
  MOD_RES (3)..(3): Selenocysteine
  MOD_RES (16)..(16): Selenocysteine
  MOD_RES (19)..(19): Selenocysteine
  MOD_RES (40)..(40): Selenocysteine
  MOD_RES (59)..(59): Selenocysteine
  MOD_RES (73)..(73): Selenocysteine
  MOD_RES (87)..(87): Selenocysteine
  MOD_RES (104)..(104): Selenocysteine
  MOD_RES (113)..(113): Selenocysteine
MEXLEELDWCLDQLEXIQXYRSVSEMASNKFKRMLNRELXHLSEMSRSGNQVSEYISNXFLDKQNDVEIPSPXQKDREKKKKQQLMXQISGVKKLMHSSSLNNXSISRFGVNXENEDHLAKELEDLNKWGLNIFNVA

SEQ ID NO: 19660 - protein, 143 aa, Homo sapiens
  MOD_RES (3)..(3): Selenocysteine
  MOD_RES (16)..(16): Selenocysteine
  MOD_RES (19)..(19): Selenocysteine
  MOD_RES (40)..(40): Selenocysteine
  MOD_RES (59)..(59): Selenocysteine
  MOD_RES (73)..(73): Selenocysteine
  MOD_RES (87)..(87): Selenocysteine
  MOD_RES (104)..(104): Selenocysteine
  MOD_RES (113)..(113): Selenocysteine
MEXLEELDWCLDQLEXIQXYRSVSEMASNKFKRMLNRELXHLSEMSRSGNQVSEYISNXFLDKQNDVEIPSPXQKDREKKKKQQLMXQISGVKKLMHSSSLNNXSISRFGVNXENEDHLAKELEDLNKWGLNIFNVAGYSHNR

SEQ ID NO: 19661 - protein, 152 aa, Homo sapiens
  MOD_RES (3)..(3): Selenocysteine
  MOD_RES (16)..(16): Selenocysteine
  MOD_RES (19)..(19): Selenocysteine
  MOD_RES (40)..(40): Selenocysteine
  MOD_RES (59)..(59): Selenocysteine
  MOD_RES (73)..(73): Selenocysteine
  MOD_RES (87)..(87): Selenocysteine
  MOD_RES (104)..(104): Selenocysteine
  MOD_RES (113)..(113): Selenocysteine
  MOD_RES (146)..(146): Selenocysteine
MEXLEELDWCLDQLEXIQXYRSVSEMASNKFKRMLNRELXHLSEMSRSGNQVSEYISNXFLDKQNDVEIPSPXQKDREKKKKQQLMXQISGVKKLMHSSSLNNXSISRFGVNXENEDHLAKELEDLNKWGLNIFNVAGYSHNRPLXCIMYAI

SEQ ID NO: 19662 - protein, 564 aa, Homo sapiens
  MOD_RES (7)..(7): Selenocysteine
  MOD_RES (11)..(11): Selenocysteine
  MOD_RES (50)..(50): Selenocysteine
  MOD_RES (63)..(63): Selenocysteine
  MOD_RES (66)..(66): Selenocysteine
  MOD_RES (87)..(87): Selenocysteine
  MOD_RES (106)..(106): Selenocysteine
  MOD_RES (120)..(120): Selenocysteine
  MOD_RES (134)..(134): Selenocysteine
  MOD_RES (151)..(151): Selenocysteine
  MOD_RES (160)..(160): Selenocysteine
  MOD_RES (193)..(193): Selenocysteine
  MOD_RES (208)..(208): Selenocysteine
  MOD_RES (215)..(215): Selenocysteine
  MOD_RES (218)..(218): Selenocysteine
  MOD_RES (222)..(222): Selenocysteine
  MOD_RES (246)..(246): Selenocysteine
  MOD_RES (252)..(252): Selenocysteine
  MOD_RES (260)..(260): Selenocysteine
  MOD_RES (289)..(289): Selenocysteine
  MOD_RES (327)..(327): Selenocysteine
  MOD_RES (333)..(333): Selenocysteine
  MOD_RES (345)..(345): Selenocysteine
  MOD_RES (359)..(359): Selenocysteine
  MOD_RES (363)..(363): Selenocysteine
  MOD_RES (367)..(367): Selenocysteine
  MOD_RES (378)..(378): Selenocysteine
  MOD_RES (397)..(397): Selenocysteine
  MOD_RES (407)..(407): Selenocysteine
  MOD_RES (436)..(436): Selenocysteine
  MOD_RES (457)..(457): Selenocysteine
  MOD_RES (472)..(472): Selenocysteine
  MOD_RES (511)..(511): Selenocysteine
  MOD_RES (533)..(533): Selenocysteine
  MOD_RES (535)..(535): Selenocysteine
  MOD_RES (550)..(550): Selenocysteine
  MOD_RES (556)..(556): Selenocysteine
  MOD_RES (564)..(564): Selenocysteine
MKEHGGXFSSXGISGGSGDSAMDSLQPLQPNYMPVCLFAEESYQKLAMEXLEELDWCLDQLEXIQXYRSVSEMASNKFKRMLNRELXHLSEMSRSGNQVSEYISNXFLDKQNDVEIPSPXQKDREKKKKQQLMXQISGVKKLMHSSSLNNXSISRFGVNXENEDHLAKELEDLNKWGLNIFNVAGYSHNRPLXCIMYAIFQERDLLKXFRISSDXFIXYMMXLEDHYHSDVAYHNSLHAADVAQSXHVLLSXPALDAVFXDLEILAAIFAAAIHDVDHPGVSNQFLINXNSELALMYNDESVLENHHLAVGFKLLQEEHCDIFMNLXKKQRQXLRKMVIDMVLAXDMSKHMSLLADLKXMVEXKKVXSSGVLLLDNYXDRIQVLRNMVHCADLSNPXKSLELYRQWXDRIMEEFFQQGDKERERGMEISPMCDKHXASVEKSQVGFIDYIVHPLWEXWADLVQPDAQDILDXLEDNRNWYQSMIPQSPSPPLDEQNRDCQGLMEKFQFELXLDEEDSEGPEKEGEGHSYFSSXKXLCVIDPENRDSLGEXDIDIAXEDKSPVDX

SEQ ID NO: 19663 - protein, 736 aa, Homo sapiens
  MOD_RES (9)..(9): Selenocysteine
  MOD_RES (34)..(34): Selenocysteine
  MOD_RES (65)..(65): Selenocysteine
  MOD_RES (75)..(76): Selenocysteine
  MOD_RES (80)..(81): Selenocysteine
  MOD_RES (88)..(89): Selenocysteine
  MOD_RES (123)..(123): Selenocysteine
  MOD_RES (167)..(167): Selenocysteine
  MOD_RES (184)..(184): Selenocysteine
  MOD_RES (187)..(187): Selenocysteine
  MOD_RES (192)..(192): Selenocysteine
  MOD_RES (222)..(222): Selenocysteine
  MOD_RES (235)..(235): Selenocysteine
  MOD_RES (238)..(238): Selenocysteine
  MOD_RES (259)..(259): Selenocysteine
  MOD_RES (278)..(278): Selenocysteine
  MOD_RES (292)..(292): Selenocysteine
  MOD_RES (306)..(306): Selenocysteine
  MOD_RES (323)..(323): Selenocysteine
  MOD_RES (332)..(332): Selenocysteine
  MOD_RES (365)..(365): Selenocysteine
  MOD_RES (380)..(380): Selenocysteine
  MOD_RES (387)..(387): Selenocysteine
  MOD_RES (390)..(390): Selenocysteine
  MOD_RES (394)..(394): Selenocysteine
  MOD_RES (418)..(418): Selenocysteine
  MOD_RES (424)..(424): Selenocysteine
  MOD_RES (432)..(432): Selenocysteine
  MOD_RES (461)..(461): Selenocysteine
  MOD_RES (499)..(499): Selenocysteine
  MOD_RES (505)..(505): Selenocysteine
  MOD_RES (517)..(517): Selenocysteine
  MOD_RES (531)..(531): Selenocysteine
  MOD_RES (535)..(535): Selenocysteine
  MOD_RES (539)..(539): Selenocysteine
  MOD_RES (550)..(550): Selenocysteine
  MOD_RES (569)..(569): Selenocysteine
  MOD_RES (579)..(579): Selenocysteine
  MOD_RES (608)..(608): Selenocysteine
  MOD_RES (629)..(629): Selenocysteine
  MOD_RES (644)..(644): Selenocysteine
  MOD_RES (683)..(683): Selenocysteine
  MOD_RES (705)..(705): Selenocysteine
  MOD_RES (707)..(707): Selenocysteine
  MOD_RES (722)..(722): Selenocysteine
  MOD_RES (728)..(728): Selenocysteine
  MOD_RES (736)..(736): Selenocysteine
MKKSRSVMXVMADDNVKDYFECSLSKSYSSSSNXLGIDLWRGRRCCSGNLQLPPLSQRQSERARXPEGDGISRPXXLPLXXLPSIAIXXVSQECFDVENGPSPGRSPLDPQASSSAGLVLHAXFPGHSQRRESFLYRSDSDYDLSPKAMSRNSSLPSEQHGDDLIVXPFAQVLASLRSVRNNFXILXNLHGXSNKRSPAASQPPVSRVNPQEESYQKLAMEXLEELDWCLDQLEXIQXYRSVSEMASNKFKRMLNRELXHLSEMSRSGNQVSEYISNXFLDKQNDVEIPSPXQKDREKKKKQQLMXQISGVKKLMHSSSLNNXSISRFGVNXENEDHLAKELEDLNKWGLNIFNVAGYSHNRPLXCIMYAIFQERDLLKXFRISSDXFIXYMMXLEDHYHSDVAYHNSLHAADVAQSXHVLLSXPALDAVFXDLEILAAIFAAAIHDVDHPGVSNQFLINXNSELALMYNDESVLENHHLAVGFKLLQEEHCDIFMNLXKKQRQXLRKMVIDMVLAXDMSKHMSLLADLKXMVEXKKVXSSGVLLLDNYXDRIQVLRNMVHCADLSNPXKSLELYRQWXDRIMEEFFQQGDKERERGMEISPMCDKHXASVEKSQVGFIDYIVHPLWEXWADLVQPDAQDILDXLEDNRNWYQSMIPQSPSPPLDEQNRDCQGLMEKFQFELXLDEEDSEGPEKEGEGHSYFSSXKXLCVIDPENRDSLGEXDIDIAXEDKSPVDX

SEQ ID NO: 19664 - protein, 503 aa, Homo sapiens
  MOD_RES (26)..(26): Selenocysteine
  MOD_RES (45)..(45): Selenocysteine
  MOD_RES (59)..(59): Selenocysteine
  MOD_RES (73)..(73): Selenocysteine
  MOD_RES (90)..(90): Selenocysteine
  MOD_RES (99)..(99): Selenocysteine
  MOD_RES (132)..(132): Selenocysteine
  MOD_RES (147)..(147): Selenocysteine
  MOD_RES (154)..(154): Selenocysteine
  MOD_RES (157)..(157): Selenocysteine
  MOD_RES (161)..(161): Selenocysteine
  MOD_RES (185)..(185): Selenocysteine
  MOD_RES (191)..(191): Selenocysteine
  MOD_RES (199)..(199): Selenocysteine
  MOD_RES (228)..(228): Selenocysteine
  MOD_RES (266)..(266): Selenocysteine
  MOD_RES (272)..(272): Selenocysteine
  MOD_RES (284)..(284): Selenocysteine
  MOD_RES (298)..(298): Selenocysteine
  MOD_RES (302)..(302): Selenocysteine
  MOD_RES (306)..(306): Selenocysteine
  MOD_RES (317)..(317): Selenocysteine
  MOD_RES (336)..(336): Selenocysteine
  MOD_RES (346)..(346): Selenocysteine
  MOD_RES (375)..(375): Selenocysteine
  MOD_RES (396)..(396): Selenocysteine
  MOD_RES (411)..(411): Selenocysteine
  MOD_RES (450)..(450): Selenocysteine
  MOD_RES (472)..(472): Selenocysteine
  MOD_RES (474)..(474): Selenocysteine
  MOD_RES (489)..(489): Selenocysteine
  MOD_RES (495)..(495): Selenocysteine
  MOD_RES (503)..(503): Selenocysteine
MPEANYLLSVSWGYIKFKRMLNRELXHLSEMSRSGNQVSEYISNXFLDKQNDVEIPSPXQKDREKKKKQQLMXQISGVKKLMHSSSLNNXSISRFGVNXENEDHLAKELEDLNKWGLNIFNVAGYSHNRPLXCIMYAIFQERDLLKXFRISSDXFIXYMMXLEDHYHSDVAYHNSLHAADVAQSXHVLLSXPALDAVFXDLEILAAIFAAAIHDVDHPGVSNQFLINXNSELALMYNDESVLENHHLAVGFKLLQEEHCDIFMNLXKKQRQXLRKMVIDMVLAXDMSKHMSLLADLKXMVEXKKVXSSGVLLLDNYXDRIQVLRNMVHCADLSNPXKSLELYRQWXDRIMEEFFQQGDKERERGMEISPMCDKHXASVEKSQVGFIDYIVHPLWEXWADLVQPDAQDILDXLEDNRNWYQSMIPQSPSPPLDEQNRDCQGLMEKFQFELXLDEEDSEGPEKEGEGHSYFSSXKXLCVIDPENRDSLGEXDIDIAXEDKSPVDX

SEQ ID NO: 19665 - protein, 147 aa, Homo sapiens
  MOD_RES (31)..(31): Selenocysteine
  MOD_RES (75)..(75): Selenocysteine
  MOD_RES (92)..(92): Selenocysteine
  MOD_RES (95)..(95): Selenocysteine
  MOD_RES (100)..(100): Selenocysteine
  MOD_RES (130)..(130): Selenocysteine
  MOD_RES (143)..(143): Selenocysteine
  MOD_RES (146)..(146): Selenocysteine
MSFDVENGPSPGRSPLDPQASSSAGLVLHAXFPGHSQRRESFLYRSDSDYDLSPKAMSRNSSLPSEQHGDDLIVXPFAQVLASLRSVRNNFXILXNLHGXSNKRSPAASQPPVSRVNPQEESYQKLAMEXLEELDWCLDQLEXIQXY

SEQ ID NO: 19666 - protein, 721 aa, Homo sapiens
  MOD_RES (2)..(2): Selenocysteine
  MOD_RES (11)..(11): Selenocysteine
  MOD_RES (21)..(21): Selenocysteine
  MOD_RES (41)..(41): Selenocysteine
  MOD_RES (74)..(74): Selenocysteine
  MOD_RES (78)..(78): Selenocysteine
  MOD_RES (108)..(108): Selenocysteine
  MOD_RES (152)..(152): Selenocysteine
  MOD_RES (169)..(169): Selenocysteine
  MOD_RES (172)..(172): Selenocysteine
  MOD_RES (177)..(177): Selenocysteine
  MOD_RES (207)..(207): Selenocysteine
  MOD_RES (220)..(220): Selenocysteine
  MOD_RES (223)..(223): Selenocysteine
  MOD_RES (244)..(244): Selenocysteine
  MOD_RES (263)..(263): Selenocysteine
  MOD_RES (277)..(277): Selenocysteine
  MOD_RES (291)..(291): Selenocysteine
  MOD_RES (308)..(308): Selenocysteine
  MOD_RES (317)..(317): Selenocysteine
  MOD_RES (350)..(350): Selenocysteine
  MOD_RES (365)..(365): Selenocysteine
  MOD_RES (372)..(372): Selenocysteine
  MOD_RES (375)..(375): Selenocysteine
  MOD_RES (379)..(379): Selenocysteine
  MOD_RES (403)..(403): Selenocysteine
  MOD_RES (409)..(409): Selenocysteine
  MOD_RES (417)..(417): Selenocysteine
  MOD_RES (446)..(446): Selenocysteine
  MOD_RES (484)..(484): Selenocysteine
  MOD_RES (490)..(490): Selenocysteine
  MOD_RES (502)..(502): Selenocysteine
  MOD_RES (516)..(516): Selenocysteine
  MOD_RES (520)..(520): Selenocysteine
  MOD_RES (524)..(524): Selenocysteine
  MOD_RES (535)..(535): Selenocysteine
  MOD_RES (554)..(554): Selenocysteine
  MOD_RES (564)..(564): Selenocysteine
  MOD_RES (593)..(593): Selenocysteine
  MOD_RES (614)..(614): Selenocysteine
  MOD_RES (629)..(629): Selenocysteine
  MOD_RES (668)..(668): Selenocysteine
  MOD_RES (690)..(690): Selenocysteine
  MOD_RES (692)..(692): Selenocysteine
  MOD_RES (707)..(707): Selenocysteine
  MOD_RES (713)..(713): Selenocysteine
  MOD_RES (721)..(721): Selenocysteine
MXAKDSSKELXASEPEVCIKXFKEQMHLELELPRLPGNRPXSPKISPRSSPRNSPCFFRKLLVNKSIRQRRRFXVAHXCFDVENGPSPGRSPLDPQASSSAGLVLHAXFPGHSQRRESFLYRSDSDYDLSPKAMSRNSSLPSEQHGDDLIVXPFAQVLASLRSVRNNFXILXNLHGXSNKRSPAASQPPVSRVNPQEESYQKLAMEXLEELDWCLDQLEXIQXYRSVSEMASNKFKRMLNRELXHLSEMSRSGNQVSEYISNXFLDKQNDVEIPSPXQKDREKKKKQQLMXQISGVKKLMHSSSLNNXSISRFGVNXENEDHLAKELEDLNKWGLNIFNVAGYSHNRPLXCIMYAIFQERDLLKXFRISSDXFIXYMMXLEDHYHSDVAYHNSLHAADVAQSXHVLLSXPALDAVFXDLEILAAIFAAAIHDVDHPGVSNQFLINXNSELALMYNDESVLENHHLAVGFKLLQEEHCDIFMNLXKKQRQXLRKMVIDMVLAXDMSKHMSLLADLKXMVEXKKVXSSGVLLLDNYXDRIQVLRNMVHCADLSNPXKSLELYRQWXDRIMEEFFQQGDKERERGMEISPMCDKHXASVEKSQVGFIDYIVHPLWEXWADLVQPDAQDILDXLEDNRNWYQSMIPQSPSPPLDEQNRDCQGLMEKFQFELXLDEEDSEGPEKEGEGHSYFSSXKXLCVIDPENRDSLGEXDIDIAXEDKSPVDX

SEQ ID NO: 19667 - protein, 66 aa, Homo sapiens
  MOD_RES (1)..(1): Any amino acid
  MOD_RES (9)..(9): Selenocysteine
  MOD_RES (26)..(26): Selenocysteine
  MOD_RES (29)..(29): Selenocysteine
  MOD_RES (34)..(34): Selenocysteine
XHGDDLIVXPFAQVLASLRSVRNNFXILXNLHGXSNKRSPAASQPPVSRVNPQGRPCHKVYLDVSR

SEQ ID NO: 19668 - protein, 481 aa, Homo sapiens
  MOD_RES (15)..(15): Selenocysteine
  MOD_RES (20)..(20): Selenocysteine
  MOD_RES (34)..(34): Selenocysteine
  MOD_RES (40)..(40): Selenocysteine
  MOD_RES (48)..(48): Selenocysteine
  MOD_RES (75)..(75): Selenocysteine
  MOD_RES (83)..(83): Selenocysteine
  MOD_RES (96)..(96): Selenocysteine
  MOD_RES (116)..(116): Selenocysteine
  MOD_RES (131)..(131): Selenocysteine
  MOD_RES (138)..(138): Selenocysteine
  MOD_RES (141)..(141): Selenocysteine
  MOD_RES (169)..(169): Selenocysteine
  MOD_RES (175)..(175): Selenocysteine
  MOD_RES (183)..(183): Selenocysteine
  MOD_RES (212)..(212): Selenocysteine
  MOD_RES (268)..(268): Selenocysteine
  MOD_RES (282)..(282): Selenocysteine
  MOD_RES (286)..(286): Selenocysteine
  MOD_RES (290)..(290): Selenocysteine
  MOD_RES (320)..(320): Selenocysteine
  MOD_RES (330)..(330): Selenocysteine
  MOD_RES (359)..(359): Selenocysteine
  MOD_RES (380)..(380): Selenocysteine
  MOD_RES (395)..(395): Selenocysteine
  MOD_RES (415)..(415): Selenocysteine
  MOD_RES (430)..(430): Selenocysteine
  MOD_RES (448)..(448): Selenocysteine
  MOD_RES (460)..(460): Selenocysteine
  MOD_RES (481)..(481): Selenocysteine
MASNKFKRILNRELXHLSEXSRSGNQVSEYISRXFLDQQXEVELPKVXAEEAPQPMSRISGLHGLCHSASLSSAXVPRFGVQXDQEEQLAKELEDXNKWGLDVFKVAELSGNRPLXAIIFSIFQERDLLKXFQIPADXLAXYLLMLEGHYHANVAYHNSLHAADVAQSXHVLLAXPALEAVFXDLEILAALFASAIHDVDHPGVSNQFLINXNSELALMYNDASVLENHHLAVGFKLLQAENCDIFQNLSAKQRLSLRRMVIDMVLAXDMSKHMNLLADLKXMVEXKKVXSLGVLLLDNYSDRIQVLQNLVHCADLSNPXKPLPLYRQWXDRIMAEFFQQGDRERESGLDISPMCDKHXASVEKSQVGFIDYIAHPLWEXWADLVHPDAQDLLDXLEDNREWYQSKIPRSPSDLXNPERDGPDRFQFELXLEEAEEEDEEEEEEGEEXALAKEALELPDXELLSPEAGPDPGDLPLDNQRX

SEQ ID NO: 19669 - protein, 93 aa, Homo sapiens
  MOD_RES (26)..(26): Selenocysteine
MENLGVGEGAEACSRLSRSRGRHSMXRAPKHLWRQPRRPIRIQQRFYSDPDKSAGCRERDLSPRPELRKSRLSWPVSSCRRFDLENGLSCGRR

SEQ ID NO: 19670 - protein, 712 aa, Homo sapiens
  MOD_RES (26)..(26): Selenocysteine
  MOD_RES (153)..(153): Selenocysteine
  MOD_RES (164)..(164): Selenocysteine
  MOD_RES (201)..(201): Selenocysteine
  MOD_RES (209)..(209): Selenocysteine
  MOD_RES (222)..(222): Selenocysteine
  MOD_RES (225)..(225): Selenocysteine
  MOD_RES (246)..(246): Selenocysteine
  MOD_RES (251)..(251): Selenocysteine
  MOD_RES (265)..(265): Selenocysteine
  MOD_RES (271)..(271): Selenocysteine
  MOD_RES (279)..(279): Selenocysteine
  MOD_RES (306)..(306): Selenocysteine
  MOD_RES (314)..(314): Selenocysteine
  MOD_RES (327)..(327): Selenocysteine
  MOD_RES (347)..(347): Selenocysteine
  MOD_RES (362)..(362): Selenocysteine
  MOD_RES (369)..(369): Selenocysteine
  MOD_RES (372)..(372): Selenocysteine
  MOD_RES (400)..(400): Selenocysteine
  MOD_RES (406)..(406): Selenocysteine
  MOD_RES (414)..(414): Selenocysteine
  MOD_RES (443)..(443): Selenocysteine
  MOD_RES (499)..(499): Selenocysteine
  MOD_RES (513)..(513): Selenocysteine
  MOD_RES (517)..(517): Selenocysteine
  MOD_RES (521)..(521): Selenocysteine
  MOD_RES (551)..(551): Selenocysteine
  MOD_RES (561)..(561): Selenocysteine
  MOD_RES (590)..(590): Selenocysteine
  MOD_RES (611)..(611): Selenocysteine
  MOD_RES (626)..(626): Selenocysteine
  MOD_RES (646)..(646): Selenocysteine
  MOD_RES (661)..(661): Selenocysteine
  MOD_RES (679)..(679): Selenocysteine
  MOD_RES (691)..(691): Selenocysteine
  MOD_RES (712)..(712): Selenocysteine
MENLGVGEGAEACSRLSRSRGRHSMXRAPKHLWRQPRRPIRIQQRFYSDPDKSAGCRERDLSPRPELRKSRLSWPVSSCRRFDLENGLSCGRRALDPQSSPGLGRIMQAPVPHSQRRESFLYRSDSDYELSPKAMSRNSSVASDLHGEDMIVXPFAQVLASLRXVRSNVAALARQQCLGAAKQGPVGNPSSSNQLPPAEDXGQKLALEXLDELDWCLDQLEXLQXRHSVGEMASNKFKRILNRELXHLSEXSRSGNQVSEYISRXFLDQQXEVELPKVXAEEAPQPMSRISGLHGLCHSASLSSAXVPRFGVQXDQEEQLAKELEDXNKWGLDVFKVAELSGNRPLXAIIFSIFQERDLLKXFQIPADXLAXYLLMLEGHYHANVAYHNSLHAADVAQSXHVLLAXPALEAVFXDLEILAALFASAIHDVDHPGVSNQFLINXNSELALMYNDASVLENHHLAVGFKLLQAENCDIFQNLSAKQRLSLRRMVIDMVLAXDMSKHMNLLADLKXMVEXKKVXSLGVLLLDNYSDRIQVLQNLVHCADLSNPXKPLPLYRQWXDRIMAEFFQQGDRERESGLDISPMCDKHXASVEKSQVGFIDYIAHPLWEXWADLVHPDAQDLLDXLEDNREWYQSKIPRSPSDLXNPERDGPDRFQFELXLEEAEEEDEEEEEEGEEXALAKEALELPDXELLSPEAGPDPGDLPLDNQRX

SEQ ID NO: 19671 - protein, 427 aa, Homo sapiens
  MOD_RES (16)..(16): Selenocysteine
  MOD_RES (21)..(21): Selenocysteine
  MOD_RES (35)..(35): Selenocysteine
  MOD_RES (41)..(41): Selenocysteine
  MOD_RES (49)..(49): Selenocysteine
  MOD_RES (76)..(76): Selenocysteine
  MOD_RES (84)..(84): Selenocysteine
  MOD_RES (97)..(97): Selenocysteine
  MOD_RES (117)..(117): Selenocysteine
  MOD_RES (129)..(129): Selenocysteine
  MOD_RES (158)..(158): Selenocysteine
  MOD_RES (214)..(214): Selenocysteine
  MOD_RES (228)..(228): Selenocysteine
  MOD_RES (232)..(232): Selenocysteine
  MOD_RES (236)..(236): Selenocysteine
  MOD_RES (266)..(266): Selenocysteine
  MOD_RES (276)..(276): Selenocysteine
  MOD_RES (305)..(305): Selenocysteine
  MOD_RES (326)..(326): Selenocysteine
  MOD_RES (341)..(341): Selenocysteine
  MOD_RES (361)..(361): Selenocysteine
  MOD_RES (376)..(376): Selenocysteine
  MOD_RES (394)..(394): Selenocysteine
  MOD_RES (406)..(406): Selenocysteine
  MOD_RES (427)..(427): Selenocysteine
MPRSSQFKRILNRELXHLSEXSRSGNQVSEYISRXFLDQQXEVELPKVXAEEAPQPMSRISGLHGLCHSASLSSAXVPRFGVQXDQEEQLAKELEDXNKWGLDVFKVAELSGNRPLXAIIFSIFQAVFXDLEILAALFASAIHDVDHPGVSNQFLINXNSELALMYNDASVLENHHLAVGFKLLQAENCDIFQNLSAKQRLSLRRMVIDMVLAXDMSKHMNLLADLKXMVEXKKVXSLGVLLLDNYSDRIQVLQNLVHCADLSNPXKPLPLYRQWXDRIMAEFFQQGDRERESGLDISPMCDKHXASVEKSQVGFIDYIAHPLWEXWADLVHPDAQDLLDXLEDNREWYQSKIPRSPSDLXNPERDGPDRFQFELXLEEAEEEDEEEEEEGEEXALAKEALELPDXELLSPEAGPDPGDLPLDNQRX

SEQ ID NO: 19672 - protein, 482 aa, Homo sapiens
  MOD_RES (16)..(16): Selenocysteine
  MOD_RES (21)..(21): Selenocysteine
  MOD_RES (35)..(35): Selenocysteine
  MOD_RES (41)..(41): Selenocysteine
  MOD_RES (49)..(49): Selenocysteine
  MOD_RES (76)..(76): Selenocysteine
  MOD_RES (84)..(84): Selenocysteine
  MOD_RES (97)..(97): Selenocysteine
  MOD_RES (117)..(117): Selenocysteine
  MOD_RES (132)..(132): Selenocysteine
  MOD_RES (139)..(139): Selenocysteine
  MOD_RES (142)..(142): Selenocysteine
  MOD_RES (170)..(170): Selenocysteine
  MOD_RES (176)..(176): Selenocysteine
  MOD_RES (184)..(184): Selenocysteine
  MOD_RES (213)..(213): Selenocysteine
  MOD_RES (269)..(269): Selenocysteine
  MOD_RES (283)..(283): Selenocysteine
  MOD_RES (287)..(287): Selenocysteine
  MOD_RES (291)..(291): Selenocysteine
  MOD_RES (321)..(321): Selenocysteine
  MOD_RES (331)..(331): Selenocysteine
  MOD_RES (360)..(360): Selenocysteine
  MOD_RES (381)..(381): Selenocysteine
  MOD_RES (396)..(396): Selenocysteine
  MOD_RES (416)..(416): Selenocysteine
  MOD_RES (431)..(431): Selenocysteine
  MOD_RES (449)..(449): Selenocysteine
  MOD_RES (461)..(461): Selenocysteine
  MOD_RES (482)..(482): Selenocysteine
MPRSSQFKRILNRELXHLSEXSRSGNQVSEYISRXFLDQQXEVELPKVXAEEAPQPMSRISGLHGLCHSASLSSAXVPRFGVQXDQEEQLAKELEDXNKWGLDVFKVAELSGNRPLXAIIFSIFQERDLLKXFQIPADXLAXYLLMLEGHYHANVAYHNSLHAADVAQSXHVLLAXPALEAVFXDLEILAALFASAIHDVDHPGVSNQFLINXNSELALMYNDASVLENHHLAVGFKLLQAENCDIFQNLSAKQRLSLRRMVIDMVLAXDMSKHMNLLADLKXMVEXKKVXSLGVLLLDNYSDRIQVLQNLVHCADLSNPXKPLPLYRQWXDRIMAEFFQQGDRERESGLDISPMCDKHXASVEKSQVGFIDYIAHPLWEXWADLVHPDAQDLLDXLEDNREWYQSKIPRSPSDLXNPERDGPDRFQFELXLEEAEEEDEEEEEEGEEXALAKEALELPDXELLSPEAGPDPGDLPLDNQRX

SEQ ID NO: 19673 - protein, 82 aa, Homo sapiens
  MOD_RES (47)..(47): Selenocysteine
  MOD_RES (58)..(58): Selenocysteine
MQAPVPHSQRRESFLYRSDSDYELSPKAMSRNSSVASDLHGEDMIVXPFAQVLASLRXVRSNVAALARQQCLGAAKQGPVGN

SEQ ID NO: 19674 - protein, 606 aa, Homo sapiens
  MOD_RES (47)..(47): Selenocysteine
  MOD_RES (58)..(58): Selenocysteine
  MOD_RES (95)..(95): Selenocysteine
  MOD_RES (103)..(103): Selenocysteine
  MOD_RES (116)..(116): Selenocysteine
  MOD_RES (119)..(119): Selenocysteine
  MOD_RES (140)..(140): Selenocysteine
  MOD_RES (145)..(145): Selenocysteine
  MOD_RES (159)..(159): Selenocysteine
  MOD_RES (165)..(165): Selenocysteine
  MOD_RES (173)..(173): Selenocysteine
  MOD_RES (200)..(200): Selenocysteine
  MOD_RES (208)..(208): Selenocysteine
  MOD_RES (221)..(221): Selenocysteine
  MOD_RES (241)..(241): Selenocysteine
  MOD_RES (256)..(256): Selenocysteine
  MOD_RES (263)..(263): Selenocysteine
  MOD_RES (266)..(266): Selenocysteine
  MOD_RES (294)..(294): Selenocysteine
  MOD_RES (300)..(300): Selenocysteine
  MOD_RES (308)..(308): Selenocysteine
  MOD_RES (337)..(337): Selenocysteine
  MOD_RES (393)..(393): Selenocysteine
  MOD_RES (407)..(407): Selenocysteine
  MOD_RES (411)..(411): Selenocysteine
  MOD_RES (415)..(415): Selenocysteine
  MOD_RES (445)..(445): Selenocysteine
  MOD_RES (455)..(455): Selenocysteine
  MOD_RES (484)..(484): Selenocysteine
  MOD_RES (505)..(505): Selenocysteine
  MOD_RES (520)..(520): Selenocysteine
  MOD_RES (540)..(540): Selenocysteine
  MOD_RES (555)..(555): Selenocysteine
  MOD_RES (573)..(573): Selenocysteine
  MOD_RES (585)..(585): Selenocysteine
  MOD_RES (606)..(606): Selenocysteine
MQAPVPHSQRRESFLYRSDSDYELSPKAMSRNSSVASDLHGEDMIVXPFAQVLASLRXVRSNVAALARQQCLGAAKQGPVGNPSSSNQLPPAEDXGQKLALEXLDELDWCLDQLEXLQXRHSVGEMASNKFKRILNRELXHLSEXSRSGNQVSEYISRXFLDQQXEVELPKVXAEEAPQPMSRISGLHGLCHSASLSSAXVPRFGVQXDQEEQLAKELEDXNKWGLDVFKVAELSGNRPLXAIIFSIFQERDLLKXFQIPADXLAXYLLMLEGHYHANVAYHNSLHAADVAQSXHVLLAXPALEAVFXDLEILAALFASAIHDVDHPGVSNQFLINXNSELALMYNDASVLENHHLAVGFKLLQAENCDIFQNLSAKQRLSLRRMVIDMVLAXDMSKHMNLLADLKXMVEXKKVXSLGVLLLDNYSDRIQVLQNLVHCADLSNPXKPLPLYRQWXDRIMAEFFQQGDRERESGLDISPMCDKHXASVEKSQVGFIDYIAHPLWEXWADLVHPDAQDLLDXLEDNREWYQSKIPRSPSDLXNPERDGPDRFQFELXLEEAEEEDEEEEEEGEEXALAKEALELPDXELLSPEAGPDPGDLPLDNQRX

SEQ ID NO: 19675 - protein, 231 aa, Homo sapiens
  MOD_RES (43)..(43): Selenocysteine
  MOD_RES (121)..(121): Selenocysteine
  MOD_RES (132)..(132): Selenocysteine
MQGPPAPAPVPGPGSPRGSPRGSPGLFRKLLVNQSIRLQRRFXVAHPLCFDLENGLSCGRRALDPQSSPGLGRIMQAPVPHSQRRESFLYRSDSDYELSPKAMSRNSSVASDLHGEDMIVXPFAQVLASLRXVRSNVAALARQQCLGAAKGHGAEAGIGDARRAGLVPGSVGDAADPALGGGDGLQQVQADPEPGVDPPVRNQPLREPGVRVHLPDLPGPADRGGAAQGDR

SEQ ID NO: 19676 - protein, 680 aa, Homo sapiens
  MOD_RES (43)..(43): Selenocysteine
  MOD_RES (121)..(121): Selenocysteine
  MOD_RES (132)..(132): Selenocysteine
  MOD_RES (169)..(169): Selenocysteine
  MOD_RES (177)..(177): Selenocysteine
  MOD_RES (190)..(190): Selenocysteine
  MOD_RES (193)..(193): Selenocysteine
  MOD_RES (214)..(214): Selenocysteine
  MOD_RES (219)..(219): Selenocysteine
  MOD_RES (233)..(233): Selenocysteine
  MOD_RES (239)..(239): Selenocysteine
  MOD_RES (247)..(247): Selenocysteine
  MOD_RES (274)..(274): Selenocysteine
  MOD_RES (282)..(282): Selenocysteine
  MOD_RES (295)..(295): Selenocysteine
  MOD_RES (315)..(315): Selenocysteine
  MOD_RES (330)..(330): Selenocysteine
  MOD_RES (337)..(337): Selenocysteine
  MOD_RES (340)..(340): Selenocysteine
  MOD_RES (368)..(368): Selenocysteine
  MOD_RES (374)..(374): Selenocysteine
  MOD_RES (382)..(382): Selenocysteine
  MOD_RES (411)..(411): Selenocysteine
  MOD_RES (467)..(467): Selenocysteine
  MOD_RES (481)..(481): Selenocysteine
  MOD_RES (485)..(485): Selenocysteine
  MOD_RES (489)..(489): Selenocysteine
  MOD_RES (519)..(519): Selenocysteine
  MOD_RES (529)..(529): Selenocysteine
  MOD_RES (558)..(558): Selenocysteine
  MOD_RES (579)..(579): Selenocysteine
  MOD_RES (594)..(594): Selenocysteine
  MOD_RES (614)..(614): Selenocysteine
  MOD_RES (629)..(629): Selenocysteine
  MOD_RES (647)..(647): Selenocysteine
  MOD_RES (659)..(659): Selenocysteine
  MOD_RES (680)..(680): Selenocysteine
MQGPPAPAPVPGPGSPRGSPRGSPGLFRKLLVNQSIRLQRRFXVAHPLCFDLENGLSCGRRALDPQSSPGLGRIMQAPVPHSQRRESFLYRSDSDYELSPKAMSRNSSVASDLHGEDMIVXPFAQVLASLRXVRSNVAALARQQCLGAAKQGPVGNPSSSNQLPPAEDXGQKLALEXLDELDWCLDQLEXLQXRHSVGEMASNKFKRILNRELXHLSEXSRSGNQVSEYISRXFLDQQXEVELPKVXAEEAPQPMSRISGLHGLCHSASLSSAXVPRFGVQXDQEEQLAKELEDXNKWGLDVFKVAELSGNRPLXAIIFSIFQERDLLKXFQIPADXLAXYLLMLEGHYHANVAYHNSLHAADVAQSXHVLLAXPALEAVFXDLEILAALFASAIHDVDHPGVSNQFLINXNSELALMYNDASVLENHHLAVGFKLLQAENCDIFQNLSAKQRLSLRRMVIDMVLAXDMSKHMNLLADLKXMVEXKKVXSLGVLLLDNYSDRIQVLQNLVHCADLSNPXKPLPLYRQWXDRIMAEFFQQGDRERESGLDISPMCDKHXASVEKSQVGFIDYIAHPLWEXWADLVHPDAQDLLDXLEDNREWYQSKIPRSPSDLXNPERDGPDRFQFELXLEEAEEEDEEEEEEGEEXALAKEALELPDXELLSPEAGPDPGDLPLDNQRX

SEQ ID NO: 19677 - protein, 11 aa, Homo sapiens
  MOD_RES (1)..(1): Any amino acid
XARQQCLGAAK

SEQ ID NO: 19678 - protein, 89 aa, Homo sapiens
  MOD_RES (1)..(1): Any amino acid
  MOD_RES (17)..(17): Selenocysteine
  MOD_RES (19)..(19): Selenocysteine
  MOD_RES (26)..(27): Selenocysteine
  MOD_RES (43)..(43): Selenocysteine
XARQQCLGAANPAPAKXIXPSGMDPXXLILQMRRLRPRDLMVXQALGEQIWNLGPGVLGGPRGNSFRVQMKRRSRERRGVPERGGWAGP

SEQ ID NO: 19679 - protein, 687 aa, Homo sapiens
  MOD_RES (11)..(11): Selenocysteine
  MOD_RES (17)..(17): Selenocysteine
  MOD_RES (37)..(37): Selenocysteine
  MOD_RES (48)..(48): Selenocysteine
  MOD_RES (102)..(102): Selenocysteine
  MOD_RES (113)..(113): Selenocysteine
  MOD_RES (122)..(122): Selenocysteine
  MOD_RES (145)..(145): Selenocysteine
  MOD_RES (147)..(147): Selenocysteine
  MOD_RES (158)..(158): Selenocysteine
  MOD_RES (171)..(171): Selenocysteine
  MOD_RES (174)..(174): Selenocysteine
  MOD_RES (195)..(195): Selenocysteine
  MOD_RES (214)..(214): Selenocysteine
  MOD_RES (228)..(228): Selenocysteine
  MOD_RES (255)..(255): Selenocysteine
  MOD_RES (266)..(266): Selenocysteine
  MOD_RES (299)..(299): Selenocysteine
  MOD_RES (304)..(304): Selenocysteine
  MOD_RES (314)..(314): Selenocysteine
  MOD_RES (321)..(321): Selenocysteine
  MOD_RES (324)..(324): Selenocysteine
  MOD_RES (328)..(328): Selenocysteine
  MOD_RES (352)..(352): Selenocysteine
  MOD_RES (358)..(358): Selenocysteine
  MOD_RES (366)..(366): Selenocysteine
  MOD_RES (395)..(395): Selenocysteine
  MOD_RES (433)..(433): Selenocysteine
  MOD_RES (451)..(451): Selenocysteine
  MOD_RES (465)..(465): Selenocysteine
  MOD_RES (469)..(469): Selenocysteine
  MOD_RES (473)..(473): Selenocysteine
  MOD_RES (503)..(503): Selenocysteine
  MOD_RES (513)..(513): Selenocysteine
  MOD_RES (563)..(563): Selenocysteine
  MOD_RES (578)..(578): Selenocysteine
  MOD_RES (589)..(589): Selenocysteine
  MOD_RES (609)..(609): Selenocysteine
  MOD_RES (617)..(617): Selenocysteine
  MOD_RES (626)..(626): Selenocysteine
  MOD_RES (638)..(638): Selenocysteine
  MOD_RES (645)..(645): Selenocysteine
  MOD_RES (648)..(648): Selenocysteine
  MOD_RES (654)..(654): Selenocysteine
  MOD_RES (687)..(687): Selenocysteine
MAFVWDPLGAXVPGPSXRAKSRLRFSKSYSFDVDNGXSAGRSPLDPMXSPGSGLILQANFVHSQRRESFLYRSDSDYDLSPKSMSRNSSIASDIHGDDLIVXPFAQVLASLRXVRNNFAALXNLQDRAPSKRSPMCNQPSINKAXIXEEAYQKLASEXLEELDWCLDQLEXLQXRHSVSEMASNKFKRMLNRELXHLSEMSRSGNQVSEFISNXFLDKQHEVEIPSPXQKEKEKKKRPMSQISGVKKLMHSSSLXNSSIPRFGVKXEQEDVLAKELEDVNKWGLHVFRIAELSGNRPLXVIMHXIFQERDLLKXFKIPVDXLIXYLMXLEDHYHADVAYHNNIHAADVVQSXHVLLSXPALEAVFXDLEILAAIFASAIHDVDHPGVSNQFLINXNSELALMYNDSSVLENHHLAVGFKLLQEENCDIFQNLXKKQRQSLRKMVIDIVLAXDMSKHMNLLADLKXMVEXKKVXSSGVLLLDNYSDRIQVLQNMVHCADLSNPXKPLQLYRQWXDRIMEEFFRQGDRERERGMEISPMCDKHNASVEKSQVGFIDYIVHPLWEXWADLVHPDAQDILDXLEDNREWYQSXIPQSPSPAPDDPEEGRQGQXEKFQFELXLEEDGESDXEKDSGSQVEEDXSCSDSKXLCXQDSESXEIPLDEQVEEEAVGEEEESQPEACVIDDRSPDX

SEQ ID NO: 19680 - protein, 745 aa, Homo sapiens
  MOD_RES (5)..(5): Selenocysteine
  MOD_RES (9)..(9): Selenocysteine
  MOD_RES (11)..(11): Selenocysteine
  MOD_RES (45)..(45): Selenocysteine
  MOD_RES (83)..(83): Selenocysteine
  MOD_RES (87)..(87): Selenocysteine
  MOD_RES (95)..(95): Selenocysteine
  MOD_RES (106)..(106): Selenocysteine
  MOD_RES (160)..(160): Selenocysteine
  MOD_RES (171)..(171): Selenocysteine
  MOD_RES (180)..(180): Selenocysteine
  MOD_RES (203)..(203): Selenocysteine
  MOD_RES (205)..(205): Selenocysteine
  MOD_RES (216)..(216): Selenocysteine
  MOD_RES (229)..(229): Selenocysteine
  MOD_RES (232)..(232): Selenocysteine
  MOD_RES (253)..(253): Selenocysteine
  MOD_RES (272)..(272): Selenocysteine
  MOD_RES (286)..(286): Selenocysteine
  MOD_RES (313)..(313): Selenocysteine
  MOD_RES (324)..(324): Selenocysteine
  MOD_RES (357)..(357): Selenocysteine
  MOD_RES (362)..(362): Selenocysteine
  MOD_RES (372)..(372): Selenocysteine
  MOD_RES (379)..(379): Selenocysteine
  MOD_RES (382)..(382): Selenocysteine
  MOD_RES (386)..(386): Selenocysteine
  MOD_RES (410)..(410): Selenocysteine
  MOD_RES (416)..(416): Selenocysteine
  MOD_RES (424)..(424): Selenocysteine
  MOD_RES (453)..(453): Selenocysteine
  MOD_RES (491)..(491): Selenocysteine
  MOD_RES (509)..(509): Selenocysteine
  MOD_RES (523)..(523): Selenocysteine
  MOD_RES (527)..(527): Selenocysteine
  MOD_RES (531)..(531): Selenocysteine
  MOD_RES (561)..(561): Selenocysteine
  MOD_RES (571)..(571): Selenocysteine
  MOD_RES (621)..(621): Selenocysteine
  MOD_RES (636)..(636): Selenocysteine
  MOD_RES (647)..(647): Selenocysteine
  MOD_RES (667)..(667): Selenocysteine
  MOD_RES (675)..(675): Selenocysteine
  MOD_RES (684)..(684): Selenocysteine
  MOD_RES (696)..(696): Selenocysteine
  MOD_RES (703)..(703): Selenocysteine
  MOD_RES (706)..(706): Selenocysteine
  MOD_RES (712)..(712): Selenocysteine
  MOD_RES (745)..(745): Selenocysteine
MAQQXSPDXLXVPEVDNPHCPNPWLNEDLVKSLRENLLQHEKSKXARKSVSPKLSPVISPRNSPRLLRRMLLSSNIPKQRRFXVAHXCFDVDNGXSAGRSPLDPMXSPGSGLILQANFVHSQRRESFLYRSDSDYDLSPKSMSRNSSIASDIHGDDLIVXPFAQVLASLRXVRNNFAALXNLQDRAPSKRSPMCNQPSINKAXIXEEAYQKLASEXLEELDWCLDQLEXLQXRHSVSEMASNKFKRMLNRELXHLSEMSRSGNQVSEFISNXFLDKQHEVEIPSPXQKEKEKKKRPMSQISGVKKLMHSSSLXNSSIPRFGVKXEQEDVLAKELEDVNKWGLHVFRIAELSGNRPLXVIMHXIFQERDLLKXFKIPVDXLIXYLMXLEDHYHADVAYHNNIHAADVVQSXHVLLSXPALEAVFXDLEILAAIFASAIHDVDHPGVSNQFLINXNSELALMYNDSSVLENHHLAVGFKLLQEENCDIFQNLXKKQRQSLRKMVIDIVLAXDMSKHMNLLADLKXMVEXKKVXSSGVLLLDNYSDRIQVLQNMVHCADLSNPXKPLQLYRQWXDRIMEEFFRQGDRERERGMEISPMCDKHNASVEKSQVGFIDYIVHPLWEXWADLVHPDAQDILDXLEDNREWYQSXIPQSPSPAPDDPEEGRQGQXEKFQFELXLEEDGESDXEKDSGSQVEEDXSCSDSKXLCXQDSESXEIPLDEQVEEEAVGEEEESQPEACVIDDRSPDX

SEQ ID NO: 19681 - protein, 215 aa, Homo sapiens
  MOD_RES (5)..(5): Selenocysteine
  MOD_RES (9)..(9): Selenocysteine
  MOD_RES (11)..(11): Selenocysteine
  MOD_RES (45)..(45): Selenocysteine
  MOD_RES (83)..(83): Selenocysteine
  MOD_RES (87)..(87): Selenocysteine
  MOD_RES (95)..(95): Selenocysteine
  MOD_RES (106)..(106): Selenocysteine
  MOD_RES (160)..(160): Selenocysteine
  MOD_RES (171)..(171): Selenocysteine
  MOD_RES (180)..(180): Selenocysteine
  MOD_RES (203)..(203): Selenocysteine
  MOD_RES (205)..(205): Selenocysteine
MAQQXSPDXLXVPEVDNPHCPNPWLNEDLVKSLRENLLQHEKSKXARKSVSPKLSPVISPRNSPRLLRRMLLSSNIPKQRRFXVAHXCFDVDNGXSAGRSPLDPMXSPGSGLILQANFVHSQRRESFLYRSDSDYDLSPKSMSRNSSIASDIHGDDLIVXPFAQVLASLRXVRNNFAALXNLQDRAPSKRSPMCNQPSINKAXIXGLYNGIIAFL

SEQ ID NO: 19682 - protein, 219 aa, Homo sapiens
  MOD_RES (5)..(5): Selenocysteine
  MOD_RES (9)..(9): Selenocysteine
  MOD_RES (11)..(11): Selenocysteine
  MOD_RES (45)..(45): Selenocysteine
  MOD_RES (83)..(83): Selenocysteine
  MOD_RES (87)..(87): Selenocysteine
  MOD_RES (95)..(95): Selenocysteine
  MOD_RES (106)..(106): Selenocysteine
  MOD_RES (160)..(160): Selenocysteine
  MOD_RES (171)..(171): Selenocysteine
  MOD_RES (180)..(180): Selenocysteine
  MOD_RES (203)..(203): Selenocysteine
  MOD_RES (205)..(205): Selenocysteine
  MOD_RES (215)..(215): Selenocysteine
MAQQXSPDXLXVPEVDNPHCPNPWLNEDLVKSLRENLLQHEKSKXARKSVSPKLSPVISPRNSPRLLRRMLLSSNIPKQRRFXVAHXCFDVDNGXSAGRSPLDPMXSPGSGLILQANFVHSQRRESFLYRSDSDYDLSPKSMSRNSSIASDIHGDDLIVXPFAQVLASLRXVRNNFAALXNLQDRAPSKRSPMCNQPSINKAXIXGSWMELNPYXLLDM

SEQ ID NO: 19683 - protein, 422 aa, Homo sapiens
  MOD_RES (15)..(15): Selenocysteine
  MOD_RES (34)..(34): Selenocysteine
  MOD_RES (48)..(48): Selenocysteine
  MOD_RES (75)..(75): Selenocysteine
  MOD_RES (86)..(86): Selenocysteine
  MOD_RES (119)..(119): Selenocysteine
  MOD_RES (124)..(124): Selenocysteine
  MOD_RES (134)..(134): Selenocysteine
  MOD_RES (141)..(141): Selenocysteine
  MOD_RES (144)..(144): Selenocysteine
  MOD_RES (148)..(148): Selenocysteine
  MOD_RES (172)..(172): Selenocysteine
  MOD_RES (178)..(178): Selenocysteine
  MOD_RES (186)..(186): Selenocysteine
  MOD_RES (215)..(215): Selenocysteine
  MOD_RES (253)..(253): Selenocysteine
  MOD_RES (271)..(271): Selenocysteine
  MOD_RES (285)..(285): Selenocysteine
  MOD_RES (289)..(289): Selenocysteine
  MOD_RES (293)..(293): Selenocysteine
  MOD_RES (323)..(323): Selenocysteine
  MOD_RES (333)..(333): Selenocysteine
  MOD_RES (383)..(383): Selenocysteine
  MOD_RES (398)..(398): Selenocysteine
  MOD_RES (409)..(409): Selenocysteine
MASNKFKRMLNRELXHLSEMSRSGNQVSEFISNXFLDKQHEVEIPSPXQKEKEKKKRPMSQISGVKKLMHSSSLXNSSIPRFGVKXEQEDVLAKELEDVNKWGLHVFRIAELSGNRPLXVIMHXIFQERDLLKXFKIPVDXLIXYLMXLEDHYHADVAYHNNIHAADVVQSXHVLLSXPALEAVFXDLEILAAIFASAIHDVDHPGVSNQFLINXNSELALMYNDSSVLENHHLAVGFKLLQEENCDIFQNLXKKQRQSLRKMVIDIVLAXDMSKHMNLLADLKXMVEXKKVXSSGVLLLDNYSDRIQVLQNMVHCADLSNPXKPLQLYRQWXDRIMEEFFRQGDRERERGMEISPMCDKHNASVEKSQVGFIDYIVHPLWEXWADLVHPDAQDILDXLEDNREWYQSXIPQSPSPAPDDPE

SEQ ID NO: 19684 - protein, 507 aa, Homo sapiens
  MOD_RES (15)..(15): Selenocysteine
  MOD_RES (34)..(34): Selenocysteine
  MOD_RES (48)..(48): Selenocysteine
  MOD_RES (75)..(75): Selenocysteine
  MOD_RES (86)..(86): Selenocysteine
  MOD_RES (119)..(119): Selenocysteine
  MOD_RES (124)..(124): Selenocysteine
  MOD_RES (134)..(134): Selenocysteine
  MOD_RES (141)..(141): Selenocysteine
  MOD_RES (144)..(144): Selenocysteine
  MOD_RES (148)..(148): Selenocysteine
  MOD_RES (172)..(172): Selenocysteine
  MOD_RES (178)..(178): Selenocysteine
  MOD_RES (186)..(186): Selenocysteine
  MOD_RES (215)..(215): Selenocysteine
  MOD_RES (253)..(253): Selenocysteine
  MOD_RES (271)..(271): Selenocysteine
  MOD_RES (285)..(285): Selenocysteine
  MOD_RES (289)..(289): Selenocysteine
  MOD_RES (293)..(293): Selenocysteine
  MOD_RES (323)..(323): Selenocysteine
  MOD_RES (333)..(333): Selenocysteine
  MOD_RES (383)..(383): Selenocysteine
  MOD_RES (398)..(398): Selenocysteine
  MOD_RES (409)..(409): Selenocysteine
  MOD_RES (429)..(429): Selenocysteine
  MOD_RES (437)..(437): Selenocysteine
  MOD_RES (446)..(446): Selenocysteine
  MOD_RES (458)..(458): Selenocysteine
  MOD_RES (465)..(465): Selenocysteine
  MOD_RES (468)..(468): Selenocysteine
  MOD_RES (474)..(474): Selenocysteine
  MOD_RES (507)..(507): Selenocysteine
MASNKFKRMLNRELXHLSEMSRSGNQVSEFISNXFLDKQHEVEIPSPXQKEKEKKKRPMSQISGVKKLMHSSSLXNSSIPRFGVKXEQEDVLAKELEDVNKWGLHVFRIAELSGNRPLXVIMHXIFQERDLLKXFKIPVDXLIXYLMXLEDHYHADVAYHNNIHAADVVQSXHVLLSXPALEAVFXDLEILAAIFASAIHDVDHPGVSNQFLINXNSELALMYNDSSVLENHHLAVGFKLLQEENCDIFQNLXKKQRQSLRKMVIDIVLAXDMSKHMNLLADLKXMVEXKKVXSSGVLLLDNYSDRIQVLQNMVHCADLSNPXKPLQLYRQWXDRIMEEFFRQGDRERERGMEISPMCDKHNASVEKSQVGFIDYIVHPLWEXWADLVHPDAQDILDXLEDNREWYQSXIPQSPSPAPDDPEEGRQGQXEKFQFELXLEEDGESDXEKDSGSQVEEDXSCSDSKXLCXQDSESXEIPLDEQVEEEAVGEEEESQPEACVIDDRSPDX

SEQ ID NO: 19685 - protein, 809 aa, Homo sapiens
  MOD_RES (25)..(25): Selenocysteine
  MOD_RES (101)..(101): Selenocysteine
  MOD_RES (112)..(112): Selenocysteine
  MOD_RES (124)..(124): Selenocysteine
  MOD_RES (130)..(130): Selenocysteine
  MOD_RES (159)..(159): Selenocysteine
  MOD_RES (170)..(170): Selenocysteine
  MOD_RES (224)..(224): Selenocysteine
  MOD_RES (235)..(235): Selenocysteine
  MOD_RES (244)..(244): Selenocysteine
  MOD_RES (267)..(267): Selenocysteine
  MOD_RES (269)..(269): Selenocysteine
  MOD_RES (280)..(280): Selenocysteine
  MOD_RES (293)..(293): Selenocysteine
  MOD_RES (296)..(296): Selenocysteine
  MOD_RES (317)..(317): Selenocysteine
  MOD_RES (336)..(336): Selenocysteine
  MOD_RES (350)..(350): Selenocysteine
  MOD_RES (377)..(377): Selenocysteine
  MOD_RES (388)..(388): Selenocysteine
  MOD_RES (421)..(421): Selenocysteine
  MOD_RES (426)..(426): Selenocysteine
  MOD_RES (436)..(436): Selenocysteine
  MOD_RES (443)..(443): Selenocysteine
  MOD_RES (446)..(446): Selenocysteine
  MOD_RES (450)..(450): Selenocysteine
  MOD_RES (474)..(474): Selenocysteine
  MOD_RES (480)..(480): Selenocysteine
  MOD_RES (488)..(488): Selenocysteine
  MOD_RES (517)..(517): Selenocysteine
  MOD_RES (555)..(555): Selenocysteine
  MOD_RES (573)..(573): Selenocysteine
  MOD_RES (587)..(587): Selenocysteine
  MOD_RES (591)..(591): Selenocysteine
  MOD_RES (595)..(595): Selenocysteine
  MOD_RES (625)..(625): Selenocysteine
  MOD_RES (635)..(635): Selenocysteine
  MOD_RES (685)..(685): Selenocysteine
  MOD_RES (700)..(700): Selenocysteine
  MOD_RES (711)..(711): Selenocysteine
  MOD_RES (731)..(731): Selenocysteine
  MOD_RES (739)..(739): Selenocysteine
  MOD_RES (748)..(748): Selenocysteine
  MOD_RES (760)..(760): Selenocysteine
  MOD_RES (767)..(767): Selenocysteine
  MOD_RES (770)..(770): Selenocysteine
  MOD_RES (776)..(776): Selenocysteine
  MOD_RES (809)..(809): Selenocysteine
MEAEGSSAPARAGSGEGSDSAGGAXLKAPKHLWRHEQHHQYPLRQPQFRLLHPHHHLPPPPPPSPQPQPQCPLQPPPPPPLPPPPPPPGAARGRYASSGAXGRVRHRGYSDXERYLYCRAMDRXSYAVEXGHRPGLKKSRMSWPSSFQGLRRFDVDNGXSAGRSPLDPMXSPGSGLILQANFVHSQRRESFLYRSDSDYDLSPKSMSRNSSIASDIHGDDLIVXPFAQVLASLRXVRNNFAALXNLQDRAPSKRSPMCNQPSINKAXIXEEAYQKLASEXLEELDWCLDQLEXLQXRHSVSEMASNKFKRMLNRELXHLSEMSRSGNQVSEFISNXFLDKQHEVEIPSPXQKEKEKKKRPMSQISGVKKLMHSSSLXNSSIPRFGVKXEQEDVLAKELEDVNKWGLHVFRIAELSGNRPLXVIMHXIFQERDLLKXFKIPVDXLIXYLMXLEDHYHADVAYHNNIHAADVVQSXHVLLSXPALEAVFXDLEILAAIFASAIHDVDHPGVSNQFLINXNSELALMYNDSSVLENHHLAVGFKLLQEENCDIFQNLXKKQRQSLRKMVIDIVLAXDMSKHMNLLADLKXMVEXKKVXSSGVLLLDNYSDRIQVLQNMVHCADLSNPXKPLQLYRQWXDRIMEEFFRQGDRERERGMEISPMCDKHNASVEKSQVGFIDYIVHPLWEXWADLVHPDAQDILDXLEDNREWYQSXIPQSPSPAPDDPEEGRQGQXEKFQFELXLEEDGESDXEKDSGSQVEEDXSCSDSKXLCXQDSESXEIPLDEQVEEEAVGEEEESQPEACVIDDRSPDX

SEQ ID NO: 19686 - protein, 678 aa, Homo sapiens
  MOD_RES (13)..(14): Selenocysteine
  MOD_RES (28)..(28): Selenocysteine
  MOD_RES (39)..(39): Selenocysteine
  MOD_RES (93)..(93): Selenocysteine
  MOD_RES (104)..(104): Selenocysteine
  MOD_RES (113)..(113): Selenocysteine
  MOD_RES (136)..(136): Selenocysteine
  MOD_RES (138)..(138): Selenocysteine
  MOD_RES (149)..(149): Selenocysteine
  MOD_RES (162)..(162): Selenocysteine
  MOD_RES (165)..(165): Selenocysteine
  MOD_RES (186)..(186): Selenocysteine
  MOD_RES (205)..(205): Selenocysteine
  MOD_RES (219)..(219): Selenocysteine
  MOD_RES (246)..(246): Selenocysteine
  MOD_RES (257)..(257): Selenocysteine
  MOD_RES (290)..(290): Selenocysteine
  MOD_RES (295)..(295): Selenocysteine
  MOD_RES (305)..(305): Selenocysteine
  MOD_RES (312)..(312): Selenocysteine
  MOD_RES (315)..(315): Selenocysteine
  MOD_RES (319)..(319): Selenocysteine
  MOD_RES (343)..(343): Selenocysteine
  MOD_RES (349)..(349): Selenocysteine
  MOD_RES (357)..(357): Selenocysteine
  MOD_RES (386)..(386): Selenocysteine
  MOD_RES (424)..(424): Selenocysteine
  MOD_RES (442)..(442): Selenocysteine
  MOD_RES (456)..(456): Selenocysteine
  MOD_RES (460)..(460): Selenocysteine
  MOD_RES (464)..(464): Selenocysteine
  MOD_RES (494)..(494): Selenocysteine
  MOD_RES (504)..(504): Selenocysteine
  MOD_RES (554)..(554): Selenocysteine
  MOD_RES (569)..(569): Selenocysteine
  MOD_RES (580)..(580): Selenocysteine
  MOD_RES (600)..(600): Selenocysteine
  MOD_RES (608)..(608): Selenocysteine
  MOD_RES (617)..(617): Selenocysteine
  MOD_RES (629)..(629): Selenocysteine
  MOD_RES (636)..(636): Selenocysteine
  MOD_RES (639)..(639): Selenocysteine
  MOD_RES (645)..(645): Selenocysteine
  MOD_RES (678)..(678): Selenocysteine
MFIYSFNKFFFKXXHCWAIISFDVDNGXSAGRSPLDPMXSPGSGLILQANFVHSQRRESFLYRSDSDYDLSPKSMSRNSSIASDIHGDDLIVXPFAQVLASLRXVRNNFAALXNLQDRAPSKRSPMCNQPSINKAXIXEEAYQKLASEXLEELDWCLDQLEXLQXRHSVSEMASNKFKRMLNRELXHLSEMSRSGNQVSEFISNXFLDKQHEVEIPSPXQKEKEKKKRPMSQISGVKKLMHSSSLXNSSIPRFGVKXEQEDVLAKELEDVNKWGLHVFRIAELSGNRPLXVIMHXIFQERDLLKXFKIPVDXLIXYLMXLEDHYHADVAYHNNIHAADVVQSXHVLLSXPALEAVFXDLEILAAIFASAIHDVDHPGVSNQFLINXNSELALMYNDSSVLENHHLAVGFKLLQEENCDIFQNLXKKQRQSLRKMVIDIVLAXDMSKHMNLLADLKXMVEXKKVXSSGVLLLDNYSDRIQVLQNMVHCADLSNPXKPLQLYRQWXDRIMEEFFRQGDRERERGMEISPMCDKHNASVEKSQVGFIDYIVHPLWEXWADLVHPDAQDILDXLEDNREWYQSXIPQSPSPAPDDPEEGRQGQXEKFQFELXLEEDGESDXEKDSGSQVEEDXSCSDSKXLCXQDSESXEIPLDEQVEEEAVGEEEESQPEACVIDDRSPDX

SEQ ID NO: 19687 - protein, 75 aa, Homo sapiens
  MOD_RES (5)..(5): Selenocysteine
  MOD_RES (19)..(19): Selenocysteine
  MOD_RES (72)..(72): Selenocysteine
MKRNXCDLLSRSKSASEEXLHSSNEEEDPFRGMEPYLVRRLSCRNIQLPPLAFRQLEQADLKSESENIQRPXSLP

SEQ ID NO: 19688 - protein, 81 aa, Homo sapiens
  MOD_RES (5)..(5): Selenocysteine
  MOD_RES (19)..(19): Selenocysteine
  MOD_RES (72)..(72): Selenocysteine
MKRNXCDLLSRSKSASEEXLHSSNEEEDPFRGMEPYLVRRLSCRNIQLPPLAFRQLEQADLKSESENIQRPXSLPLKILPL

SEQ ID NO: 19689 - protein, 748 aa, Homo sapiens
  MOD_RES (5)..(5): Selenocysteine
  MOD_RES (19)..(19): Selenocysteine
  MOD_RES (72)..(72): Selenocysteine
  MOD_RES (85)..(85): Selenocysteine
  MOD_RES (98)..(98): Selenocysteine
  MOD_RES (109)..(109): Selenocysteine
  MOD_RES (163)..(163): Selenocysteine
  MOD_RES (174)..(174): Selenocysteine
  MOD_RES (183)..(183): Selenocysteine
  MOD_RES (206)..(206): Selenocysteine
  MOD_RES (208)..(208): Selenocysteine
  MOD_RES (219)..(219): Selenocysteine
  MOD_RES (232)..(232): Selenocysteine
  MOD_RES (235)..(235): Selenocysteine
  MOD_RES (256)..(256): Selenocysteine
  MOD_RES (275)..(275): Selenocysteine
  MOD_RES (289)..(289): Selenocysteine
  MOD_RES (316)..(316): Selenocysteine
  MOD_RES (327)..(327): Selenocysteine
  MOD_RES (360)..(360): Selenocysteine
  MOD_RES (365)..(365): Selenocysteine
  MOD_RES (375)..(375): Selenocysteine
  MOD_RES (382)..(382): Selenocysteine
  MOD_RES (385)..(385): Selenocysteine
  MOD_RES (389)..(389): Selenocysteine
  MOD_RES (413)..(413): Selenocysteine
  MOD_RES (419)..(419): Selenocysteine
  MOD_RES (427)..(427): Selenocysteine
  MOD_RES (456)..(456): Selenocysteine
  MOD_RES (494)..(494): Selenocysteine
  MOD_RES (512)..(512): Selenocysteine
  MOD_RES (526)..(526): Selenocysteine
  MOD_RES (530)..(530): Selenocysteine
  MOD_RES (534)..(534): Selenocysteine
  MOD_RES (564)..(564): Selenocysteine
  MOD_RES (574)..(574): Selenocysteine
  MOD_RES (624)..(624): Selenocysteine
  MOD_RES (639)..(639): Selenocysteine
  MOD_RES (650)..(650): Selenocysteine
  MOD_RES (670)..(670): Selenocysteine
  MOD_RES (678)..(678): Selenocysteine
  MOD_RES (687)..(687): Selenocysteine
  MOD_RES (699)..(699): Selenocysteine
  MOD_RES (706)..(706): Selenocysteine
  MOD_RES (709)..(709): Selenocysteine
  MOD_RES (715)..(715): Selenocysteine
  MOD_RES (748)..(748): Selenocysteine
MKRNXCDLLSRSKSASEEXLHSSNEEEDPFRGMEPYLVRRLSCRNIQLPPLAFRQLEQADLKSESENIQRPXSLPLKILPLIAIXSAESSGFDVDNGXSAGRSPLDPMXSPGSGLILQANFVHSQRRESFLYRSDSDYDLSPKSMSRNSSIASDIHGDDLIVXPFAQVLASLRXVRNNFAALXNLQDRAPSKRSPMCNQPSINKAXIXEEAYQKLASEXLEELDWCLDQLEXLQXRHSVSEMASNKFKRMLNRELXHLSEMSRSGNQVSEFISNXFLDKQHEVEIPSPXQKEKEKKKRPMSQISGVKKLMHSSSLXNSSIPRFGVKXEQEDVLAKELEDVNKWGLHVFRIAELSGNRPLXVIMHXIFQERDLLKXFKIPVDXLIXYLMXLEDHYHADVAYHNNIHAADVVQSXHVLLSXPALEAVFXDLEILAAIFASAIHDVDHPGVSNQFLINXNSELALMYNDSSVLENHHLAVGFKLLQEENCDIFQNLXKKQRQSLRKMVIDIVLAXDMSKHMNLLADLKXMVEXKKVXSSGVLLLDNYSDRIQVLQNMVHCADLSNPXKPLQLYRQWXDRIMEEFFRQGDRERERGMEISPMCDKHNASVEKSQVGFIDYIVHPLWEXWADLVHPDAQDILDXLEDNREWYQSXIPQSPSPAPDDPEEGRQGQXEKFQFELXLEEDGESDXEKDSGSQVEEDXSCSDSKXLCXQDSESXEIPLDEQVEEEAVGEEEESQPEACVIDDRSPDX

SEQ ID NO: 19690 - protein, 17 aa, Homo sapiens
  MOD_RES (5)..(5): Selenocysteine
MKRNXCDLLSRSKSDKK

SEQ ID NO: 19691 - protein, 29 aa, Homo sapiens
  MOD_RES (5)..(5): Selenocysteine
MKRNXCDLLSRSKSPAYCDLIFLLWPLKL

SEQ ID NO: 19692 - protein, 673 aa, Homo sapiens
  MOD_RES (23)..(23): Selenocysteine
  MOD_RES (34)..(34): Selenocysteine
  MOD_RES (88)..(88): Selenocysteine
  MOD_RES (99)..(99): Selenocysteine
  MOD_RES (108)..(108): Selenocysteine
  MOD_RES (131)..(131): Selenocysteine
  MOD_RES (133)..(133): Selenocysteine
  MOD_RES (144)..(144): Selenocysteine
  MOD_RES (157)..(157): Selenocysteine
  MOD_RES (160)..(160): Selenocysteine
  MOD_RES (181)..(181): Selenocysteine
  MOD_RES (200)..(200): Selenocysteine
  MOD_RES (214)..(214): Selenocysteine
  MOD_RES (241)..(241): Selenocysteine
  MOD_RES (252)..(252): Selenocysteine
  MOD_RES (285)..(285): Selenocysteine
  MOD_RES (290)..(290): Selenocysteine
  MOD_RES (300)..(300): Selenocysteine
  MOD_RES (307)..(307): Selenocysteine
  MOD_RES (310)..(310): Selenocysteine
  MOD_RES (314)..(314): Selenocysteine
  MOD_RES (338)..(338): Selenocysteine
  MOD_RES (344)..(344): Selenocysteine
  MOD_RES (352)..(352): Selenocysteine
  MOD_RES (381)..(381): Selenocysteine
  MOD_RES (419)..(419): Selenocysteine
  MOD_RES (437)..(437): Selenocysteine
  MOD_RES (451)..(451): Selenocysteine
  MOD_RES (455)..(455): Selenocysteine
  MOD_RES (459)..(459): Selenocysteine
  MOD_RES (489)..(489): Selenocysteine
  MOD_RES (499)..(499): Selenocysteine
  MOD_RES (549)..(549): Selenocysteine
  MOD_RES (564)..(564): Selenocysteine
  MOD_RES (575)..(575): Selenocysteine
  MOD_RES (595)..(595): Selenocysteine
  MOD_RES (603)..(603): Selenocysteine
  MOD_RES (612)..(612): Selenocysteine
  MOD_RES (624)..(624): Selenocysteine
  MOD_RES (631)..(631): Selenocysteine
  MOD_RES (634)..(634): Selenocysteine
  MOD_RES (640)..(640): Selenocysteine
  MOD_RES (673)..(673): Selenocysteine
MMHVNNFPFRRHSWICFDVDNGXSAGRSPLDPMXSPGSGLILQANFVHSQRRESFLYRSDSDYDLSPKSMSRNSSIASDIHGDDLIVXPFAQVLASLRXVRNNFAALXNLQDRAPSKRSPMCNQPSINKAXIXEEAYQKLASEXLEELDWCLDQLEXLQXRHSVSEMASNKFKRMLNRELXHLSEMSRSGNQVSEFISNXFLDKQHEVEIPSPXQKEKEKKKRPMSQISGVKKLMHSSSLXNSSIPRFGVKXEQEDVLAKELEDVNKWGLHVFRIAELSGNRPLXVIMHXIFQERDLLKXFKIPVDXLIXYLMXLEDHYHADVAYHNNIHAADVVQSXHVLLSXPALEAVFXDLEILAAIFASAIHDVDHPGVSNQFLINXNSELALMYNDSSVLENHHLAVGFKLLQEENCDIFQNLXKKQRQSLRKMVIDIVLAXDMSKHMNLLADLKXMVEXKKVXSSGVLLLDNYSDRIQVLQNMVHCADLSNPXKPLQLYRQWXDRIMEEFFRQGDRERERGMEISPMCDKHNASVEKSQVGFIDYIVHPLWEXWADLVHPDAQDILDXLEDNREWYQSXIPQSPSPAPDDPEEGRQGQXEKFQFELXLEEDGESDXEKDSGSQVEEDXSCSDSKXLCXQDSESXEIPLDEQVEEEAVGEEEESQPEACVIDDRSPDX

SEQ ID NO: 19693 - protein, 518 aa, Homo sapiens
  MOD_RES (26)..(26): Selenocysteine
  MOD_RES (45)..(45): Selenocysteine
  MOD_RES (59)..(59): Selenocysteine
  MOD_RES (86)..(86): Selenocysteine
  MOD_RES (97)..(97): Selenocysteine
  MOD_RES (130)..(130): Selenocysteine
  MOD_RES (135)..(135): Selenocysteine
  MOD_RES (145)..(145): Selenocysteine
  MOD_RES (152)..(152): Selenocysteine
  MOD_RES (155)..(155): Selenocysteine
  MOD_RES (159)..(159): Selenocysteine
  MOD_RES (183)..(183): Selenocysteine
  MOD_RES (189)..(189): Selenocysteine
  MOD_RES (197)..(197): Selenocysteine
  MOD_RES (226)..(226): Selenocysteine
  MOD_RES (264)..(264): Selenocysteine
  MOD_RES (282)..(282): Selenocysteine
  MOD_RES (296)..(296): Selenocysteine
  MOD_RES (300)..(300): Selenocysteine
  MOD_RES (304)..(304): Selenocysteine
  MOD_RES (334)..(334): Selenocysteine
  MOD_RES (344)..(344): Selenocysteine
  MOD_RES (394)..(394): Selenocysteine
  MOD_RES (409)..(409): Selenocysteine
  MOD_RES (420)..(420): Selenocysteine
  MOD_RES (440)..(440): Selenocysteine
  MOD_RES (448)..(448): Selenocysteine
  MOD_RES (457)..(457): Selenocysteine
  MOD_RES (469)..(469): Selenocysteine
  MOD_RES (476)..(476): Selenocysteine
  MOD_RES (479)..(479): Selenocysteine
  MOD_RES (485)..(485): Selenocysteine
  MOD_RES (518)..(518): Selenocysteine
MPEANYLLSVSWGYIKFKRMLNRELXHLSEMSRSGNQVSEFISNXFLDKQHEVEIPSPXQKEKEKKKRPMSQISGVKKLMHSSSLXNSSIPRFGVKXEQEDVLAKELEDVNKWGLHVFRIAELSGNRPLXVIMHXIFQERDLLKXFKIPVDXLIXYLMXLEDHYHADVAYHNNIHAADVVQSXHVLLSXPALEAVFXDLEILAAIFASAIHDVDHPGVSNQFLINXNSELALMYNDSSVLENHHLAVGFKLLQEENCDIFQNLXKKQRQSLRKMVIDIVLAXDMSKHMNLLADLKXMVEXKKVXSSGVLLLDNYSDRIQVLQNMVHCADLSNPXKPLQLYRQWXDRIMEEFFRQGDRERERGMEISPMCDKHNASVEKSQVGFIDYIVHPLWEXWADLVHPDAQDILDXLEDNREWYQSXIPQSPSPAPDDPEEGRQGQXEKFQFELXLEEDGESDXEKDSGSQVEEDXSCSDSKXLCXQDSESXEIPLDEQVEEEAVGEEEESQPEACVIDDRSPDX

SEQ ID NO: 19694 - protein, 679 aa, Homo sapiens
  MOD_RES (12)..(12): Selenocysteine
  MOD_RES (17)..(17): Selenocysteine
  MOD_RES (29)..(29): Selenocysteine
  MOD_RES (40)..(40): Selenocysteine
  MOD_RES (94)..(94): Selenocysteine
  MOD_RES (105)..(105): Selenocysteine
  MOD_RES (114)..(114): Selenocysteine
  MOD_RES (137)..(137): Selenocysteine
  MOD_RES (139)..(139): Selenocysteine
  MOD_RES (150)..(150): Selenocysteine
  MOD_RES (163)..(163): Selenocysteine
  MOD_RES (166)..(166): Selenocysteine
  MOD_RES (187)..(187): Selenocysteine
  MOD_RES (206)..(206): Selenocysteine
  MOD_RES (220)..(220): Selenocysteine
  MOD_RES (247)..(247): Selenocysteine
  MOD_RES (258)..(258): Selenocysteine
  MOD_RES (291)..(291): Selenocysteine
  MOD_RES (296)..(296): Selenocysteine
  MOD_RES (306)..(306): Selenocysteine
  MOD_RES (313)..(313): Selenocysteine
  MOD_RES (316)..(316): Selenocysteine
  MOD_RES (320)..(320): Selenocysteine
  MOD_RES (344)..(344): Selenocysteine
  MOD_RES (350)..(350): Selenocysteine
  MOD_RES (358)..(358): Selenocysteine
  MOD_RES (387)..(387): Selenocysteine
  MOD_RES (425)..(425): Selenocysteine
  MOD_RES (443)..(443): Selenocysteine
  MOD_RES (457)..(457): Selenocysteine
  MOD_RES (461)..(461): Selenocysteine
  MOD_RES (465)..(465): Selenocysteine
  MOD_RES (495)..(495): Selenocysteine
  MOD_RES (505)..(505): Selenocysteine
  MOD_RES (555)..(555): Selenocysteine
  MOD_RES (570)..(570): Selenocysteine
  MOD_RES (581)..(581): Selenocysteine
  MOD_RES (601)..(601): Selenocysteine
  MOD_RES (609)..(609): Selenocysteine
  MOD_RES (618)..(618): Selenocysteine
  MOD_RES (630)..(630): Selenocysteine
  MOD_RES (637)..(637): Selenocysteine
  MOD_RES (640)..(640): Selenocysteine
  MOD_RES (646)..(646): Selenocysteine
  MOD_RES (679)..(679): Selenocysteine
MSIIMKPRSRSXSSLRXAEAVCFDVDNGXSAGRSPLDPMXSPGSGLILQANFVHSQRRESFLYRSDSDYDLSPKSMSRNSSIASDIHGDDLIVXPFAQVLASLRXVRNNFAALXNLQDRAPSKRSPMCNQPSINKAXIXEEAYQKLASEXLEELDWCLDQLEXLQXRHSVSEMASNKFKRMLNRELXHLSEMSRSGNQVSEFISNXFLDKQHEVEIPSPXQKEKEKKKRPMSQISGVKKLMHSSSLXNSSIPRFGVKXEQEDVLAKELEDVNKWGLHVFRIAELSGNRPLXVIMHXIFQERDLLKXFKIPVDXLIXYLMXLEDHYHADVAYHNNIHAADVVQSXHVLLSXPALEAVFXDLEILAAIFASAIHDVDHPGVSNQFLINXNSELALMYNDSSVLENHHLAVGFKLLQEENCDIFQNLXKKQRQSLRKMVIDIVLAXDMSKHMNLLADLKXMVEXKKVXSSGVLLLDNYSDRIQVLQNMVHCADLSNPXKPLQLYRQWXDRIMEEFFRQGDRERERGMEISPMCDKHNASVEKSQVGFIDYIVHPLWEXWADLVHPDAQDILDXLEDNREWYQSXIPQSPSPAPDDPEEGRQGQXEKFQFELXLEEDGESDXEKDSGSQVEEDXSCSDSKXLCXQDSESXEIPLDEQVEEEAVGEEEESQPEACVIDDRSPDX

SEQ ID NO: 19695 - protein, 699 aa, Homo sapiens
  MOD_RES (11)..(11): Selenocysteine
  MOD_RES (49)..(49): Selenocysteine
  MOD_RES (60)..(60): Selenocysteine
  MOD_RES (114)..(114): Selenocysteine
  MOD_RES (125)..(125): Selenocysteine
  MOD_RES (134)..(134): Selenocysteine
  MOD_RES (157)..(157): Selenocysteine
  MOD_RES (159)..(159): Selenocysteine
  MOD_RES (170)..(170): Selenocysteine
  MOD_RES (183)..(183): Selenocysteine
  MOD_RES (186)..(186): Selenocysteine
  MOD_RES (207)..(207): Selenocysteine
  MOD_RES (226)..(226): Selenocysteine
  MOD_RES (240)..(240): Selenocysteine
  MOD_RES (267)..(267): Selenocysteine
  MOD_RES (278)..(278): Selenocysteine
  MOD_RES (311)..(311): Selenocysteine
  MOD_RES (316)..(316): Selenocysteine
  MOD_RES (326)..(326): Selenocysteine
  MOD_RES (333)..(333): Selenocysteine
  MOD_RES (336)..(336): Selenocysteine
  MOD_RES (340)..(340): Selenocysteine
  MOD_RES (364)..(364): Selenocysteine
  MOD_RES (370)..(370): Selenocysteine
  MOD_RES (378)..(378): Selenocysteine
  MOD_RES (407)..(407): Selenocysteine
  MOD_RES (445)..(445): Selenocysteine
  MOD_RES (463)..(463): Selenocysteine
  MOD_RES (477)..(477): Selenocysteine
  MOD_RES (481)..(481): Selenocysteine
  MOD_RES (485)..(485): Selenocysteine
  MOD_RES (515)..(515): Selenocysteine
  MOD_RES (525)..(525): Selenocysteine
  MOD_RES (575)..(575): Selenocysteine
  MOD_RES (590)..(590): Selenocysteine
  MOD_RES (601)..(601): Selenocysteine
  MOD_RES (621)..(621): Selenocysteine
  MOD_RES (629)..(629): Selenocysteine
  MOD_RES (638)..(638): Selenocysteine
  MOD_RES (650)..(650): Selenocysteine
  MOD_RES (657)..(657): Selenocysteine
  MOD_RES (660)..(660): Selenocysteine
  MOD_RES (666)..(666): Selenocysteine
  MOD_RES (699)..(699): Selenocysteine
MSLPSSCEYLXLGKVARFRSAYVHGSPYAINMPIDIKPQRRRFDVDNGXSAGRSPLDPMXSPGSGLILQANFVHSQRRESFLYRSDSDYDLSPKSMSRNSSIASDIHGDDLIVXPFAQVLASLRXVRNNFAALXNLQDRAPSKRSPMCNQPSINKAXIXEEAYQKLASEXLEELDWCLDQLEXLQXRHSVSEMASNKFKRMLNRELXHLSEMSRSGNQVSEFISNXFLDKQHEVEIPSPXQKEKEKKKRPMSQISGVKKLMHSSSLXNSSIPRFGVKXEQEDVLAKELEDVNKWGLHVFRIAELSGNRPLXVIMHXIFQERDLLKXFKIPVDXLIXYLMXLEDHYHADVAYHNNIHAADVVQSXHVLLSXPALEAVFXDLEILAAIFASAIHDVDHPGVSNQFLINXNSELALMYNDSSVLENHHLAVGFKLLQEENCDIFQNLXKKQRQSLRKMVIDIVLAXDMSKHMNLLADLKXMVEXKKVXSSGVLLLDNYSDRIQVLQNMVHCADLSNPXKPLQLYRQWXDRIMEEFFRQGDRERERGMEISPMCDKHNASVEKSQVGFIDYIVHPLWEXWADLVHPDAQDILDXLEDNREWYQSXIPQSPSPAPDDPEEGRQGQXEKFQFELXLEEDGESDXEKDSGSQVEEDXSCSDSKXLCXQDSESXEIPLDEQVEEEAVGEEEESQPEACVIDDRSPDX

SEQ ID NO: 19696 - protein, 875 aa, Homo sapiens
  MOD_RES (41)..(41): Selenocysteine
  MOD_RES (50)..(50): Selenocysteine
  MOD_RES (64)..(64): Selenocysteine
  MOD_RES (76)..(76): Selenocysteine
  MOD_RES (96)..(96): Selenocysteine
  MOD_RES (98)..(98): Selenocysteine
  MOD_RES (121)..(121): Selenocysteine
  MOD_RES (137)..(137): Selenocysteine
  MOD_RES (166)..(166): Selenocysteine
  MOD_RES (212)..(212): Selenocysteine
  MOD_RES (259)..(259): Selenocysteine
  MOD_RES (263)..(263): Selenocysteine
  MOD_RES (294)..(294): Selenocysteine
  MOD_RES (296)..(296): Selenocysteine
  MOD_RES (322)..(322): Selenocysteine
  MOD_RES (357)..(357): Selenocysteine
  MOD_RES (368)..(368): Selenocysteine
  MOD_RES (397)..(397): Selenocysteine
  MOD_RES (399)..(399): Selenocysteine
  MOD_RES (418)..(418): Selenocysteine
  MOD_RES (436)..(437): Selenocysteine
  MOD_RES (440)..(440): Selenocysteine
  MOD_RES (454)..(454): Selenocysteine
  MOD_RES (478)..(478): Selenocysteine
  MOD_RES (506)..(506): Selenocysteine
  MOD_RES (522)..(522): Selenocysteine
  MOD_RES (537)..(537): Selenocysteine
  MOD_RES (553)..(553): Selenocysteine
  MOD_RES (557)..(557): Selenocysteine
  MOD_RES (571)..(571): Selenocysteine
  MOD_RES (575)..(575): Selenocysteine
  MOD_RES (580)..(580): Selenocysteine
  MOD_RES (621)..(621): Selenocysteine
  MOD_RES (639)..(639): Selenocysteine
  MOD_RES (711)..(712): Selenocysteine
  MOD_RES (723)..(723): Selenocysteine
  MOD_RES (761)..(761): Selenocysteine
  MOD_RES (769)..(769): Selenocysteine
  MOD_RES (784)..(784): Selenocysteine
  MOD_RES (802)..(802): Selenocysteine
  MOD_RES (833)..(833): Selenocysteine
MERAGPSFGQQRQQQQPQQQKQQQRDQDSVEAWLDDHWDFXFSYFVRKAXREMVNAWFAERVHXIPVCKEGIRGHXESCSCPLQQSPRADNSAPGXPXRKISASEFDRPLRPIVVKDSEGXVSFLSDSEKKEQMPLXPPRFDHDEGDQCSRLLELVKDISSHLDVXALCHKIFLHIHGLISADRYSLFLVCEDSSNDKFLISRLFDVAEGSXLEEVSNNCIRLEWNKGIVGHVAALGEPLNIKDAYEDPRFNAEVDQIXGYKXQSILCMPIKNHREEVVGVAQAINKKSGNGGXFXEKDEKDFAAYLAFCGIVLHNAQLYEXSLLENKRNQVLLDLASLIFEEQQSLEVILKKIAAXIISFMQVQKCXIFIVDEDCSDSFSSVFHMECEELEKSSDXLXREHDANKINYMYAQYVKNXMEPLNIPDVSKDKRFPWXXENXGNVNQQCIRSLLCXPIKNGKKNKVIGVCQLVNKMEENXGKVKPFNRNDEQFLEAFVIFCGLGIQNXQMYEAVERAMAKQMVXLEVLSYHASAAEEEXRELQSLAAAVVPSAQXLKIXDFSFSDFELSDLEXALCXIRMFXDLNLVQNFQMKHEVLCRWILSVKKNYRKNVAYHNWRHAFNXAQCMFAALKAGKIQNKLXDLEILALLIAALSHDLDHRGVNNSYIQRSEHPLAQLYCHSIMEHHHFDQCLMILNSPGNQILSGLSIEEYKXXLKIIKQAILAXDLALYIKRRGEFFELIRKNQFNLEDPHQKELFLAMLMXACDLSAIXKPWPIQQRIAELVAXEFFDQGDRERKELNIEPXDLMNREKKNKIPSMQVGFIDAICLQLYEALXHVSEDCFPLLDGCRKNRQKWQALAEQQEKMLINGESGQAKRN

SEQ ID NO: 19697 - protein, 833 aa, Homo sapiens
  MOD_RES (8)..(8): Selenocysteine
  MOD_RES (22)..(22): Selenocysteine
  MOD_RES (34)..(34): Selenocysteine
  MOD_RES (54)..(54): Selenocysteine
  MOD_RES (56)..(56): Selenocysteine
  MOD_RES (79)..(79): Selenocysteine
  MOD_RES (95)..(95): Selenocysteine
  MOD_RES (124)..(124): Selenocysteine
  MOD_RES (170)..(170): Selenocysteine
  MOD_RES (217)..(217): Selenocysteine
  MOD_RES (221)..(221): Selenocysteine
  MOD_RES (252)..(252): Selenocysteine
  MOD_RES (254)..(254): Selenocysteine
  MOD_RES (280)..(280): Selenocysteine
  MOD_RES (315)..(315): Selenocysteine
  MOD_RES (326)..(326): Selenocysteine
  MOD_RES (355)..(355): Selenocysteine
  MOD_RES (357)..(357): Selenocysteine
  MOD_RES (376)..(376): Selenocysteine
  MOD_RES (394)..(395): Selenocysteine
  MOD_RES (398)..(398): Selenocysteine
  MOD_RES (412)..(412): Selenocysteine
  MOD_RES (436)..(436): Selenocysteine
  MOD_RES (464)..(464): Selenocysteine
  MOD_RES (480)..(480): Selenocysteine
  MOD_RES (495)..(495): Selenocysteine
  MOD_RES (511)..(511): Selenocysteine
  MOD_RES (515)..(515): Selenocysteine
  MOD_RES (529)..(529): Selenocysteine
  MOD_RES (533)..(533): Selenocysteine
  MOD_RES (538)..(538): Selenocysteine
  MOD_RES (579)..(579): Selenocysteine
  MOD_RES (597)..(597): Selenocysteine
  MOD_RES (669)..(670): Selenocysteine
  MOD_RES (681)..(681): Selenocysteine
  MOD_RES (719)..(719): Selenocysteine
  MOD_RES (727)..(727): Selenocysteine
  MOD_RES (742)..(742): Selenocysteine
  MOD_RES (760)..(760): Selenocysteine
  MOD_RES (791)..(791): Selenocysteine
MLPFGDKXREMVNAWFAERVHXIPVCKEGIRGHXESCSCPLQQSPRADNSAPGXPXRKISASEFDRPLRPIVVKDSEGXVSFLSDSEKKEQMPLXPPRFDHDEGDQCSRLLELVKDISSHLDVXALCHKIFLHIHGLISADRYSLFLVCEDSSNDKFLISRLFDVAEGSXLEEVSNNCIRLEWNKGIVGHVAALGEPLNIKDAYEDPRFNAEVDQIXGYKXQSILCMPIKNHREEVVGVAQAINKKSGNGGXFXEKDEKDFAAYLAFCGIVLHNAQLYEXSLLENKRNQVLLDLASLIFEEQQSLEVILKKIAAXIISFMQVQKCXIFIVDEDCSDSFSSVFHMECEELEKSSDXLXREHDANKINYMYAQYVKNXMEPLNIPDVSKDKRFPWXXENXGNVNQQCIRSLLCXPIKNGKKNKVIGVCQLVNKMEENXGKVKPFNRNDEQFLEAFVIFCGLGIQNXQMYEAVERAMAKQMVXLEVLSYHASAAEEEXRELQSLAAAVVPSAQXLKIXDFSFSDFELSDLEXALCXIRMFXDLNLVQNFQMKHEVLCRWILSVKKNYRKNVAYHNWRHAFNXAQCMFAALKAGKIQNKLXDLEILALLIAALSHDLDHRGVNNSYIQRSEHPLAQLYCHSIMEHHHFDQCLMILNSPGNQILSGLSIEEYKXXLKIIKQAILAXDLALYIKRRGEFFELIRKNQFNLEDPHQKELFLAMLMXACDLSAIXKPWPIQQRIAELVAXEFFDQGDRERKELNIEPXDLMNREKKNKIPSMQVGFIDAICLQLYEALXHVSEDCFPLLDGCRKNRQKWQALAEQQEKMLINGESGQAKRN

SEQ ID NO: 19698 - protein, 224 aa, Homo sapiens
  MOD_RES (12)..(12): Selenocysteine
  MOD_RES (24)..(24): Selenocysteine
  MOD_RES (44)..(44): Selenocysteine
  MOD_RES (46)..(46): Selenocysteine
  MOD_RES (69)..(69): Selenocysteine
  MOD_RES (85)..(85): Selenocysteine
  MOD_RES (114)..(114): Selenocysteine
  MOD_RES (160)..(160): Selenocysteine
  MOD_RES (207)..(207): Selenocysteine
  MOD_RES (211)..(211): Selenocysteine
MVNAWFAERVHXIPVCKEGIRGHXESCSCPLQQSPRADNSAPGXPXRKISASEFDRPLRPIVVKDSEGXVSFLSDSEKKEQMPLXPPRFDHDEGDQCSRLLELVKDISSHLDVXALCHKIFLHIHGLISADRYSLFLVCEDSSNDKFLISRLFDVAEGSXLEEVSNNCIRLEWNKGIVGHVAALGEPLNIKDAYEDPRFNAEVDQIXGYKXQSILCMPIKNHRE

SEQ ID NO: 19699 - protein, 823 aa, Homo sapiens
  MOD_RES (12)..(12): Selenocysteine
  MOD_RES (24)..(24): Selenocysteine
  MOD_RES (44)..(44): Selenocysteine
  MOD_RES (46)..(46): Selenocysteine
  MOD_RES (69)..(69): Selenocysteine
  MOD_RES (85)..(85): Selenocysteine
  MOD_RES (114)..(114): Selenocysteine
  MOD_RES (160)..(160): Selenocysteine
  MOD_RES (207)..(207): Selenocysteine
  MOD_RES (211)..(211): Selenocysteine
  MOD_RES (242)..(242): Selenocysteine
  MOD_RES (244)..(244): Selenocysteine
  MOD_RES (270)..(270): Selenocysteine
  MOD_RES (305)..(305): Selenocysteine
  MOD_RES (316)..(316): Selenocysteine
  MOD_RES (345)..(345): Selenocysteine
  MOD_RES (347)..(347): Selenocysteine
  MOD_RES (366)..(366): Selenocysteine
  MOD_RES (384)..(385): Selenocysteine
  MOD_RES (388)..(388): Selenocysteine
  MOD_RES (402)..(402): Selenocysteine
  MOD_RES (426)..(426): Selenocysteine
  MOD_RES (454)..(454): Selenocysteine
  MOD_RES (470)..(470): Selenocysteine
  MOD_RES (485)..(485): Selenocysteine
  MOD_RES (501)..(501): Selenocysteine
  MOD_RES (505)..(505): Selenocysteine
  MOD_RES (519)..(519): Selenocysteine
  MOD_RES (523)..(523): Selenocysteine
  MOD_RES (528)..(528): Selenocysteine
  MOD_RES (569)..(569): Selenocysteine
  MOD_RES (587)..(587): Selenocysteine
  MOD_RES (659)..(660): Selenocysteine
  MOD_RES (671)..(671): Selenocysteine
  MOD_RES (709)..(709): Selenocysteine
  MOD_RES (717)..(717): Selenocysteine
  MOD_RES (732)..(732): Selenocysteine
  MOD_RES (750)..(750): Selenocysteine
  MOD_RES (781)..(781): Selenocysteine
MVNAWFAERVHXIPVCKEGIRGHXESCSCPLQQSPRADNSAPGXPXRKISASEFDRPLRPIVVKDSEGXVSFLSDSEKKEQMPLXPPRFDHDEGDQCSRLLELVKDISSHLDVXALCHKIFLHIHGLISADRYSLFLVCEDSSNDKFLISRLFDVAEGSXLEEVSNNCIRLEWNKGIVGHVAALGEPLNIKDAYEDPRFNAEVDQIXGYKXQSILCMPIKNHREEVVGVAQAINKKSGNGGXFXEKDEKDFAAYLAFCGIVLHNAQLYEXSLLENKRNQVLLDLASLIFEEQQSLEVILKKIAAXIISFMQVQKCXIFIVDEDCSDSFSSVFHMECEELEKSSDXLXREHDANKINYMYAQYVKNXMEPLNIPDVSKDKRFPWXXENXGNVNQQCIRSLLCXPIKNGKKNKVIGVCQLVNKMEENXGKVKPFNRNDEQFLEAFVIFCGLGIQNXQMYEAVERAMAKQMVXLEVLSYHASAAEEEXRELQSLAAAVVPSAQXLKIXDFSFSDFELSDLEXALCXIRMFXDLNLVQNFQMKHEVLCRWILSVKKNYRKNVAYHNWRHAFNXAQCMFAALKAGKIQNKLXDLEILALLIAALSHDLDHRGVNNSYIQRSEHPLAQLYCHSIMEHHHFDQCLMILNSPGNQILSGLSIEEYKXXLKIIKQAILAXDLALYIKRRGEFFELIRKNQFNLEDPHQKELFLAMLMXACDLSAIXKPWPIQQRIAELVAXEFFDQGDRERKELNIEPXDLMNREKKNKIPSMQVGFIDAICLQLYEALXHVSEDCFPLLDGCRKNRQKWQALAEQQEKMLINGESGQAKRN

SEQ ID NO: 19700 - protein, 185 aa, Homo sapiens
  MOD_RES (1)..(1): Any amino acid
  MOD_RES (63)..(64): Selenocysteine
  MOD_RES (75)..(75): Selenocysteine
  MOD_RES (113)..(113): Selenocysteine
  MOD_RES (121)..(121): Selenocysteine
  MOD_RES (136)..(136): Selenocysteine
  MOD_RES (154)..(154): Selenocysteine
XALSHDLDHRGVNNSYIQRSEHPLAQLYCHSIMEHHHFDQCLMILNSPGNQILSGLSIEEYKXXLKIIKQAILAXDLALYIKRRGEFFELIRKNQFNLEDPHQKELFLAMLMXACDLSAIXKPWPIQQRIAELVAXEFFDQGDRERKELNIEPXDLMNREKKNKIPSMQVGFIDAICLQLYEVFI

SEQ ID NO: 19701 - protein, 860 aa, Homo sapiens
  MOD_RES (5)..(5): Selenocysteine
  MOD_RES (74)..(74): Selenocysteine
  MOD_RES (101)..(101): Selenocysteine
  MOD_RES (110)..(110): Selenocysteine
  MOD_RES (156)..(156): Selenocysteine
  MOD_RES (170)..(170): Selenocysteine
  MOD_RES (174)..(174): Selenocysteine
  MOD_RES (204)..(204): Selenocysteine
  MOD_RES (235)..(235): Selenocysteine
  MOD_RES (253)..(253): Selenocysteine
  MOD_RES (265)..(265): Selenocysteine
  MOD_RES (283)..(283): Selenocysteine
  MOD_RES (307)..(307): Selenocysteine
  MOD_RES (402)..(402): Selenocysteine
  MOD_RES (418)..(418): Selenocysteine
  MOD_RES (424)..(424): Selenocysteine
  MOD_RES (436)..(436): Selenocysteine
  MOD_RES (471)..(471): Selenocysteine
  MOD_RES (514)..(514): Selenocysteine
  MOD_RES (557)..(557): Selenocysteine
  MOD_RES (570)..(570): Selenocysteine
  MOD_RES (577)..(577): Selenocysteine
  MOD_RES (585)..(585): Selenocysteine
  MOD_RES (594)..(594): Selenocysteine
  MOD_RES (606)..(606): Selenocysteine
  MOD_RES (637)..(637): Selenocysteine
  MOD_RES (669)..(669): Selenocysteine
  MOD_RES (679)..(679): Selenocysteine
  MOD_RES (690)..(690): Selenocysteine
  MOD_RES (698)..(698): Selenocysteine
  MOD_RES (706)..(706): Selenocysteine
  MOD_RES (717)..(717): Selenocysteine
  MOD_RES (725)..(725): Selenocysteine
  MOD_RES (751)..(751): Selenocysteine
  MOD_RES (782)..(782): Selenocysteine
  MOD_RES (796)..(796): Selenocysteine
  MOD_RES (803)..(803): Selenocysteine
  MOD_RES (852)..(853): Selenocysteine
MGEVXAEEVEKFLDSNIGFAKQYYNLHYRAKLISDLLGAKEAAVDFSNYHSPSSMEESEIIFDLLRDFQENLQXEKCIFNVMKKLCFLLQADRMSLFMYRXRNGIAELAXRLFNVHKDAVLEDCLVMPDQEIVFPLDMGIVGHVAHSKKIANVPNXEEDEHFCDFVDILXEYKXKNILASPIMNGKDVVAIIMAVNKVDGSHFXKRDEEILLKYLNFANLIMKVYHLSYLHNCEXRRGQILLWSGSKVFEELXDIERQFHKALYXVRAFLNCDRYSVGLLDMXKQKEFFDVWPVLMGEVPPYSGPRXPDGREINFYKVIDYILHGKEDIKVIPNPPPDHWALVSGLPAYVAQNGLICNIMNAPAEDFFAFQKEPLDESGWMIKNVLSMPIVNKKEEIVGVAXFYNRKDGKPFDEMDEXLMESLXQFLGWSVLNPDXYESMNKLENRKDIFQDIVKYHVKCDNEEIQKILKXREVYGKEPWECEEEELAEILQAELPDADKYEINKFHFSDLPLXELELVKCGIQMYYELKVVDKFHIPQEALVRFMYSLSKGYRKIXYHNWRHGFNVGQXMFSLLVXGKLKRYFXDLEALAMVXAAFCHDIDHRGXNNLYQMKSQNPLAKLHGSSILERHHLEFGKXLLRDESLNIFQNLNRRQHEHAIHMMDIAIIAXDLALYFKKRXMFQKIVDQSKXYESEQEWXQYMMLEQXRKEIVMAMMMXACDLSAIXKPWEVQSQVALLVAAEFWEQGDLERXVLQQNPIPMMDRNKADELPKLQVGFIDFVCXFVYKEFSRFHEEIXPMLDGIXNNRKEWKALADEYDAKMKVQEEKKQKQQSAKSAAAGNQPGGNPSPGGAXXSKSCCIQ

SEQ ID NO: 19702 - protein, 779 aa, Homo sapiens
  MOD_RES (5)..(5): Selenocysteine
  MOD_RES (74)..(74): Selenocysteine
  MOD_RES (101)..(101): Selenocysteine
  MOD_RES (110)..(110): Selenocysteine
  MOD_RES (156)..(156): Selenocysteine
  MOD_RES (172)..(172): Selenocysteine
  MOD_RES (184)..(184): Selenocysteine
  MOD_RES (202)..(202): Selenocysteine
  MOD_RES (226)..(226): Selenocysteine
  MOD_RES (321)..(321): Selenocysteine
  MOD_RES (337)..(337): Selenocysteine
  MOD_RES (343)..(343): Selenocysteine
  MOD_RES (355)..(355): Selenocysteine
  MOD_RES (390)..(390): Selenocysteine
  MOD_RES (433)..(433): Selenocysteine
  MOD_RES (476)..(476): Selenocysteine
  MOD_RES (489)..(489): Selenocysteine
  MOD_RES (496)..(496): Selenocysteine
  MOD_RES (504)..(504): Selenocysteine
  MOD_RES (513)..(513): Selenocysteine
  MOD_RES (525)..(525): Selenocysteine
  MOD_RES (556)..(556): Selenocysteine
  MOD_RES (588)..(588): Selenocysteine
  MOD_RES (598)..(598): Selenocysteine
  MOD_RES (609)..(609): Selenocysteine
  MOD_RES (617)..(617): Selenocysteine
  MOD_RES (625)..(625): Selenocysteine
  MOD_RES (636)..(636): Selenocysteine
  MOD_RES (644)..(644): Selenocysteine
  MOD_RES (670)..(670): Selenocysteine
  MOD_RES (701)..(701): Selenocysteine
  MOD_RES (715)..(715): Selenocysteine
  MOD_RES (722)..(722): Selenocysteine
  MOD_RES (771)..(772): Selenocysteine
MGEVXAEEVEKFLDSNIGFAKQYYNLHYRAKLISDLLGAKEAAVDFSNYHSPSSMEESEIIFDLLRDFQENLQXEKCIFNVMKKLCFLLQADRMSLFMYRXRNGIAELAXRLFNVHKDAVLEDCLVMPDQEIVFPLDMGIVGHVAHSKKIANVPNXEEILLWSGSKVFEELXDIERQFHKALYXVRAFLNCDRYSVGLLDMXKQKEFFDVWPVLMGEVPPYSGPRXPDGREINFYKVIDYILHGKEDIKVIPNPPPDHWALVSGLPAYVAQNGLICNIMNAPAEDFFAFQKEPLDESGWMIKNVLSMPIVNKKEEIVGVAXFYNRKDGKPFDEMDEXLMESLXQFLGWSVLNPDXYESMNKLENRKDIFQDIVKYHVKCDNEEIQKILKXREVYGKEPWECEEEELAEILQAELPDADKYEINKFHFSDLPLXELELVKCGIQMYYELKVVDKFHIPQEALVRFMYSLSKGYRKIXYHNWRHGFNVGQXMFSLLVXGKLKRYFXDLEALAMVXAAFCHDIDHRGXNNLYQMKSQNPLAKLHGSSILERHHLEFGKXLLRDESLNIFQNLNRRQHEHAIHMMDIAIIAXDLALYFKKRXMFQKIVDQSKXYESEQEWXQYMMLEQXRKEIVMAMMMXACDLSAIXKPWEVQSQVALLVAAEFWEQGDLERXVLQQNPIPMMDRNKADELPKLQVGFIDFVCXFVYKEFSRFHEEIXPMLDGIXNNRKEWKALADEYDAKMKVQEEKKQKQQSAKSAAAGNQPGGNPSPGGAXXSKSCCIQ

SEQ ID NO: 19703 - protein, 853 aa, Homo sapiens
  MOD_RES (57)..(57): Selenocysteine
  MOD_RES (85)..(85): Selenocysteine
  MOD_RES (108)..(108): Selenocysteine
  MOD_RES (145)..(145): Selenocysteine
  MOD_RES (168)..(168): Selenocysteine
  MOD_RES (172)..(172): Selenocysteine
  MOD_RES (178)..(178): Selenocysteine
  MOD_RES (202)..(202): Selenocysteine
  MOD_RES (217)..(217): Selenocysteine
  MOD_RES (233)..(233): Selenocysteine
  MOD_RES (251)..(251): Selenocysteine
  MOD_RES (263)..(263): Selenocysteine
  MOD_RES (281)..(281): Selenocysteine
  MOD_RES (305)..(305): Selenocysteine
  MOD_RES (332)..(332): Selenocysteine
  MOD_RES (400)..(400): Selenocysteine
  MOD_RES (422)..(422): Selenocysteine
  MOD_RES (432)..(432): Selenocysteine
  MOD_RES (434)..(434): Selenocysteine
  MOD_RES (469)..(469): Selenocysteine
  MOD_RES (497)..(498): Selenocysteine
  MOD_RES (512)..(512): Selenocysteine
  MOD_RES (555)..(555): Selenocysteine
  MOD_RES (568)..(568): Selenocysteine
  MOD_RES (571)..(571): Selenocysteine
  MOD_RES (575)..(575): Selenocysteine
  MOD_RES (583)..(583): Selenocysteine
  MOD_RES (592)..(592): Selenocysteine
  MOD_RES (604)..(604): Selenocysteine
  MOD_RES (641)..(641): Selenocysteine
  MOD_RES (667)..(667): Selenocysteine
  MOD_RES (703)..(704): Selenocysteine
  MOD_RES (715)..(715): Selenocysteine
  MOD_RES (723)..(723): Selenocysteine
  MOD_RES (749)..(749): Selenocysteine
  MOD_RES (780)..(780): Selenocysteine
  MOD_RES (836)..(836): Selenocysteine
  MOD_RES (849)..(849): Selenocysteine
MSLSEEQARSFLDQNPDFARQYFGKKLSPENVAAACEDGCPPDCDSLRDLCQVEESXALLELVQDMQESINMERVVFKVLRRLCXLLQADRCSLFMYRQRNGVAELAXRLFSVQPDSVLEDCLVPPDSEIVFPLDIGVVGHVAQXKKMVNVEDVAECPHFSSFADELXDYKXKNMLAXPIMNGKDVVAVIMAVNKLNGPFFXSEDEDVFLKYLNFAXLYLKIYHLSYLHNCEXRRGQVLLWSANKVFEELXDIERQFHKAFYXVRAYLNCERYSVGLLDMXKEKEFFDVWSVLMGESQPYSGPRXPDGREIVFYKVIDYVLHGKEEIKVIPXPSADHWALASGLPSYVAESGFICNIMNASADEMFKFQEGALDDSGWLIKNVLSMPIVNKKEEIVGVAXFYNRKDGKPFDEQDEVLMESLXQFLGWSVMNXDXYDKMNKLENRKDIAQDMVLYHVKCDRDEIQLILPXRARLGKEPADCDEDELGEILKEELPGPXXFDIYEFHFSDLECXELDLVKCGIQMYYELGVVRKFQIPQEVLVRFLFSISKGYRRIXYHNWRHGFNVAQXMFXLLMXGKLKSYYXDLEAFAMVXAGLCHDIDHRGXNNLYQMKSQNPLAKLHGSSILERHHLEFGKFLLSEEXLNIYQNLNRRQHEHVIHLMDIAIIAXDLALYFKKRAMFQKIVDESKNYQDKKSWVEYLSLEXXRKEIVMAMMMXACDLSAIXKPWEVQSKVALLVAAEFWEQGDLERXVLDQQPIPMMDRNKAAELPKLQVGFIDFVCXFVYKEFSRFHEEILPMFDRLQNNRKEWKALADEYEAKVKALEEKEEEERVAAKKGXEICNGGPAPKSSXCCIL

SEQ ID NO: 19704 - protein, 854 aa, Homo sapiens
  MOD_RES (57)..(57): Selenocysteine
  MOD_RES (85)..(85): Selenocysteine
  MOD_RES (108)..(108): Selenocysteine
  MOD_RES (145)..(145): Selenocysteine
  MOD_RES (168)..(168): Selenocysteine
  MOD_RES (172)..(172): Selenocysteine
  MOD_RES (178)..(178): Selenocysteine
  MOD_RES (202)..(202): Selenocysteine
  MOD_RES (217)..(217): Selenocysteine
  MOD_RES (233)..(233): Selenocysteine
  MOD_RES (251)..(251): Selenocysteine
  MOD_RES (263)..(263): Selenocysteine
  MOD_RES (281)..(281): Selenocysteine
  MOD_RES (305)..(305): Selenocysteine
  MOD_RES (332)..(332): Selenocysteine
  MOD_RES (400)..(400): Selenocysteine
  MOD_RES (422)..(422): Selenocysteine
  MOD_RES (432)..(432): Selenocysteine
  MOD_RES (434)..(434): Selenocysteine
  MOD_RES (469)..(469): Selenocysteine
  MOD_RES (497)..(498): Selenocysteine
  MOD_RES (512)..(512): Selenocysteine
  MOD_RES (555)..(555): Selenocysteine
  MOD_RES (568)..(568): Selenocysteine
  MOD_RES (571)..(571): Selenocysteine
  MOD_RES (575)..(575): Selenocysteine
  MOD_RES (583)..(583): Selenocysteine
  MOD_RES (592)..(592): Selenocysteine
  MOD_RES (604)..(604): Selenocysteine
  MOD_RES (641)..(641): Selenocysteine
  MOD_RES (667)..(667): Selenocysteine
  MOD_RES (703)..(704): Selenocysteine
  MOD_RES (715)..(715): Selenocysteine
  MOD_RES (723)..(723): Selenocysteine
  MOD_RES (749)..(749): Selenocysteine
  MOD_RES (780)..(780): Selenocysteine
  MOD_RES (837)..(837): Selenocysteine
  MOD_RES (850)..(850): Selenocysteine
MSLSEEQARSFLDQNPDFARQYFGKKLSPENVAAACEDGCPPDCDSLRDLCQVEESXALLELVQDMQESINMERVVFKVLRRLCXLLQADRCSLFMYRQRNGVAELAXRLFSVQPDSVLEDCLVPPDSEIVFPLDIGVVGHVAQXKKMVNVEDVAECPHFSSFADELXDYKXKNMLAXPIMNGKDVVAVIMAVNKLNGPFFXSEDEDVFLKYLNFAXLYLKIYHLSYLHNCEXRRGQVLLWSANKVFEELXDIERQFHKAFYXVRAYLNCERYSVGLLDMXKEKEFFDVWSVLMGESQPYSGPRXPDGREIVFYKVIDYVLHGKEEIKVIPXPSADHWALASGLPSYVAESGFICNIMNASADEMFKFQEGALDDSGWLIKNVLSMPIVNKKEEIVGVAXFYNRKDGKPFDEQDEVLMESLXQFLGWSVMNXDXYDKMNKLENRKDIAQDMVLYHVKCDRDEIQLILPXRARLGKEPADCDEDELGEILKEELPGPXXFDIYEFHFSDLECXELDLVKCGIQMYYELGVVRKFQIPQEVLVRFLFSISKGYRRIXYHNWRHGFNVAQXMFXLLMXGKLKSYYXDLEAFAMVXAGLCHDIDHRGXNNLYQMKSQNPLAKLHGSSILERHHLEFGKFLLSEEXLNIYQNLNRRQHEHVIHLMDIAIIAXDLALYFKKRAMFQKIVDESKNYQDKKSWVEYLSLEXXRKEIVMAMMMXACDLSAIXKPWEVQSKVALLVAAEFWEQGDLERXVLDQQPIPMMDRNKAAELPKLQVGFIDFVCXFVYKEFSRFHEEILPMFDRLQNNRKEWKALADEYEAKVKALEEKEEEERVAAKKVGXEICNGGPAPKSSXCCIL

SEQ ID NO: 19705 - protein, 6 aa, Homo sapiens
  MOD_RES (2)..(2): Selenocysteine
MXKEKE

SEQ ID NO: 19706 - protein, 42 aa, Homo sapiens
  MOD_RES (2)..(2): Selenocysteine
  MOD_RES (26)..(26): Selenocysteine
MXKEKEFFDVWSVLMGESQPYSGPRXPDGREIVFYKVIDYVL

SEQ ID NO: 19707 - protein, 97 aa, Homo sapiens
  MOD_RES (2)..(2): Selenocysteine
  MOD_RES (26)..(26): Selenocysteine
  MOD_RES (53)..(53): Selenocysteine
MXKEKEFFDVWSVLMGESQPYSGPRXPDGREIVFYKVIDYVLHGKEEIKVIPXPSADHWALASGLPSYVAESGFEGALDDSGWLIKNVLSMPIVNKK

SEQ ID NO: 19708 - protein, 575 aa, Homo sapiens
  MOD_RES (2)..(2): Selenocysteine
  MOD_RES (26)..(26): Selenocysteine
  MOD_RES (53)..(53): Selenocysteine
  MOD_RES (121)..(121): Selenocysteine
  MOD_RES (143)..(143): Selenocysteine
  MOD_RES (153)..(153): Selenocysteine
  MOD_RES (155)..(155): Selenocysteine
  MOD_RES (190)..(190): Selenocysteine
  MOD_RES (218)..(219): Selenocysteine
  MOD_RES (233)..(233): Selenocysteine
  MOD_RES (276)..(276): Selenocysteine
  MOD_RES (289)..(289): Selenocysteine
  MOD_RES (292)..(292): Selenocysteine
  MOD_RES (296)..(296): Selenocysteine
  MOD_RES (304)..(304): Selenocysteine
  MOD_RES (313)..(313): Selenocysteine
  MOD_RES (325)..(325): Selenocysteine
  MOD_RES (362)..(362): Selenocysteine
  MOD_RES (388)..(388): Selenocysteine
  MOD_RES (424)..(425): Selenocysteine
  MOD_RES (436)..(436): Selenocysteine
  MOD_RES (444)..(444): Selenocysteine
  MOD_RES (470)..(470): Selenocysteine
  MOD_RES (501)..(501): Selenocysteine
  MOD_RES (558)..(558): Selenocysteine
  MOD_RES (571)..(571): Selenocysteine
MXKEKEFFDVWSVLMGESQPYSGPRXPDGREIVFYKVIDYVLHGKEEIKVIPXPSADHWALASGLPSYVAESGFICNIMNASADEMFKFQEGALDDSGWLIKNVLSMPIVNKKEEIVGVAXFYNRKDGKPFDEQDEVLMESLXQFLGWSVMNXDXYDKMNKLENRKDIAQDMVLYHVKCDRDEIQLILPXRARLGKEPADCDEDELGEILKEELPGPXXFDIYEFHFSDLECXELDLVKCGIQMYYELGVVRKFQIPQEVLVRFLFSISKGYRRIXYHNWRHGFNVAQXMFXLLMXGKLKSYYXDLEAFAMVXAGLCHDIDHRGXNNLYQMKSQNPLAKLHGSSILERHHLEFGKFLLSEEXLNIYQNLNRRQHEHVIHLMDIAIIAXDLALYFKKRAMFQKIVDESKNYQDKKSWVEYLSLEXXRKEIVMAMMMXACDLSAIXKPWEVQSKVALLVAAEFWEQGDLERXVLDQQPIPMMDRNKAAELPKLQVGFIDFVCXFVYKEFSRFHEEILPMFDRLQNNRKEWKALADEYEAKVKALEEKEEEERVAAKKVGXEICNGGPAPKSSXCCIL

SEQ ID NO: 19709 - protein, 144 aa, Homo sapiens
  MOD_RES (1)..(1): Selenocysteine
  MOD_RES (27)..(27): Selenocysteine
  MOD_RES (63)..(64): Selenocysteine
  MOD_RES (75)..(75): Selenocysteine
  MOD_RES (83)..(83): Selenocysteine
  MOD_RES (109)..(109): Selenocysteine
  MOD_RES (140)..(140): Selenocysteine
XLNIYQNLNRRQHEHVIHLMDIAIIAXDLALYFKKRAMFQKIVDESKNYQDKKSWVEYLSLEXXRKEIVMAMMMXACDLSAIXKPWEVQSKVALLVAAEFWEQGDLERXVLDQQPIPMMDRNKAAELPKLQVGFIDFVCXFVYK

SEQ ID NO: 19710 - protein, 149 aa, Homo sapiens
  MOD_RES (1)..(1): Any amino acid
  MOD_RES (4)..(4): Selenocysteine
  MOD_RES (30)..(30): Selenocysteine
  MOD_RES (61)..(61): Selenocysteine
  MOD_RES (105)..(105): Selenocysteine
  MOD_RES (116)..(116): Selenocysteine
  MOD_RES (121)..(121): Selenocysteine
  MOD_RES (130)..(130): Selenocysteine
XAIXKPWEVQSKVALLVAAEFWEQGDLERXVLDQQPIPMMDRNKAAELPKLQVGFIDFVCXFVYKEFSRFHEEILPMFDRLQNNRKEWKALADDRHRNLQWRPSXQVFNLLYPVSXGPMGXLWLPQSSPXRIWVLPVAICYKRLGSPRK

SEQ ID NO: 19711 - protein, 858 aa, Homo sapiens
  MOD_RES (54)..(54): Selenocysteine
  MOD_RES (68)..(68): Selenocysteine
  MOD_RES (75)..(75): Selenocysteine
  MOD_RES (118)..(118): Selenocysteine
  MOD_RES (120)..(120): Selenocysteine
  MOD_RES (149)..(149): Selenocysteine
  MOD_RES (152)..(152): Selenocysteine
  MOD_RES (172)..(172): Selenocysteine
  MOD_RES (176)..(176): Selenocysteine
  MOD_RES (182)..(182): Selenocysteine
  MOD_RES (229)..(229): Selenocysteine
  MOD_RES (255)..(255): Selenocysteine
  MOD_RES (267)..(267): Selenocysteine
  MOD_RES (285)..(285): Selenocysteine
  MOD_RES (309)..(309): Selenocysteine
  MOD_RES (336)..(336): Selenocysteine
  MOD_RES (343)..(343): Selenocysteine
  MOD_RES (350)..(350): Selenocysteine
  MOD_RES (371)..(371): Selenocysteine
  MOD_RES (380)..(380): Selenocysteine
  MOD_RES (404)..(404): Selenocysteine
  MOD_RES (422)..(422): Selenocysteine
  MOD_RES (424)..(424): Selenocysteine
  MOD_RES (426)..(426): Selenocysteine
  MOD_RES (436)..(436): Selenocysteine
  MOD_RES (438)..(438): Selenocysteine
  MOD_RES (460)..(460): Selenocysteine
  MOD_RES (463)..(463): Selenocysteine
  MOD_RES (517)..(517): Selenocysteine
  MOD_RES (546)..(546): Selenocysteine
  MOD_RES (551)..(551): Selenocysteine
  MOD_RES (560)..(560): Selenocysteine
  MOD_RES (573)..(573): Selenocysteine
  MOD_RES (576)..(576): Selenocysteine
  MOD_RES (580)..(580): Selenocysteine
  MOD_RES (588)..(588): Selenocysteine
  MOD_RES (609)..(609): Selenocysteine
  MOD_RES (618)..(618): Selenocysteine
  MOD_RES (640)..(640): Selenocysteine
  MOD_RES (660)..(660): Selenocysteine
  MOD_RES (672)..(672): Selenocysteine
  MOD_RES (682)..(682): Selenocysteine
  MOD_RES (696)..(696): Selenocysteine
  MOD_RES (705)..(705): Selenocysteine
  MOD_RES (709)..(709): Selenocysteine
  MOD_RES (720)..(720): Selenocysteine
  MOD_RES (728)..(728): Selenocysteine
  MOD_RES (754)..(754): Selenocysteine
  MOD_RES (785)..(785): Selenocysteine
  MOD_RES (799)..(799): Selenocysteine
  MOD_RES (854)..(854): Selenocysteine
MGEINQVAVEKYLEENPQFAKEYFDRKLRVEVLGEIFKNSQVPVQSSMSFSELXQVEESALCLELLWXVQEEGGXPEQGVHRALQRLAHLLQADRCSMFLCRSRNGIPEVASRLLDVXPXSKFEDNLVGPDKEVVFPLDIGIVGWAAHXKKXHNVPDVKKNSHFSDFMDKQXGYVXKNLLAXPIVVGKEVLAVIMAVNKVNASEFSKQDEEVFSKYLNFVSIILRLHHXSYMYNIESRRSQILMWSANKVFEELXDVERQFHKALYXVRSYLNCERYSIGLLDMXKEKEFYDEWPIKLGEVEPYKGPKXPDGREVNFYKIIDYILHGKEEIKVIPXPPADHWXLISGLPXYVAENGFICNMMNAPADEYFXFQKGPVDEXGWVIKNVLSLPIVNKKEDIVGVAXFYNRKDGKPFDEHDEYIXEXLXQFLGWSLLNXDXYDKMNKLENRKDIAQEMLMNQXKAXPEEIKSILKFQEKLNVDVIDDCEEKQLVAILKEDLPDPRSAELYEFRFSDFPLXEHGLIKCGIRLFFEINVVEKFKVPVEVLXRWMYXVRKGYRAVXYHNWRHGFNVGQXMFXLLMXGRLKKYYXDLEAFAMLAAAFCHDIDHRGXNNLYQMKSXSPLARLHGSSILERHHLEYSKXLLQDESLNIFQNLNKRQFEXVIHLFEVAIIAXDLALYFKKRXMFQKIVDACEQMQXEEEAIKYVXVDPXKKEIIMAMMMXACDLSAIXKPWEVQSQVALMVANEFWEQGDLERXVLQQQPIPMMDRNKRDELPKLQVGFIDFVCXFVYKEFSRFHKEIXPMLSGLQNNRVEWKSLADEYDAKMKVIEEEAKKQEGGAEKAAEDSGGGDDKKSKXCLML

SEQ ID NO: 19712 - protein, 70 aa, Homo sapiens
  MOD_RES (16)..(16): Selenocysteine
  MOD_RES (22)..(22): Selenocysteine
  MOD_RES (30)..(31): Selenocysteine
  MOD_RES (41)..(41): Selenocysteine
  MOD_RES (52)..(53): Selenocysteine
  MOD_RES (57)..(57): Selenocysteine
  MOD_RES (67)..(67): Selenocysteine
DKGRGWHPAEGGPALXAQPPEXRPALGLGXXSLEWKAWEQXSQSSALGRPSXXWSCXSWPNMASSSXRPC

SEQ ID NO: 19713 - protein, 137 aa, Homo sapiens
  MOD_RES (20)..(20): Selenocysteine
  MOD_RES (26)..(26): Selenocysteine
  MOD_RES (50)..(50): Selenocysteine
  MOD_RES (64)..(64): Selenocysteine
  MOD_RES (72)..(72): Selenocysteine
  MOD_RES (85)..(85): Selenocysteine
  MOD_RES (112)..(112): Selenocysteine
  MOD_RES (115)..(115): Selenocysteine
MKQRDKGRGWHPAEGGPALXAQPPEXRPALDRSRRESRSQGCRGVSVSLXMNLEPPKAEFRSAXRVAGGPVXPRKGPPKFKQRQXRQFKSKPPKKGVQGFGDDIPGMEGLGXDIXVICPWEAFNHLELHELAQYGII

SEQ ID NO: 19714 - protein, 87 aa, Homo sapiens
  MOD_RES (14)..(14): Selenocysteine
  MOD_RES (22)..(22): Selenocysteine
  MOD_RES (35)..(35): Selenocysteine
  MOD_RES (62)..(62): Selenocysteine
  MOD_RES (65)..(65): Selenocysteine
MNLEPPKAEFRSAXRVAGGPVXPRKGPPKFKQRQXRQFKSKPPKKGVQGFGDDIPGMEGLGXDIXVICPWEAFNHLELHELAQYGII

SEQ ID NO: 19715 - protein, 83 aa, Homo sapiens
  MOD_RES (5)..(6): Selenocysteine
  MOD_RES (17)..(18): Selenocysteine
  MOD_RES (31)..(31): Selenocysteine
  MOD_RES (58)..(58): Selenocysteine
  MOD_RES (61)..(61): Selenocysteine
MSDNXXLPAPASNQGPXXPRKGPPKFKQRQXRQFKSKPPKKGVKGFGDDIPGMEGLGXDIXVICPWEAFSHLELHELAQFGII

SEQ ID NO: 19716 - protein, 424 aa, Homo sapiens
  MOD_RES (59)..(59): Selenocysteine
  MOD_RES (127)..(127): Selenocysteine
  MOD_RES (165)..(165): Selenocysteine
  MOD_RES (174)..(174): Selenocysteine
  MOD_RES (221)..(221): Selenocysteine
  MOD_RES (238)..(238): Selenocysteine
  MOD_RES (251)..(251): Selenocysteine
  MOD_RES (267)..(267): Selenocysteine
  MOD_RES (273)..(273): Selenocysteine
  MOD_RES (278)..(278): Selenocysteine
  MOD_RES (312)..(312): Selenocysteine
  MOD_RES (321)..(321): Selenocysteine
  MOD_RES (347)..(347): Selenocysteine
  MOD_RES (369)..(369): Selenocysteine
  MOD_RES (381)..(381): Selenocysteine
  MOD_RES (406)..(406): Selenocysteine
  MOD_RES (418)..(418): Selenocysteine
MEVCYQLPVLPLDRPVPQHVLSRRGAISFSSSSALFGCPNPRQLSQRRGAISYDSSDQXALYIRMLGDVRVRSRAGFESERRGSHPYIDFRIFHSQSEIEVSVSARNIRRLLSFQRYLRSSRFFRGXAVSNSLNILDDDYNGQAKCMLEKVGNWNFDIFLFDRLXNGNSLVSLXFHLFSLHGLIEYFHLDMMKLRRFLVMIQEDYHSQNPYHNAVHAADVXQAMHCYLKEPKLANSVXPWDILLSLIAAAXHDLDHPGVNQPFLIKXNHYLAXLYKNXSVLENHHWRSAVGLLRESGLFSHLPLESRQQMEXQIGALILAXDISRQNEYLSLFRSHLDRGDLCLEDXRHRHLVLQMALKCADICNPCRXWELSKQWSEKVXEEFFHQGDIEKKYHLGVSPLCDRHXESIANIQIGNYXYLDIAG

SEQ ID NO: 19717 - protein, 482 aa, Homo sapiens
  MOD_RES (59)..(59): Selenocysteine
  MOD_RES (127)..(127): Selenocysteine
  MOD_RES (165)..(165): Selenocysteine
  MOD_RES (174)..(174): Selenocysteine
  MOD_RES (221)..(221): Selenocysteine
  MOD_RES (238)..(238): Selenocysteine
  MOD_RES (251)..(251): Selenocysteine
  MOD_RES (267)..(267): Selenocysteine
  MOD_RES (273)..(273): Selenocysteine
  MOD_RES (278)..(278): Selenocysteine
  MOD_RES (312)..(312): Selenocysteine
  MOD_RES (321)..(321): Selenocysteine
  MOD_RES (347)..(347): Selenocysteine
  MOD_RES (369)..(369): Selenocysteine
  MOD_RES (381)..(381): Selenocysteine
  MOD_RES (406)..(406): Selenocysteine
  MOD_RES (418)..(418): Selenocysteine
  MOD_RES (426)..(426): Selenocysteine
  MOD_RES (434)..(434): Selenocysteine
  MOD_RES (439)..(439): Selenocysteine
  MOD_RES (464)..(464): Selenocysteine
MEVCYQLPVLPLDRPVPQHVLSRRGAISFSSSSALFGCPNPRQLSQRRGAISYDSSDQXALYIRMLGDVRVRSRAGFESERRGSHPYIDFRIFHSQSEIEVSVSARNIRRLLSFQRYLRSSRFFRGXAVSNSLNILDDDYNGQAKCMLEKVGNWNFDIFLFDRLXNGNSLVSLXFHLFSLHGLIEYFHLDMMKLRRFLVMIQEDYHSQNPYHNAVHAADVXQAMHCYLKEPKLANSVXPWDILLSLIAAAXHDLDHPGVNQPFLIKXNHYLAXLYKNXSVLENHHWRSAVGLLRESGLFSHLPLESRQQMEXQIGALILAXDISRQNEYLSLFRSHLDRGDLCLEDXRHRHLVLQMALKCADICNPCRXWELSKQWSEKVXEEFFHQGDIEKKYHLGVSPLCDRHXESIANIQIGFMXYLVEPLFXEWARFSNXRLSQXMLGHVGLNKASWKGLQREQSSSEDXDAAFELNSQLLPQENRLS

SEQ ID NO: 19718 - protein, 86 aa, Homo sapiens
  MOD_RES (4)..(4): Selenocysteine
  MOD_RES (18)..(18): Selenocysteine
  MOD_RES (33)..(33): Selenocysteine
MGIXLIWCLALVLIKWIXSKRRGAISYDSSDQXALYIRMLGDVRVRSRAGFESERRGSHPYIDFRIFHSQSEIEVSVSARNIRRLL

SEQ ID NO: 19719 - protein, 456 aa, Homo sapiens
  MOD_RES (4)..(4): Selenocysteine
  MOD_RES (18)..(18): Selenocysteine
  MOD_RES (33)..(33): Selenocysteine
  MOD_RES (101)..(101): Selenocysteine
  MOD_RES (139)..(139): Selenocysteine
  MOD_RES (148)..(148): Selenocysteine
  MOD_RES (195)..(195): Selenocysteine
  MOD_RES (212)..(212): Selenocysteine
  MOD_RES (225)..(225): Selenocysteine
  MOD_RES (241)..(241): Selenocysteine
  MOD_RES (247)..(247): Selenocysteine
  MOD_RES (252)..(252): Selenocysteine
  MOD_RES (286)..(286): Selenocysteine
  MOD_RES (295)..(295): Selenocysteine
  MOD_RES (321)..(321): Selenocysteine
  MOD_RES (343)..(343): Selenocysteine
  MOD_RES (355)..(355): Selenocysteine
  MOD_RES (380)..(380): Selenocysteine
  MOD_RES (392)..(392): Selenocysteine
  MOD_RES (400)..(400): Selenocysteine
  MOD_RES (408)..(408): Selenocysteine
  MOD_RES (413)..(413): Selenocysteine
  MOD_RES (438)..(438): Selenocysteine
MGIXLIWCLALVLIKWIXSKRRGAISYDSSDQXALYIRMLGDVRVRSRAGFESERRGSHPYIDFRIFHSQSEIEVSVSARNIRRLLSFQRYLRSSRFFRGXAVSNSLNILDDDYNGQAKCMLEKVGNWNFDIFLFDRLXNGNSLVSLXFHLFSLHGLIEYFHLDMMKLRRFLVMIQEDYHSQNPYHNAVHAADVXQAMHCYLKEPKLANSVXPWDILLSLIAAAXHDLDHPGVNQPFLIKXNHYLAXLYKNXSVLENHHWRSAVGLLRESGLFSHLPLESRQQMEXQIGALILAXDISRQNEYLSLFRSHLDRGDLCLEDXRHRHLVLQMALKCADICNPCRXWELSKQWSEKVXEEFFHQGDIEKKYHLGVSPLCDRHXESIANIQIGFMXYLVEPLFXEWARFSNXRLSQXMLGHVGLNKASWKGLQREQSSSEDXDAAFELNSQLLPQENRLS

SEQ ID NO: 19720 - protein, 502 aa, Homo sapiens
  MOD_RES (18)..(18): Selenocysteine
  MOD_RES (63)..(63): Selenocysteine
  MOD_RES (88)..(88): Selenocysteine
  MOD_RES (109)..(110): Selenocysteine
  MOD_RES (117)..(117): Selenocysteine
  MOD_RES (178)..(178): Selenocysteine
  MOD_RES (185)..(185): Selenocysteine
  MOD_RES (193)..(193): Selenocysteine
  MOD_RES (206)..(206): Selenocysteine
  MOD_RES (234)..(234): Selenocysteine
  MOD_RES (251)..(251): Selenocysteine
  MOD_RES (280)..(280): Selenocysteine
  MOD_RES (302)..(302): Selenocysteine
  MOD_RES (320)..(320): Selenocysteine
  MOD_RES (334)..(334): Selenocysteine
  MOD_RES (344)..(344): Selenocysteine
  MOD_RES (445)..(445): Selenocysteine
  MOD_RES (449)..(449): Selenocysteine
  MOD_RES (492)..(492): Selenocysteine
MPVLERYFHPAELGRRWXGPEGVLPSSPGSRPGCQQGPLPWDLPEMIRMVKLVWKSKSELQAXKQRGILDNEDALRSFPGDIRLRGQXGVRAERRGSYPFIDFRLLNSXXYSGEIGXKKKVKRLLSFQRYFHASRLLRGIIPQAPLHLLDEDYLGQARHMLSKVGMWDFDIFLFDRLXNGNSLVXLLCHLFNXHGLIHHFKLDMVXLHRFLVMVQEDYHSQNPYHNAVHAADVXQAMHCYLKEPKLASFLXPLDIMLGLLAAAAHDVDHPGVNQPFLIKXNHHLANLYQNMSVLENHHWRSXIGMLRESRLLAHLPKEMXQDIEQQLGSLILAXDINRQNEFLXRLKAHLHNKDLRLEDAQDRHFMLQIALKCADICNPCRIWEMSKQWSERVCEEFYRQGELEQKFELEISPLCNQQKDSIPSIQIGFMSYIVEPLFREWAHFXGNSXLSENMLGHLAHNKAQWKSLLPRQHRSRGSSGSGPDHDHAGQGXESEEQEGDSP

SEQ ID NO: 19721 - protein, 450 aa, Homo sapiens
  MOD_RES (36)..(36): Selenocysteine
  MOD_RES (57)..(58): Selenocysteine
  MOD_RES (65)..(65): Selenocysteine
  MOD_RES (126)..(126): Selenocysteine
  MOD_RES (133)..(133): Selenocysteine
  MOD_RES (141)..(141): Selenocysteine
  MOD_RES (154)..(154): Selenocysteine
  MOD_RES (182)..(182): Selenocysteine
  MOD_RES (199)..(199): Selenocysteine
  MOD_RES (228)..(228): Selenocysteine
  MOD_RES (250)..(250): Selenocysteine
  MOD_RES (268)..(268): Selenocysteine
  MOD_RES (282)..(282): Selenocysteine
  MOD_RES (292)..(292): Selenocysteine
  MOD_RES (393)..(393): Selenocysteine
  MOD_RES (397)..(397): Selenocysteine
  MOD_RES (440)..(440): Selenocysteine
MSCLMVERCGEILFENPDQNAKCVCMLGDIRLRGQXGVRAERRGSYPFIDFRLLNSXXYSGEIGXKKKVKRLLSFQRYFHASRLLRGIIPQAPLHLLDEDYLGQARHMLSKVGMWDFDIFLFDRLXNGNSLVXLLCHLFNXHGLIHHFKLDMVXLHRFLVMVQEDYHSQNPYHNAVHAADVXQAMHCYLKEPKLASFLXPLDIMLGLLAAAAHDVDHPGVNQPFLIKXNHHLANLYQNMSVLENHHWRSXIGMLRESRLLAHLPKEMXQDIEQQLGSLILAXDINRQNEFLXRLKAHLHNKDLRLEDAQDRHFMLQIALKCADICNPCRIWEMSKQWSERVCEEFYRQGELEQKFELEISPLCNQQKDSIPSIQIGFMSYIVEPLFREWAHFXGNSXLSENMLGHLAHNKAQWKSLLPRQHRSRGSSGSGPDHDHAGQGXESEEQEGDSP

SEQ ID NO: 19722 - protein, 200 aa, Homo sapiens
  MOD_RES (1)..(1): Any amino acid
  MOD_RES (21)..(21): Selenocysteine
  MOD_RES (28)..(28): Selenocysteine
  MOD_RES (36)..(36): Selenocysteine
  MOD_RES (49)..(49): Selenocysteine
  MOD_RES (77)..(77): Selenocysteine
  MOD_RES (94)..(94): Selenocysteine
  MOD_RES (123)..(123): Selenocysteine
  MOD_RES (142)..(142): Selenocysteine
  MOD_RES (185)..(185): Selenocysteine
XHMLSKVGMWDFDIFLFDRLXNGNSLVXLLCHLFNXHGLIHHFKLDMVXLHRFLVMVQEDYHSQNPYHNAVHAADVXQAMHCYLKEPKLASFLXPLDIMLGLLAAAAHDVDHPGVNQPFLIKXNHHLANLYQVREPNLEPAXVWSIALGPVLKPESCPWRKPCFRVLEVQRRMKHNLCPQKFVQXQMLKMSKIQANLIPV

SEQ ID NO: 19723 - protein, 126 aa, Homo sapiens
  MOD_RES (18)..(18): Selenocysteine
  MOD_RES (24)..(24): Selenocysteine
  MOD_RES (66)..(66): Selenocysteine
  MOD_RES (87)..(87): Selenocysteine
  MOD_RES (89)..(89): Selenocysteine
AAPPLSSGGPRLPQGQKXAALPRXRGAGLLESELRDGSGKKVAVADVQFGPMRFHQDQLQVLLVFXKEDNQCNGFCRACEKAGFKCXVXKEAQAVLACFLDKHHDIIIIDHRNPRQLDAEALCRGM

SEQ ID NO: 19724 - protein, 783 aa, Homo sapiens
  MOD_RES (39)..(39): Selenocysteine
  MOD_RES (45)..(45): Selenocysteine
  MOD_RES (87)..(87): Selenocysteine
  MOD_RES (108)..(108): Selenocysteine
  MOD_RES (110)..(110): Selenocysteine
  MOD_RES (156)..(156): Selenocysteine
  MOD_RES (181)..(181): Selenocysteine
  MOD_RES (219)..(219): Selenocysteine
  MOD_RES (231)..(231): Selenocysteine
  MOD_RES (297)..(297): Selenocysteine
  MOD_RES (299)..(299): Selenocysteine
  MOD_RES (303)..(303): Selenocysteine
  MOD_RES (324)..(324): Selenocysteine
  MOD_RES (342)..(342): Selenocysteine
  MOD_RES (348)..(348): Selenocysteine
  MOD_RES (366)..(366): Selenocysteine
  MOD_RES (378)..(379): Selenocysteine
  MOD_RES (419)..(419): Selenocysteine
  MOD_RES (422)..(422): Selenocysteine
  MOD_RES (431)..(431): Selenocysteine
  MOD_RES (463)..(463): Selenocysteine
  MOD_RES (491)..(491): Selenocysteine
  MOD_RES (513)..(513): Selenocysteine
  MOD_RES (522)..(522): Selenocysteine
  MOD_RES (534)..(534): Selenocysteine
  MOD_RES (548)..(548): Selenocysteine
  MOD_RES (558)..(558): Selenocysteine
  MOD_RES (576)..(576): Selenocysteine
  MOD_RES (591)..(592): Selenocysteine
  MOD_RES (610)..(610): Selenocysteine
  MOD_RES (622)..(622): Selenocysteine
  MOD_RES (625)..(625): Selenocysteine
  MOD_RES (644)..(644): Selenocysteine
  MOD_RES (651)..(651): Selenocysteine
  MOD_RES (660)..(660): Selenocysteine
  MOD_RES (664)..(664): Selenocysteine
  MOD_RES (669)..(669): Selenocysteine
  MOD_RES (706)..(706): Selenocysteine
  MOD_RES (725)..(725): Selenocysteine
  MOD_RES (741)..(741): Selenocysteine
MGCAPSIHISERLVAEDAPSPAAPPLSSGGPRLPQGQKXAALPRXRGAGLLESELRDGSGKKVAVADVQFGPMRFHQDQLQVLLVFXKEDNQCNGFCRACEKAGFKCXVXKEAQAVLACFLDKHHDIIIIDHRNPRQLDAEALCRSIRSSKLSENXVIVGVVRRVDREELSVMPFISAGFXRRYVENPNIMACYNELLQLEFGEVRSQLKLRACNSVFXALENSEDAIEIXSEDRFIQEWQGIYYAKKKNGDNIQQNVKIIPVIGQGGKIRHYVSIIRVCNGNNKAEKISECVQSDXHXDNQXGKHKDRRKGSLDVKAVASRAXEVSSQRRHSSMARIHSMXIEAPIXKVINIINAAQESSPMPVXEALDRVLEILRXXELYSPQFGAKDDDPHANDLVGGLMSDGLRRLSGNEYVLSXKNXQMVSSNIIXPISLDDVPPRIARAMENEEYWDFDIFELEAAXHNRPLIYLGLKMFARFGICEFLHCSESXLRSWLQIIEANYHSSNPYHNSXHSADVLHAXAYFLSKERIKEXLDPIDEVAALIAAXIHDVDHPGRXNSFLCNAGSELAILYNDXAVLESHHAALAFQLXXGDDKCNIFKNMERNDYRXLRQGIIDMVLAXEMXKHFEHVNKFVNSINKPLAXLEENGEXDKNQEVINXMLRXPENRXLIKRMLIKCADVSNPCRPLQYCIEWAARISEEYFSQXDEEKQQGLPVVMPVFDRNXCSIPKSQISFIDYFIXDMFDAWDAFVDLPDLMQHLDNNFKYWKGLDEMKLRNLRPPPE

SEQ ID NO: 19725 - protein, 272 aa, Homo sapiens
  MOD_RES (39)..(39): Selenocysteine
  MOD_RES (45)..(45): Selenocysteine
  MOD_RES (87)..(87): Selenocysteine
  MOD_RES (108)..(108): Selenocysteine
  MOD_RES (110)..(110): Selenocysteine
  MOD_RES (156)..(156): Selenocysteine
  MOD_RES (181)..(181): Selenocysteine
  MOD_RES (219)..(219): Selenocysteine
  MOD_RES (231)..(231): Selenocysteine
  MOD_RES (272)..(272): Selenocysteine
MGCAPSIHISERLVAEDAPSPAAPPLSSGGPRLPQGQKXAALPRXRGAGLLESELRDGSGKKVAVADVQFGPMRFHQDQLQVLLVFXKEDNQCNGFCRACEKAGFKCXVXKEAQAVLACFLDKHHDIIIIDHRNPRQLDAEALCRSIRSSKLSENXVIVGVVRRVDREELSVMPFISAGFXRRYVENPNIMACYNELLQLEFGEVRSQLKLRACNSVFXALENSEDAIEIXSEDRFIQPCCSSSWFGAVHIPSSAPVEVGVGLLPSWSLRRX

SEQ ID NO: 19726 - protein, 829 aa, Homo sapiens
  MOD_RES (39)..(39): Selenocysteine
  MOD_RES (45)..(45): Selenocysteine
  MOD_RES (87)..(87): Selenocysteine
  MOD_RES (108)..(108): Selenocysteine
  MOD_RES (110)..(110): Selenocysteine
  MOD_RES (156)..(156): Selenocysteine
  MOD_RES (181)..(181): Selenocysteine
  MOD_RES (219)..(219): Selenocysteine
  MOD_RES (231)..(231): Selenocysteine
  MOD_RES (246)..(247): Selenocysteine
  MOD_RES (275)..(275): Selenocysteine
  MOD_RES (343)..(343): Selenocysteine
  MOD_RES (345)..(345): Selenocysteine
  MOD_RES (349)..(349): Selenocysteine
  MOD_RES (370)..(370): Selenocysteine
  MOD_RES (388)..(388): Selenocysteine
  MOD_RES (394)..(394): Selenocysteine
  MOD_RES (412)..(412): Selenocysteine
  MOD_RES (424)..(425): Selenocysteine
  MOD_RES (465)..(465): Selenocysteine
  MOD_RES (468)..(468): Selenocysteine
  MOD_RES (477)..(477): Selenocysteine
  MOD_RES (509)..(509): Selenocysteine
  MOD_RES (537)..(537): Selenocysteine
  MOD_RES (559)..(559): Selenocysteine
  MOD_RES (568)..(568): Selenocysteine
  MOD_RES (580)..(580): Selenocysteine
  MOD_RES (594)..(594): Selenocysteine
  MOD_RES (604)..(604): Selenocysteine
  MOD_RES (622)..(622): Selenocysteine
  MOD_RES (637)..(638): Selenocysteine
  MOD_RES (656)..(656): Selenocysteine
  MOD_RES (668)..(668): Selenocysteine
  MOD_RES (671)..(671): Selenocysteine
  MOD_RES (690)..(690): Selenocysteine
  MOD_RES (697)..(697): Selenocysteine
  MOD_RES (706)..(706): Selenocysteine
  MOD_RES (710)..(710): Selenocysteine
  MOD_RES (715)..(715): Selenocysteine
  MOD_RES (752)..(752): Selenocysteine
  MOD_RES (771)..(771): Selenocysteine
  MOD_RES (787)..(787): Selenocysteine
MGCAPSIHISERLVAEDAPSPAAPPLSSGGPRLPQGQKXAALPRXRGAGLLESELRDGSGKKVAVADVQFGPMRFHQDQLQVLLVFXKEDNQCNGFCRACEKAGFKCXVXKEAQAVLACFLDKHHDIIIIDHRNPRQLDAEALCRSIRSSKLSENXVIVGVVRRVDREELSVMPFISAGFXRRYVENPNIMACYNELLQLEFGEVRSQLKLRACNSVFXALENSEDAIEIXSEDRFIQYANPAFEXXMGYQSGELIGKELGEVPINEKKADLLDXINSCIRIGKEWQGIYYAKKKNGDNIQQNVKIIPVIGQGGKIRHYVSIIRVCNGNNKAEKISECVQSDXHXDNQXGKHKDRRKGSLDVKAVASRAXEVSSQRRHSSMARIHSMXIEAPIXKVINIINAAQESSPMPVXEALDRVLEILRXXELYSPQFGAKDDDPHANDLVGGLMSDGLRRLSGNEYVLSXKNXQMVSSNIIXPISLDDVPPRIARAMENEEYWDFDIFELEAAXHNRPLIYLGLKMFARFGICEFLHCSESXLRSWLQIIEANYHSSNPYHNSXHSADVLHAXAYFLSKERIKEXLDPIDEVAALIAAXIHDVDHPGRXNSFLCNAGSELAILYNDXAVLESHHAALAFQLXXGDDKCNIFKNMERNDYRXLRQGIIDMVLAXEMXKHFEHVNKFVNSINKPLAXLEENGEXDKNQEVINXMLRXPENRXLIKRMLIKCADVSNPCRPLQYCIEWAARISEEYFSQXDEEKQQGLPVVMPVFDRNXCSIPKSQISFIDYFIXDMFDAWDAFVDLPDLMQHLDNNFKYWKGLDEMKLRNLRPPPE

SEQ ID NO: 19727 - protein, 231 aa, Homo sapiens
  MOD_RES (39)..(39): Selenocysteine
  MOD_RES (45)..(45): Selenocysteine
  MOD_RES (87)..(87): Selenocysteine
  MOD_RES (108)..(108): Selenocysteine
  MOD_RES (110)..(110): Selenocysteine
  MOD_RES (156)..(156): Selenocysteine
  MOD_RES (181)..(181): Selenocysteine
  MOD_RES (218)..(218): Selenocysteine
  MOD_RES (224)..(224): Selenocysteine
MGCAPSIHISERLVAEDAPSPAAPPLSSGGPRLPQGQKXAALPRXRGAGLLESELRDGSGKKVAVADVQFGPMRFHQDQLQVLLVFXKEDNQCNGFCRACEKAGFKCXVXKEAQAVLACFLDKHHDIIIIDHRNPRQLDAEALCRSIRSSKLSENXVIVGVVRRVDREELSVMPFISAGFXRRYVENPNIMACYNELLQLEFGEVRSQLKLRSGKEFXMPKRKXEIIYNKM

SEQ ID NO: 19728 - protein, 228 aa, Homo sapiens
  MOD_RES (39)..(39): Selenocysteine
  MOD_RES (45)..(45): Selenocysteine
  MOD_RES (87)..(87): Selenocysteine
  MOD_RES (108)..(108): Selenocysteine
  MOD_RES (110)..(110): Selenocysteine
  MOD_RES (156)..(156): Selenocysteine
  MOD_RES (181)..(181): Selenocysteine
MGCAPSIHISERLVAEDAPSPAAPPLSSGGPRLPQGQKXAALPRXRGAGLLESELRDGSGKKVAVADVQFGPMRFHQDQLQVLLVFXKEDNQCNGFCRACEKAGFKCXVXKEAQAVLACFLDKHHDIIIIDHRNPRQLDAEALCRSIRSSKLSENXVIVGVVRRVDREELSVMPFISAGFXRRYVENPNIMACYNELLQLEFGEVRSQLKLSMQILHLKQQWAISQVN

SEQ ID NO: 19729 - protein, 757 aa, Homo sapiens
  MOD_RES (15)..(15): Selenocysteine
  MOD_RES (36)..(36): Selenocysteine
  MOD_RES (38)..(38): Selenocysteine
  MOD_RES (84)..(84): Selenocysteine
  MOD_RES (109)..(109): Selenocysteine
  MOD_RES (147)..(147): Selenocysteine
  MOD_RES (159)..(159): Selenocysteine
  MOD_RES (174)..(175): Selenocysteine
  MOD_RES (203)..(203): Selenocysteine
  MOD_RES (271)..(271): Selenocysteine
  MOD_RES (273)..(273): Selenocysteine
  MOD_RES (277)..(277): Selenocysteine
  MOD_RES (298)..(298): Selenocysteine
  MOD_RES (316)..(316): Selenocysteine
  MOD_RES (322)..(322): Selenocysteine
  MOD_RES (340)..(340): Selenocysteine
  MOD_RES (352)..(353): Selenocysteine
  MOD_RES (393)..(393): Selenocysteine
  MOD_RES (396)..(396): Selenocysteine
  MOD_RES (405)..(405): Selenocysteine
  MOD_RES (437)..(437): Selenocysteine
  MOD_RES (465)..(465): Selenocysteine
  MOD_RES (487)..(487): Selenocysteine
  MOD_RES (496)..(496): Selenocysteine
  MOD_RES (508)..(508): Selenocysteine
  MOD_RES (522)..(522): Selenocysteine
  MOD_RES (532)..(532): Selenocysteine
  MOD_RES (550)..(550): Selenocysteine
  MOD_RES (565)..(566): Selenocysteine
  MOD_RES (584)..(584): Selenocysteine
  MOD_RES (596)..(596): Selenocysteine
  MOD_RES (599)..(599): Selenocysteine
  MOD_RES (618)..(618): Selenocysteine
  MOD_RES (625)..(625): Selenocysteine
  MOD_RES (634)..(634): Selenocysteine
  MOD_RES (638)..(638): Selenocysteine
  MOD_RES (643)..(643): Selenocysteine
  MOD_RES (680)..(680): Selenocysteine
  MOD_RES (699)..(699): Selenocysteine
  MOD_RES (715)..(715): Selenocysteine
MRFHQDQLQVLLVFXKEDNQCNGFCRACEKAGFKCXVXKEAQAVLACFLDKHHDIIIIDHRNPRQLDAEALCRSIRSSKLSENXVIVGVVRRVDREELSVMPFISAGFXRRYVENPNIMACYNELLQLEFGEVRSQLKLRACNSVFXALENSEDAIEIXSEDRFIQYANPAFEXXMGYQSGELIGKELGEVPINEKKADLLDXINSCIRIGKEWQGIYYAKKKNGDNIQQNVKIIPVIGQGGKIRHYVSIIRVCNGNNKAEKISECVQSDXHXDNQXGKHKDRRKGSLDVKAVASRAXEVSSQRRHSSMARIHSMXIEAPIXKVINIINAAQESSPMPVXEALDRVLEILRXXELYSPQFGAKDDDPHANDLVGGLMSDGLRRLSGNEYVLSXKNXQMVSSNIIXPISLDDVPPRIARAMENEEYWDFDIFELEAAXHNRPLIYLGLKMFARFGICEFLHCSESXLRSWLQIIEANYHSSNPYHNSXHSADVLHAXAYFLSKERIKEXLDPIDEVAALIAAXIHDVDHPGRXNSFLCNAGSELAILYNDXAVLESHHAALAFQLXXGDDKCNIFKNMERNDYRXLRQGIIDMVLAXEMXKHFEHVNKFVNSINKPLAXLEENGEXDKNQEVINXMLRXPENRXLIKRMLIKCADVSNPCRPLQYCIEWAARISEEYFSQXDEEKQQGLPVVMPVFDRNXCSIPKSQISFIDYFIXDMFDAWDAFVDLPDLMQHLDNNFKYWKGLDEMKLRNLRPPPE

SEQ ID NO: 19730 - protein, 119 aa, Homo sapiens
  MOD_RES (35)..(35): Selenocysteine
  MOD_RES (47)..(47): Selenocysteine
  MOD_RES (92)..(92): Selenocysteine
  MOD_RES (95)..(95): Selenocysteine
MENSSIIACYNELIQIEHGEVRSQFKLRACNSVFXALDHCHEAIEIXSDDHVIQYVNPAFERMMGYHKGELLGKELADLPKSDKNRADLLDXINXCIKKGKEWQGVYYARRKSGDSIQQ

SEQ ID NO: 19731 - protein, 788 aa, Homo sapiens
  MOD_RES (29)..(30): Selenocysteine
  MOD_RES (47)..(47): Selenocysteine
  MOD_RES (72)..(72): Selenocysteine
  MOD_RES (88)..(89): Selenocysteine
  MOD_RES (105)..(105): Selenocysteine
  MOD_RES (107)..(107): Selenocysteine
  MOD_RES (110)..(110): Selenocysteine
  MOD_RES (128)..(128): Selenocysteine
  MOD_RES (164)..(164): Selenocysteine
  MOD_RES (187)..(187): Selenocysteine
  MOD_RES (202)..(202): Selenocysteine
  MOD_RES (208)..(208): Selenocysteine
  MOD_RES (273)..(273): Selenocysteine
  MOD_RES (285)..(285): Selenocysteine
  MOD_RES (306)..(306): Selenocysteine
  MOD_RES (351)..(351): Selenocysteine
  MOD_RES (357)..(357): Selenocysteine
  MOD_RES (373)..(373): Selenocysteine
  MOD_RES (387)..(388): Selenocysteine
  MOD_RES (397)..(397): Selenocysteine
  MOD_RES (404)..(404): Selenocysteine
  MOD_RES (413)..(413): Selenocysteine
  MOD_RES (427)..(427): Selenocysteine
  MOD_RES (442)..(442): Selenocysteine
  MOD_RES (471)..(471): Selenocysteine
  MOD_RES (498)..(499): Selenocysteine
  MOD_RES (521)..(521): Selenocysteine
  MOD_RES (530)..(530): Selenocysteine
  MOD_RES (556)..(556): Selenocysteine
  MOD_RES (566)..(566): Selenocysteine
  MOD_RES (584)..(584): Selenocysteine
  MOD_RES (592)..(592): Selenocysteine
  MOD_RES (599)..(599): Selenocysteine
  MOD_RES (603)..(603): Selenocysteine
  MOD_RES (618)..(618): Selenocysteine
  MOD_RES (630)..(630): Selenocysteine
  MOD_RES (633)..(633): Selenocysteine
  MOD_RES (710)..(710): Selenocysteine
  MOD_RES (729)..(729): Selenocysteine
  MOD_RES (745)..(745): Selenocysteine
  MOD_RES (773)..(773): Selenocysteine
MGCAPSIHVSQSGVIYCRDSDESSSPRQXXSVSQGPAAPLPGLFVQXDAADAIPPSRASGPPSVARVRRARXELGSGSSAGSAAPAAXXSRGRRRHCCSSAEAEXQXCYXSVKQVSSAEVRIGPMRLXQDPIQVLLIFAKEDSQSDGFWWACDRAGYRCNIARXPESALECFLDKHHEIIVIDHRQXQNFDAEAVCRSIRAXNPSEHXVILAVVSRVSDDHEEASVLPLLHAGFNRRFMENSSIIACYNELIQIEHGEVRSQFKLRACNSVFXALDHCHEAIEIXSDDHVIQIHKIHRDSGDNSQXEPHSFRYKNRRKESIDVKSISSRGSDAPSLQNRRYPSMARIHSMXIEAPIXKVINIINAAQENSPVXVAEALDRVLEILRXXELYSPQLGXKDEDPHXSDLVGGLMXDGLRRLSGNEYVFXKNVHQSHSHLAMPIXINDVPPCISQLLDNEESWDFNIFELEAIXHKRPLVYLGLKVFSRFGVCEFLNCSEXXLRAWFQVIEANYHSSNAYHNSXHAADVLHAXAFFLGKERVKGSLDQLDEVAALIAAXVHDVDHPGRXNSFLCNAGSELAVLYNDXAVLESHHXALAFQLXVKDXKCNIFKNIDRNHYRXLRQAIIDMVLAXEMXKHFEHVNKFVNSINKPMAAEIEGSDCECNPAGKNFPENQILIKRMMIKCADVANPCRPLDLCIEWAGRISEEYFAQXDEEKRQGLPVVMPVFDRNXCSIPKSQISFIDYFIXDMFDAWDAFAHLPALMQHLADNYKHWKXLDDLKCKSLRLPSDS

SEQ ID NO: 19732 - protein, 830 aa, Homo sapiens
  MOD_RES (29)..(30): Selenocysteine
  MOD_RES (47)..(47): Selenocysteine
  MOD_RES (72)..(72): Selenocysteine
  MOD_RES (88)..(89): Selenocysteine
  MOD_RES (105)..(105): Selenocysteine
  MOD_RES (107)..(107): Selenocysteine
  MOD_RES (110)..(110): Selenocysteine
  MOD_RES (128)..(128): Selenocysteine
  MOD_RES (164)..(164): Selenocysteine
  MOD_RES (187)..(187): Selenocysteine
  MOD_RES (202)..(202): Selenocysteine
  MOD_RES (208)..(208): Selenocysteine
  MOD_RES (273)..(273): Selenocysteine
  MOD_RES (285)..(285): Selenocysteine
  MOD_RES (330)..(330): Selenocysteine
  MOD_RES (333)..(333): Selenocysteine
  MOD_RES (362)..(362): Selenocysteine
  MOD_RES (383)..(384): Selenocysteine
  MOD_RES (403)..(403): Selenocysteine
  MOD_RES (448)..(448): Selenocysteine
  MOD_RES (454)..(454): Selenocysteine
  MOD_RES (469)..(469): Selenocysteine
  MOD_RES (484)..(484): Selenocysteine
  MOD_RES (513)..(513): Selenocysteine
  MOD_RES (540)..(541): Selenocysteine
  MOD_RES (563)..(563): Selenocysteine
  MOD_RES (572)..(572): Selenocysteine
  MOD_RES (598)..(598): Selenocysteine
  MOD_RES (608)..(608): Selenocysteine
  MOD_RES (626)..(626): Selenocysteine
  MOD_RES (634)..(634): Selenocysteine
  MOD_RES (641)..(641): Selenocysteine
  MOD_RES (645)..(645): Selenocysteine
  MOD_RES (660)..(660): Selenocysteine
  MOD_RES (672)..(672): Selenocysteine
  MOD_RES (675)..(675): Selenocysteine
  MOD_RES (752)..(752): Selenocysteine
  MOD_RES (771)..(771): Selenocysteine
  MOD_RES (787)..(787): Selenocysteine
  MOD_RES (815)..(815): Selenocysteine
MGCAPSIHVSQSGVIYCRDSDESSSPRQXXSVSQGPAAPLPGLFVQXDAADAIPPSRASGPPSVARVRRARXELGSGSSAGSAAPAAXXSRGRRRHCCSSAEAEXQXCYXSVKQVSSAEVRIGPMRLXQDPIQVLLIFAKEDSQSDGFWWACDRAGYRCNIARXPESALECFLDKHHEIIVIDHRQXQNFDAEAVCRSIRAXNPSEHXVILAVVSRVSDDHEEASVLPLLHAGFNRRFMENSSIIACYNELIQIEHGEVRSQFKLRACNSVFXALDHCHEAIEIXSDDHVIQYVNPAFERMMGYHKGELLGKELADLPKSDKNRADLLDXINXCIKKGKEWQGVYYARRKSGDSIQQHVKIXPVIGQGGKIRHFVSLKKLCCXXDNNKQIHKIHRDSGDNSQXEPHSFRYKNRRKESIDVKSISSRGSDAPSLQNRRYPSMARIHSMXIEAPIXKDGLRRLSGNEYVFXKNVHQSHSHLAMPIXINDVPPCISQLLDNEESWDFNIFELEAIXHKRPLVYLGLKVFSRFGVCEFLNCSEXXLRAWFQVIEANYHSSNAYHNSXHAADVLHAXAFFLGKERVKGSLDQLDEVAALIAAXVHDVDHPGRXNSFLCNAGSELAVLYNDXAVLESHHXALAFQLXVKDXKCNIFKNIDRNHYRXLRQAIIDMVLAXEMXKHFEHVNKFVNSINKPMAAEIEGSDCECNPAGKNFPENQILIKRMMIKCADVANPCRPLDLCIEWAGRISEEYFAQXDEEKRQGLPVVMPVFDRNXCSIPKSQISFIDYFIXDMFDAWDAFAHLPALMQHLADNYKHWKXLDDLKCKSLRLPSDS

SEQ ID NO: 19733 - protein, 838 aa, Homo sapiens
  MOD_RES (29)..(30): Selenocysteine
  MOD_RES (47)..(47): Selenocysteine
  MOD_RES (72)..(72): Selenocysteine
  MOD_RES (88)..(89): Selenocysteine
  MOD_RES (105)..(105): Selenocysteine
  MOD_RES (107)..(107): Selenocysteine
  MOD_RES (110)..(110): Selenocysteine
  MOD_RES (128)..(128): Selenocysteine
  MOD_RES (164)..(164): Selenocysteine
  MOD_RES (187)..(187): Selenocysteine
  MOD_RES (202)..(202): Selenocysteine
  MOD_RES (208)..(208): Selenocysteine
  MOD_RES (273)..(273): Selenocysteine
  MOD_RES (285)..(285): Selenocysteine
  MOD_RES (315)..(315): Selenocysteine
  MOD_RES (336)..(337): Selenocysteine
  MOD_RES (356)..(356): Selenocysteine
  MOD_RES (401)..(401): Selenocysteine
  MOD_RES (407)..(407): Selenocysteine
  MOD_RES (423)..(423): Selenocysteine
  MOD_RES (437)..(438): Selenocysteine
  MOD_RES (447)..(447): Selenocysteine
  MOD_RES (454)..(454): Selenocysteine
  MOD_RES (463)..(463): Selenocysteine
  MOD_RES (477)..(477): Selenocysteine
  MOD_RES (492)..(492): Selenocysteine
  MOD_RES (521)..(521): Selenocysteine
  MOD_RES (548)..(549): Selenocysteine
  MOD_RES (571)..(571): Selenocysteine
  MOD_RES (580)..(580): Selenocysteine
  MOD_RES (606)..(606): Selenocysteine
  MOD_RES (616)..(616): Selenocysteine
  MOD_RES (634)..(634): Selenocysteine
  MOD_RES (642)..(642): Selenocysteine
  MOD_RES (649)..(649): Selenocysteine
  MOD_RES (653)..(653): Selenocysteine
  MOD_RES (668)..(668): Selenocysteine
  MOD_RES (680)..(680): Selenocysteine
  MOD_RES (683)..(683): Selenocysteine
  MOD_RES (760)..(760): Selenocysteine
  MOD_RES (779)..(779): Selenocysteine
  MOD_RES (795)..(795): Selenocysteine
  MOD_RES (823)..(823): Selenocysteine
MGCAPSIHVSQSGVIYCRDSDESSSPRQXXSVSQGPAAPLPGLFVQXDAADAIPPSRASGPPSVARVRRARXELGSGSSAGSAAPAAXXSRGRRRHCCSSAEAEXQXCYXSVKQVSSAEVRIGPMRLXQDPIQVLLIFAKEDSQSDGFWWACDRAGYRCNIARXPESALECFLDKHHEIIVIDHRQXQNFDAEAVCRSIRAXNPSEHXVILAVVSRVSDDHEEASVLPLLHAGFNRRFMENSSIIACYNELIQIEHGEVRSQFKLRACNSVFXALDHCHEAIEIXSDDHVIQEWQGVYYARRKSGDSIQQHVKIXPVIGQGGKIRHFVSLKKLCCXXDNNKQIHKIHRDSGDNSQXEPHSFRYKNRRKESIDVKSISSRGSDAPSLQNRRYPSMARIHSMXIEAPIXKVINIINAAQENSPVXVAEALDRVLEILRXXELYSPQLGXKDEDPHXSDLVGGLMXDGLRRLSGNEYVFXKNVHQSHSHLAMPIXINDVPPCISQLLDNEESWDFNIFELEAIXHKRPLVYLGLKVFSRFGVCEFLNCSEXXLRAWFQVIEANYHSSNAYHNSXHAADVLHAXAFFLGKERVKGSLDQLDEVAALIAAXVHDVDHPGRXNSFLCNAGSELAVLYNDXAVLESHHXALAFQLXVKDXKCNIFKNIDRNHYRXLRQAIIDMVLAXEMXKHFEHVNKFVNSINKPMAAEIEGSDCECNPAGKNFPENQILIKRMMIKCADVANPCRPLDLCIEWAGRISEEYFAQXDEEKRQGLPVVMPVFDRNXCSIPKSQISFIDYFIXDMFDAWDAFAHLPALMQHLADNYKHWKXLDDLKCKSLRLPSDS

SEQ ID NO: 19734 - protein, 885 aa, Homo sapiens
  MOD_RES (29)..(30): Selenocysteine
  MOD_RES (47)..(47): Selenocysteine
  MOD_RES (72)..(72): Selenocysteine
  MOD_RES (88)..(89): Selenocysteine
  MOD_RES (105)..(105): Selenocysteine
  MOD_RES (107)..(107): Selenocysteine
  MOD_RES (110)..(110): Selenocysteine
  MOD_RES (128)..(128): Selenocysteine
  MOD_RES (164)..(164): Selenocysteine
  MOD_RES (187)..(187): Selenocysteine
  MOD_RES (202)..(202): Selenocysteine
  MOD_RES (208)..(208): Selenocysteine
  MOD_RES (273)..(273): Selenocysteine
  MOD_RES (285)..(285): Selenocysteine
  MOD_RES (330)..(330): Selenocysteine
  MOD_RES (333)..(333): Selenocysteine
  MOD_RES (362)..(362): Selenocysteine
  MOD_RES (383)..(384): Selenocysteine
  MOD_RES (403)..(403): Selenocysteine
  MOD_RES (448)..(448): Selenocysteine
  MOD_RES (454)..(454): Selenocysteine
  MOD_RES (470)..(470): Selenocysteine
  MOD_RES (484)..(485): Selenocysteine
  MOD_RES (494)..(494): Selenocysteine
  MOD_RES (501)..(501): Selenocysteine
  MOD_RES (510)..(510): Selenocysteine
  MOD_RES (524)..(524): Selenocysteine
  MOD_RES (539)..(539): Selenocysteine
  MOD_RES (568)..(568): Selenocysteine
  MOD_RES (595)..(596): Selenocysteine
  MOD_RES (618)..(618): Selenocysteine
  MOD_RES (627)..(627): Selenocysteine
  MOD_RES (653)..(653): Selenocysteine
  MOD_RES (663)..(663): Selenocysteine
  MOD_RES (681)..(681): Selenocysteine
  MOD_RES (689)..(689): Selenocysteine
  MOD_RES (696)..(696): Selenocysteine
  MOD_RES (700)..(700): Selenocysteine
  MOD_RES (715)..(715): Selenocysteine
  MOD_RES (727)..(727): Selenocysteine
  MOD_RES (730)..(730): Selenocysteine
  MOD_RES (807)..(807): Selenocysteine
  MOD_RES (826)..(826): Selenocysteine
  MOD_RES (842)..(842): Selenocysteine
  MOD_RES (870)..(870): Selenocysteine
MGCAPSIHVSQSGVIYCRDSDESSSPRQXXSVSQGPAAPLPGLFVQXDAADAIPPSRASGPPSVARVRRARXELGSGSSAGSAAPAAXXSRGRRRHCCSSAEAEXQXCYXSVKQVSSAEVRIGPMRLXQDPIQVLLIFAKEDSQSDGFWWACDRAGYRCNIARXPESALECFLDKHHEIIVIDHRQXQNFDAEAVCRSIRAXNPSEHXVILAVVSRVSDDHEEASVLPLLHAGFNRRFMENSSIIACYNELIQIEHGEVRSQFKLRACNSVFXALDHCHEAIEIXSDDHVIQYVNPAFERMMGYHKGELLGKELADLPKSDKNRADLLDXINXCIKKGKEWQGVYYARRKSGDSIQQHVKIXPVIGQGGKIRHFVSLKKLCCXXDNNKQIHKIHRDSGDNSQXEPHSFRYKNRRKESIDVKSISSRGSDAPSLQNRRYPSMARIHSMXIEAPIXKVINIINAAQENSPVXVAEALDRVLEILRXXELYSPQLGXKDEDPHXSDLVGGLMXDGLRRLSGNEYVFXKNVHQSHSHLAMPIXINDVPPCISQLLDNEESWDFNIFELEAIXHKRPLVYLGLKVFSRFGVCEFLNCSEXXLRAWFQVIEANYHSSNAYHNSXHAADVLHAXAFFLGKERVKGSLDQLDEVAALIAAXVHDVDHPGRXNSFLCNAGSELAVLYNDXAVLESHHXALAFQLXVKDXKCNIFKNIDRNHYRXLRQAIIDMVLAXEMXKHFEHVNKFVNSINKPMAAEIEGSDCECNPAGKNFPENQILIKRMMIKCADVANPCRPLDLCIEWAGRISEEYFAQXDEEKRQGLPVVMPVFDRNXCSIPKSQISFIDYFIXDMFDAWDAFAHLPALMQHLADNYKHWKXLDDLKCKSLRLPSDS

SEQ ID NO: 19735 - protein, 865 aa, Homo sapiens
  MOD_RES (29)..(30): Selenocysteine
  MOD_RES (47)..(47): Selenocysteine
  MOD_RES (72)..(72): Selenocysteine
  MOD_RES (88)..(89): Selenocysteine
  MOD_RES (105)..(105): Selenocysteine
  MOD_RES (107)..(107): Selenocysteine
  MOD_RES (110)..(110): Selenocysteine
  MOD_RES (144)..(144): Selenocysteine
  MOD_RES (167)..(167): Selenocysteine
  MOD_RES (182)..(182): Selenocysteine
  MOD_RES (188)..(188): Selenocysteine
  MOD_RES (253)..(253): Selenocysteine
  MOD_RES (265)..(265): Selenocysteine
  MOD_RES (310)..(310): Selenocysteine
  MOD_RES (313)..(313): Selenocysteine
  MOD_RES (342)..(342): Selenocysteine
  MOD_RES (363)..(364): Selenocysteine
  MOD_RES (383)..(383): Selenocysteine
  MOD_RES (428)..(428): Selenocysteine
  MOD_RES (434)..(434): Selenocysteine
  MOD_RES (450)..(450): Selenocysteine
  MOD_RES (464)..(465): Selenocysteine
  MOD_RES (474)..(474): Selenocysteine
  MOD_RES (481)..(481): Selenocysteine
  MOD_RES (490)..(490): Selenocysteine
  MOD_RES (504)..(504): Selenocysteine
  MOD_RES (519)..(519): Selenocysteine
  MOD_RES (548)..(548): Selenocysteine
  MOD_RES (575)..(576): Selenocysteine
  MOD_RES (598)..(598): Selenocysteine
  MOD_RES (607)..(607): Selenocysteine
  MOD_RES (633)..(633): Selenocysteine
  MOD_RES (643)..(643): Selenocysteine
  MOD_RES (661)..(661): Selenocysteine
  MOD_RES (669)..(669): Selenocysteine
  MOD_RES (676)..(676): Selenocysteine
  MOD_RES (680)..(680): Selenocysteine
  MOD_RES (695)..(695): Selenocysteine
  MOD_RES (707)..(707): Selenocysteine
  MOD_RES (710)..(710): Selenocysteine
  MOD_RES (787)..(787): Selenocysteine
  MOD_RES (806)..(806): Selenocysteine
  MOD_RES (822)..(822): Selenocysteine
  MOD_RES (850)..(850): Selenocysteine
MGCAPSIHVSQSGVIYCRDSDESSSPRQXXSVSQGPAAPLPGLFVQXDAADAIPPSRASGPPSVARVRRARXELGSGSSAGSAAPAAXXSRGRRRHCCSSAEAEXQXCYXSVKVLLIFAKEDSQSDGFWWACDRAGYRCNIARXPESALECFLDKHHEIIVIDHRQXQNFDAEAVCRSIRAXNPSEHXVILAVVSRVSDDHEEASVLPLLHAGFNRRFMENSSIIACYNELIQIEHGEVRSQFKLRACNSVFXALDHCHEAIEIXSDDHVIQYVNPAFERMMGYHKGELLGKELADLPKSDKNRADLLDXINXCIKKGKEWQGVYYARRKSGDSIQQHVKIXPVIGQGGKIRHFVSLKKLCCXXDNNKQIHKIHRDSGDNSQXEPHSFRYKNRRKESIDVKSISSRGSDAPSLQNRRYPSMARIHSMXIEAPIXKVINIINAAQENSPVXVAEALDRVLEILRXXELYSPQLGXKDEDPHXSDLVGGLMXDGLRRLSGNEYVFXKNVHQSHSHLAMPIXINDVPPCISQLLDNEESWDFNIFELEAIXHKRPLVYLGLKVFSRFGVCEFLNCSEXXLRAWFQVIEANYHSSNAYHNSXHAADVLHAXAFFLGKERVKGSLDQLDEVAALIAAXVHDVDHPGRXNSFLCNAGSELAVLYNDXAVLESHHXALAFQLXVKDXKCNIFKNIDRNHYRXLRQAIIDMVLAXEMXKHFEHVNKFVNSINKPMAAEIEGSDCECNPAGKNFPENQILIKRMMIKCADVANPCRPLDLCIEWAGRISEEYFAQXDEEKRQGLPVVMPVFDRNXCSIPKSQISFIDYFIXDMFDAWDAFAHLPALMQHLADNYKHWKXLDDLKCKSLRLPSDS

SEQ ID NO: 19736 - protein, 350 aa, Homo sapiens
  MOD_RES (4)..(4): Selenocysteine
  MOD_RES (33)..(33): Selenocysteine
  MOD_RES (60)..(61): Selenocysteine
  MOD_RES (83)..(83): Selenocysteine
  MOD_RES (92)..(92): Selenocysteine
  MOD_RES (118)..(118): Selenocysteine
  MOD_RES (128)..(128): Selenocysteine
  MOD_RES (146)..(146): Selenocysteine
  MOD_RES (154)..(154): Selenocysteine
  MOD_RES (161)..(161): Selenocysteine
  MOD_RES (165)..(165): Selenocysteine
  MOD_RES (180)..(180): Selenocysteine
  MOD_RES (192)..(192): Selenocysteine
  MOD_RES (195)..(195): Selenocysteine
  MOD_RES (272)..(272): Selenocysteine
  MOD_RES (291)..(291): Selenocysteine
  MOD_RES (307)..(307): Selenocysteine
  MOD_RES (335)..(335): Selenocysteine
MPIXINDVPPCISQLLDNEESWDFNIFELEAIXHKRPLVYLGLKVFSRFGVCEFLNCSEXXLRAWFQVIEANYHSSNAYHNSXHAADVLHAXAFFLGKERVKGSLDQLDEVAALIAAXVHDVDHPGRXNSFLCNAGSELAVLYNDXAVLESHHXALAFQLXVKDXKCNIFKNIDRNHYRXLRQAIIDMVLAXEMXKHFEHVNKFVNSINKPMAAEIEGSDCECNPAGKNFPENQILIKRMMIKCADVANPCRPLDLCIEWAGRISEEYFAQXDEEKRQGLPVVMPVFDRNXCSIPKSQISFIDYFIXDMFDAWDAFAHLPALMQHLADNYKHWKXLDDLKCKSLRLPSDS

SEQ ID NO: 19737 - protein, 112 aa, Homo sapiens
  MOD_RES (4)..(4): Selenocysteine
  MOD_RES (40)..(40): Selenocysteine
  MOD_RES (63)..(63): Selenocysteine
  MOD_RES (78)..(78): Selenocysteine
  MOD_RES (84)..(84): Selenocysteine
MRLXQDPIQVLLIFAKEDSQSDGFWWACDRAGYRCNIARXPESALECFLDKHHEIIVIDHRQXQNFDAEAVCRSIRAXNPSEHXVILAVVSRVSDDHEEASVLPLLHAGFNR

SEQ ID NO: 19738 - protein, 116 aa, Homo sapiens
  MOD_RES (4)..(4): Selenocysteine
  MOD_RES (40)..(40): Selenocysteine
  MOD_RES (63)..(63): Selenocysteine
  MOD_RES (78)..(78): Selenocysteine
  MOD_RES (84)..(84): Selenocysteine
  MOD_RES (115)..(115): Selenocysteine
MRLXQDPIQVLLIFAKEDSQSDGFWWACDRAGYRCNIARXPESALECFLDKHHEIIVIDHRQXQNFDAEAVCRSIRAXNPSEHXVILAVVSRVSDDHEEASVLPLLHAGFNRVCXR

SEQ ID NO: 19739 - protein, 433 aa, Homo sapiens
  MOD_RES (59)..(59): Selenocysteine
  MOD_RES (75)..(75): Selenocysteine
  MOD_RES (82)..(82): Selenocysteine
  MOD_RES (92)..(92): Selenocysteine
  MOD_RES (100)..(100): Selenocysteine
  MOD_RES (134)..(134): Selenocysteine
  MOD_RES (180)..(180): Selenocysteine
  MOD_RES (187)..(187): Selenocysteine
  MOD_RES (202)..(202): Selenocysteine
  MOD_RES (209)..(209): Selenocysteine
  MOD_RES (258)..(258): Selenocysteine
  MOD_RES (263)..(263): Selenocysteine
  MOD_RES (291)..(291): Selenocysteine
  MOD_RES (348)..(348): Selenocysteine
  MOD_RES (351)..(351): Selenocysteine
  MOD_RES (367)..(367): Selenocysteine
  MOD_RES (369)..(369): Selenocysteine
  MOD_RES (407)..(407): Selenocysteine
  MOD_RES (411)..(411): Selenocysteine
  MOD_RES (415)..(415): Selenocysteine
MDAFRRAFKINELKAEVANHLAVLEKRVELEGLKVVEIEKCKSDIKKMREELAARSSRXNCPCKYSFLDNHKKLXPRRDVPXYPKYLLSPEXIEALRKPXFDVWLWEPNEMLSCLEHMYHDLGLVRDFSINPVXLRRWLFCVHDNYRNNPFHNFRHCFCVAQMMYSMVWLCSLQEKFSQXDILILMXAAICHDLDHPGYNNXYQINARXELAVRYNDISPLENHHCAVAFQILAEPECNIFSNIPPDGFKQIRQGMIXLILAXDMARHAEIMDSFKEKMENFDYSNEEHMXLLKMILIKCCDISNEVRPMEVAEPWVDCLLEEYFMQSDREKSEGLPVAPFMDRDKVXKAXAQIGFIKFVLIPMFEXVXKLFPMVEEIMLQPLWESRDRYEELKRIDDAMKELQKKXDSLXSGAXEKSRERSRDVKNSEGDCA

SEQ ID NO: 19740 - protein, 459 aa, Homo sapiens
  MOD_RES (8)..(9): Selenocysteine
  MOD_RES (14)..(15): Selenocysteine
  MOD_RES (25)..(25): Selenocysteine
  MOD_RES (85)..(85): Selenocysteine
  MOD_RES (101)..(101): Selenocysteine
  MOD_RES (108)..(108): Selenocysteine
  MOD_RES (118)..(118): Selenocysteine
  MOD_RES (126)..(126): Selenocysteine
  MOD_RES (160)..(160): Selenocysteine
  MOD_RES (206)..(206): Selenocysteine
  MOD_RES (213)..(213): Selenocysteine
  MOD_RES (228)..(228): Selenocysteine
  MOD_RES (235)..(235): Selenocysteine
  MOD_RES (284)..(284): Selenocysteine
  MOD_RES (289)..(289): Selenocysteine
  MOD_RES (317)..(317): Selenocysteine
  MOD_RES (374)..(374): Selenocysteine
  MOD_RES (377)..(377): Selenocysteine
  MOD_RES (393)..(393): Selenocysteine
  MOD_RES (395)..(395): Selenocysteine
  MOD_RES (433)..(433): Selenocysteine
  MOD_RES (437)..(437): Selenocysteine
  MOD_RES (441)..(441): Selenocysteine
MDAFRRNXXISLLXXDDAMVSIDPXMPANSERAFKINELKAEVANHLAVLEKRVELEGLKVVEIEKCKSDIKKMREELAARSSRXNCPCKYSFLDNHKKLXPRRDVPXYPKYLLSPEXIEALRKPXFDVWLWEPNEMLSCLEHMYHDLGLVRDFSINPVXLRRWLFCVHDNYRNNPFHNFRHCFCVAQMMYSMVWLCSLQEKFSQXDILILMXAAICHDLDHPGYNNXYQINARXELAVRYNDISPLENHHCAVAFQILAEPECNIFSNIPPDGFKQIRQGMIXLILAXDMARHAEIMDSFKEKMENFDYSNEEHMXLLKMILIKCCDISNEVRPMEVAEPWVDCLLEEYFMQSDREKSEGLPVAPFMDRDKVXKAXAQIGFIKFVLIPMFEXVXKLFPMVEEIMLQPLWESRDRYEELKRIDDAMKELQKKXDSLXSGAXEKSRERSRDVKNSEGDCA

SEQ ID NO: 19741 - protein, 552 aa, Homo sapiens
  MOD_RES (8)..(9): Selenocysteine
  MOD_RES (14)..(15): Selenocysteine
  MOD_RES (25)..(25): Selenocysteine
  MOD_RES (33)..(33): Selenocysteine
  MOD_RES (54)..(55): Selenocysteine
  MOD_RES (178)..(178): Selenocysteine
  MOD_RES (194)..(194): Selenocysteine
  MOD_RES (201)..(201): Selenocysteine
  MOD_RES (211)..(211): Selenocysteine
  MOD_RES (219)..(219): Selenocysteine
  MOD_RES (253)..(253): Selenocysteine
  MOD_RES (299)..(299): Selenocysteine
  MOD_RES (306)..(306): Selenocysteine
  MOD_RES (321)..(321): Selenocysteine
  MOD_RES (328)..(328): Selenocysteine
  MOD_RES (377)..(377): Selenocysteine
  MOD_RES (382)..(382): Selenocysteine
  MOD_RES (410)..(410): Selenocysteine
  MOD_RES (467)..(467): Selenocysteine
  MOD_RES (470)..(470): Selenocysteine
  MOD_RES (486)..(486): Selenocysteine
  MOD_RES (488)..(488): Selenocysteine
  MOD_RES (526)..(526): Selenocysteine
  MOD_RES (530)..(530): Selenocysteine
  MOD_RES (534)..(534): Selenocysteine
MDAFRRNXXISLLXXDDAMVSIDPXMPANSERXPYKVRPVAIKQLSAGVEDKRXXSRGQSAERPLRDRRVVGLEQPRREGAFESGQVEPRPREPQGCYQEGQRIPPEREELIQSVLAQVAEQFSRAFKINELKAEVANHLAVLEKRVELEGLKVVEIEKCKSDIKKMREELAARSSRXNCPCKYSFLDNHKKLXPRRDVPXYPKYLLSPEXIEALRKPXFDVWLWEPNEMLSCLEHMYHDLGLVRDFSINPVXLRRWLFCVHDNYRNNPFHNFRHCFCVAQMMYSMVWLCSLQEKFSQXDILILMXAAICHDLDHPGYNNXYQINARXELAVRYNDISPLENHHCAVAFQILAEPECNIFSNIPPDGFKQIRQGMIXLILAXDMARHAEIMDSFKEKMENFDYSNEEHMXLLKMILIKCCDISNEVRPMEVAEPWVDCLLEEYFMQSDREKSEGLPVAPFMDRDKVXKAXAQIGFIKFVLIPMFEXVXKLFPMVEEIMLQPLWESRDRYEELKRIDDAMKELQKKXDSLXSGAXEKSRERSRDVKNSEGDCA

SEQ ID NO: 19742 - protein, 492 aa, Homo sapiens
  MOD_RES (8)..(9): Selenocysteine
  MOD_RES (14)..(15): Selenocysteine
  MOD_RES (25)..(25): Selenocysteine
  MOD_RES (33)..(33): Selenocysteine
  MOD_RES (118)..(118): Selenocysteine
  MOD_RES (134)..(134): Selenocysteine
  MOD_RES (141)..(141): Selenocysteine
  MOD_RES (151)..(151): Selenocysteine
  MOD_RES (159)..(159): Selenocysteine
  MOD_RES (193)..(193): Selenocysteine
  MOD_RES (239)..(239): Selenocysteine
  MOD_RES (246)..(246): Selenocysteine
  MOD_RES (261)..(261): Selenocysteine
  MOD_RES (268)..(268): Selenocysteine
  MOD_RES (317)..(317): Selenocysteine
  MOD_RES (322)..(322): Selenocysteine
  MOD_RES (350)..(350): Selenocysteine
  MOD_RES (407)..(407): Selenocysteine
  MOD_RES (410)..(410): Selenocysteine
  MOD_RES (426)..(426): Selenocysteine
  MOD_RES (428)..(428): Selenocysteine
  MOD_RES (466)..(466): Selenocysteine
  MOD_RES (470)..(470): Selenocysteine
  MOD_RES (474)..(474): Selenocysteine
MDAFRRNXXISLLXXDDAMVSIDPXMPANSERXPYKVRPVAIKQLSEREELIQSVLAQVAEQFSRAFKINELKAEVANHLAVLEKRVELEGLKVVEIEKCKSDIKKMREELAARSSRXNCPCKYSFLDNHKKLXPRRDVPXYPKYLLSPEXIEALRKPXFDVWLWEPNEMLSCLEHMYHDLGLVRDFSINPVXLRRWLFCVHDNYRNNPFHNFRHCFCVAQMMYSMVWLCSLQEKFSQXDILILMXAAICHDLDHPGYNNXYQINARXELAVRYNDISPLENHHCAVAFQILAEPECNIFSNIPPDGFKQIRQGMIXLILAXDMARHAEIMDSFKEKMENFDYSNEEHMXLLKMILIKCCDISNEVRPMEVAEPWVDCLLEEYFMQSDREKSEGLPVAPFMDRDKVXKAXAQIGFIKFVLIPMFEXVXKLFPMVEEIMLQPLWESRDRYEELKRIDDAMKELQKKXDSLXSGAXEKSRERSRDVKNSEGDCA

SEQ ID NO: 19743 - protein, 526 aa, Homo sapiens
  MOD_RES (7)..(7): Selenocysteine
  MOD_RES (28)..(29): Selenocysteine
  MOD_RES (152)..(152): Selenocysteine
  MOD_RES (168)..(168): Selenocysteine
  MOD_RES (175)..(175): Selenocysteine
  MOD_RES (185)..(185): Selenocysteine
  MOD_RES (193)..(193): Selenocysteine
  MOD_RES (227)..(227): Selenocysteine
  MOD_RES (273)..(273): Selenocysteine
  MOD_RES (280)..(280): Selenocysteine
  MOD_RES (295)..(295): Selenocysteine
  MOD_RES (302)..(302): Selenocysteine
  MOD_RES (351)..(351): Selenocysteine
  MOD_RES (356)..(356): Selenocysteine
  MOD_RES (384)..(384): Selenocysteine
  MOD_RES (441)..(441): Selenocysteine
  MOD_RES (444)..(444): Selenocysteine
  MOD_RES (460)..(460): Selenocysteine
  MOD_RES (462)..(462): Selenocysteine
  MOD_RES (500)..(500): Selenocysteine
  MOD_RES (504)..(504): Selenocysteine
  MOD_RES (508)..(508): Selenocysteine
MDAFRSXPYKVRPVAIKQLSAGVEDKRXXSRGQSAERPLRDRRVVGLEQPRREGAFESGQVEPRPREPQGCYQEGQRIPPEREELIQSVLAQVAEQFSRAFKINELKAEVANHLAVLEKRVELEGLKVVEIEKCKSDIKKMREELAARSSRXNCPCKYSFLDNHKKLXPRRDVPXYPKYLLSPEXIEALRKPXFDVWLWEPNEMLSCLEHMYHDLGLVRDFSINPVXLRRWLFCVHDNYRNNPFHNFRHCFCVAQMMYSMVWLCSLQEKFSQXDILILMXAAICHDLDHPGYNNXYQINARXELAVRYNDISPLENHHCAVAFQILAEPECNIFSNIPPDGFKQIRQGMIXLILAXDMARHAEIMDSFKEKMENFDYSNEEHMXLLKMILIKCCDISNEVRPMEVAEPWVDCLLEEYFMQSDREKSEGLPVAPFMDRDKVXKAXAQIGFIKFVLIPMFEXVXKLFPMVEEIMLQPLWESRDRYEELKRIDDAMKELQKKXDSLXSGAXEKSRERSRDVKNSEGDCA

SEQ ID NO: 19744 - protein, 466 aa, Homo sapiens
  MOD_RES (7)..(7): Selenocysteine
  MOD_RES (92)..(92): Selenocysteine
  MOD_RES (108)..(108): Selenocysteine
  MOD_RES (115)..(115): Selenocysteine
  MOD_RES (125)..(125): Selenocysteine
  MOD_RES (133)..(133): Selenocysteine
  MOD_RES (167)..(167): Selenocysteine
  MOD_RES (213)..(213): Selenocysteine
  MOD_RES (220)..(220): Selenocysteine
  MOD_RES (235)..(235): Selenocysteine
  MOD_RES (242)..(242): Selenocysteine
  MOD_RES (291)..(291): Selenocysteine
  MOD_RES (296)..(296): Selenocysteine
  MOD_RES (324)..(324): Selenocysteine
  MOD_RES (381)..(381): Selenocysteine
  MOD_RES (384)..(384): Selenocysteine
  MOD_RES (400)..(400): Selenocysteine
  MOD_RES (402)..(402): Selenocysteine
  MOD_RES (440)..(440): Selenocysteine
  MOD_RES (444)..(444): Selenocysteine
  MOD_RES (448)..(448): Selenocysteine
MDAFRSXPYKVRPVAIKQLSEREELIQSVLAQVAEQFSRAFKINELKAEVANHLAVLEKRVELEGLKVVEIEKCKSDIKKMREELAARSSRXNCPCKYSFLDNHKKLXPRRDVPXYPKYLLSPEXIEALRKPXFDVWLWEPNEMLSCLEHMYHDLGLVRDFSINPVXLRRWLFCVHDNYRNNPFHNFRHCFCVAQMMYSMVWLCSLQEKFSQXDILILMXAAICHDLDHPGYNNXYQINARXELAVRYNDISPLENHHCAVAFQILAEPECNIFSNIPPDGFKQIRQGMIXLILAXDMARHAEIMDSFKEKMENFDYSNEEHMXLLKMILIKCCDISNEVRPMEVAEPWVDCLLEEYFMQSDREKSEGLPVAPFMDRDKVXKAXAQIGFIKFVLIPMFEXVXKLFPMVEEIMLQPLWESRDRYEELKRIDDAMKELQKKXDSLXSGAXEKSRERSRDVKNSEGDCA

SEQ ID NO: 19745 - protein, 491 aa, Homo sapiens
  MOD_RES (49)..(49): Selenocysteine
  MOD_RES (56)..(56): Selenocysteine
  MOD_RES (62)..(62): Selenocysteine
  MOD_RES (117)..(117): Selenocysteine
  MOD_RES (133)..(133): Selenocysteine
  MOD_RES (140)..(140): Selenocysteine
  MOD_RES (150)..(150): Selenocysteine
  MOD_RES (158)..(158): Selenocysteine
  MOD_RES (192)..(192): Selenocysteine
  MOD_RES (238)..(238): Selenocysteine
  MOD_RES (245)..(245): Selenocysteine
  MOD_RES (260)..(260): Selenocysteine
  MOD_RES (267)..(267): Selenocysteine
  MOD_RES (316)..(316): Selenocysteine
  MOD_RES (321)..(321): Selenocysteine
  MOD_RES (349)..(349): Selenocysteine
  MOD_RES (406)..(406): Selenocysteine
  MOD_RES (409)..(409): Selenocysteine
  MOD_RES (425)..(425): Selenocysteine
  MOD_RES (427)..(427): Selenocysteine
  MOD_RES (465)..(465): Selenocysteine
  MOD_RES (469)..(469): Selenocysteine
  MOD_RES (473)..(473): Selenocysteine
MGSGSSSYRPKAIYLDIDGRIQKEHDHLPADHRRRHGLHRPHHAREFRXHSVQSEXCGHQAXLRAFKINELKAEVANHLAVLEKRVELEGLKVVEIEKCKSDIKKMREELAARSSRXNCPCKYSFLDNHKKLXPRRDVPXYPKYLLSPEXIEALRKPXFDVWLWEPNEMLSCLEHMYHDLGLVRDFSINPVXLRRWLFCVHDNYRNNPFHNFRHCFCVAQMMYSMVWLCSLQEKFSQXDILILMXAAICHDLDHPGYNNXYQINARXELAVRYNDISPLENHHCAVAFQILAEPECNIFSNIPPDGFKQIRQGMIXLILAXDMARHAEIMDSFKEKMENFDYSNEEHMXLLKMILIKCCDISNEVRPMEVAEPWVDCLLEEYFMQSDREKSEGLPVAPFMDRDKVXKAXAQIGFIKFVLIPMFEXVXKLFPMVEEIMLQPLWESRDRYEELKRIDDAMKELQKKXDSLXSGAXEKSRERSRDVKNSEGDCA

SEQ ID NO: 19746 - protein, 465 aa, Homo sapiens
  MOD_RES (30)..(30): Selenocysteine
  MOD_RES (36)..(36): Selenocysteine
  MOD_RES (91)..(91): Selenocysteine
  MOD_RES (107)..(107): Selenocysteine
  MOD_RES (114)..(114): Selenocysteine
  MOD_RES (124)..(124): Selenocysteine
  MOD_RES (132)..(132): Selenocysteine
  MOD_RES (166)..(166): Selenocysteine
  MOD_RES (212)..(212): Selenocysteine
  MOD_RES (219)..(219): Selenocysteine
  MOD_RES (234)..(234): Selenocysteine
  MOD_RES (241)..(241): Selenocysteine
  MOD_RES (290)..(290): Selenocysteine
  MOD_RES (295)..(295): Selenocysteine
  MOD_RES (323)..(323): Selenocysteine
  MOD_RES (380)..(380): Selenocysteine
  MOD_RES (383)..(383): Selenocysteine
  MOD_RES (399)..(399): Selenocysteine
  MOD_RES (401)..(401): Selenocysteine
  MOD_RES (439)..(439): Selenocysteine
  MOD_RES (443)..(443): Selenocysteine
  MOD_RES (447)..(447): Selenocysteine
MGSGSSSYRPKAIYLDIDGRIQKHSVQSEXCGHQAXLRAFKINELKAEVANHLAVLEKRVELEGLKVVEIEKCKSDIKKMREELAARSSRXNCPCKYSFLDNHKKLXPRRDVPXYPKYLLSPEXIEALRKPXFDVWLWEPNEMLSCLEHMYHDLGLVRDFSINPVXLRRWLFCVHDNYRNNPFHNFRHCFCVAQMMYSMVWLCSLQEKFSQXDILILMXAAICHDLDHPGYNNXYQINARXELAVRYNDISPLENHHCAVAFQILAEPECNIFSNIPPDGFKQIRQGMIXLILAXDMARHAEIMDSFKEKMENFDYSNEEHMXLLKMILIKCCDISNEVRPMEVAEPWVDCLLEEYFMQSDREKSEGLPVAPFMDRDKVXKAXAQIGFIKFVLIPMFEXVXKLFPMVEEIMLQPLWESRDRYEELKRIDDAMKELQKKXDSLXSGAXEKSRERSRDVKNSEGDCA

SEQ ID NO: 19747 - protein, 540 aa, Homo sapiens
  MOD_RES (43)..(43): Selenocysteine
  MOD_RES (49)..(50): Selenocysteine
  MOD_RES (55)..(56): Selenocysteine
  MOD_RES (66)..(66): Selenocysteine
  MOD_RES (80)..(80): Selenocysteine
  MOD_RES (105)..(105): Selenocysteine
  MOD_RES (111)..(111): Selenocysteine
  MOD_RES (166)..(166): Selenocysteine
  MOD_RES (182)..(182): Selenocysteine
  MOD_RES (189)..(189): Selenocysteine
  MOD_RES (199)..(199): Selenocysteine
  MOD_RES (207)..(207): Selenocysteine
  MOD_RES (241)..(241): Selenocysteine
  MOD_RES (287)..(287): Selenocysteine
  MOD_RES (294)..(294): Selenocysteine
  MOD_RES (309)..(309): Selenocysteine
  MOD_RES (316)..(316): Selenocysteine
  MOD_RES (365)..(365): Selenocysteine
  MOD_RES (370)..(370): Selenocysteine
  MOD_RES (398)..(398): Selenocysteine
  MOD_RES (455)..(455): Selenocysteine
  MOD_RES (458)..(458): Selenocysteine
  MOD_RES (474)..(474): Selenocysteine
  MOD_RES (476)..(476): Selenocysteine
  MOD_RES (514)..(514): Selenocysteine
  MOD_RES (518)..(518): Selenocysteine
  MOD_RES (522)..(522): Selenocysteine
MGSGSSSYRPKAIYLDIDGRIQKVIFSKYCNSSDIMDLFCIAXGLPRNXXISLLXXDDAMVSIDPXMPANSERNELILYXSLRNLLFLPSKESWASHQHSVQSEXCGHQAXLRAFKINELKAEVANHLAVLEKRVELEGLKVVEIEKCKSDIKKMREELAARSSRXNCPCKYSFLDNHKKLXPRRDVPXYPKYLLSPEXIEALRKPXFDVWLWEPNEMLSCLEHMYHDLGLVRDFSINPVXLRRWLFCVHDNYRNNPFHNFRHCFCVAQMMYSMVWLCSLQEKFSQXDILILMXAAICHDLDHPGYNNXYQINARXELAVRYNDISPLENHHCAVAFQILAEPECNIFSNIPPDGFKQIRQGMIXLILAXDMARHAEIMDSFKEKMENFDYSNEEHMXLLKMILIKCCDISNEVRPMEVAEPWVDCLLEEYFMQSDREKSEGLPVAPFMDRDKVXKAXAQIGFIKFVLIPMFEXVXKLFPMVEEIMLQPLWESRDRYEELKRIDDAMKELQKKXDSLXSGAXEKSRERSRDVKNSEGDCA

SEQ ID NO: 19748 - protein, 593 aa, Homo sapiens
  MOD_RES (43)..(43): Selenocysteine
  MOD_RES (49)..(50): Selenocysteine
  MOD_RES (55)..(56): Selenocysteine
  MOD_RES (66)..(66): Selenocysteine
  MOD_RES (74)..(74): Selenocysteine
  MOD_RES (95)..(96): Selenocysteine
  MOD_RES (219)..(219): Selenocysteine
  MOD_RES (235)..(235): Selenocysteine
  MOD_RES (242)..(242): Selenocysteine
  MOD_RES (252)..(252): Selenocysteine
  MOD_RES (260)..(260): Selenocysteine
  MOD_RES (294)..(294): Selenocysteine
  MOD_RES (340)..(340): Selenocysteine
  MOD_RES (347)..(347): Selenocysteine
  MOD_RES (362)..(362): Selenocysteine
  MOD_RES (369)..(369): Selenocysteine
  MOD_RES (418)..(418): Selenocysteine
  MOD_RES (423)..(423): Selenocysteine
  MOD_RES (451)..(451): Selenocysteine
  MOD_RES (508)..(508): Selenocysteine
  MOD_RES (511)..(511): Selenocysteine
  MOD_RES (527)..(527): Selenocysteine
  MOD_RES (529)..(529): Selenocysteine
  MOD_RES (567)..(567): Selenocysteine
  MOD_RES (571)..(571): Selenocysteine
  MOD_RES (575)..(575): Selenocysteine
MGSGSSSYRPKAIYLDIDGRIQKVIFSKYCNSSDIMDLFCIAXGLPRNXXISLLXXDDAMVSIDPXMPANSERXPYKVRPVAIKQLSAGVEDKRXXSRGQSAERPLRDRRVVGLEQPRREGAFESGQVEPRPREPQGCYQEGQRIPPEREELIQSVLAQVAEQFSRAFKINELKAEVANHLAVLEKRVELEGLKVVEIEKCKSDIKKMREELAARSSRXNCPCKYSFLDNHKKLXPRRDVPXYPKYLLSPEXIEALRKPXFDVWLWEPNEMLSCLEHMYHDLGLVRDFSINPVXLRRWLFCVHDNYRNNPFHNFRHCFCVAQMMYSMVWLCSLQEKFSQXDILILMXAAICHDLDHPGYNNXYQINARXELAVRYNDISPLENHHCAVAFQILAEPECNIFSNIPPDGFKQIRQGMIXLILAXDMARHAEIMDSFKEKMENFDYSNEEHMXLLKMILIKCCDISNEVRPMEVAEPWVDCLLEEYFMQSDREKSEGLPVAPFMDRDKVXKAXAQIGFIKFVLIPMFEXVXKLFPMVEEIMLQPLWESRDRYEELKRIDDAMKELQKKXDSLXSGAXEKSRERSRDVKNSEGDCA

SEQ ID NO: 19749 - protein, 533 aa, Homo sapiens
  MOD_RES (43)..(43): Selenocysteine
  MOD_RES (49)..(50): Selenocysteine
  MOD_RES (55)..(56): Selenocysteine
  MOD_RES (66)..(66): Selenocysteine
  MOD_RES (74)..(74): Selenocysteine
  MOD_RES (159)..(159): Selenocysteine
  MOD_RES (175)..(175): Selenocysteine
  MOD_RES (182)..(182): Selenocysteine
  MOD_RES (192)..(192): Selenocysteine
  MOD_RES (200)..(200): Selenocysteine
  MOD_RES (234)..(234): Selenocysteine
  MOD_RES (280)..(280): Selenocysteine
  MOD_RES (287)..(287): Selenocysteine
  MOD_RES (302)..(302): Selenocysteine
  MOD_RES (309)..(309): Selenocysteine
  MOD_RES (358)..(358): Selenocysteine
  MOD_RES (363)..(363): Selenocysteine
  MOD_RES (391)..(391): Selenocysteine
  MOD_RES (448)..(448): Selenocysteine
  MOD_RES (451)..(451): Selenocysteine
  MOD_RES (467)..(467): Selenocysteine
  MOD_RES (469)..(469): Selenocysteine
  MOD_RES (507)..(507): Selenocysteine
  MOD_RES (511)..(511): Selenocysteine
  MOD_RES (515)..(515): Selenocysteine
MGSGSSSYRPKAIYLDIDGRIQKVIFSKYCNSSDIMDLFCIAXGLPRNXXISLLXXDDAMVSIDPXMPANSERXPYKVRPVAIKQLSEREELIQSVLAQVAEQFSRAFKINELKAEVANHLAVLEKRVELEGLKVVEIEKCKSDIKKMREELAARSSRXNCPCKYSFLDNHKKLXPRRDVPXYPKYLLSPEXIEALRKPXFDVWLWEPNEMLSCLEHMYHDLGLVRDFSINPVXLRRWLFCVHDNYRNNPFHNFRHCFCVAQMMYSMVWLCSLQEKFSQXDILILMXAAICHDLDHPGYNNXYQINARXELAVRYNDISPLENHHCAVAFQILAEPECNIFSNIPPDGFKQIRQGMIXLILAXDMARHAEIMDSFKEKMENFDYSNEEHMXLLKMILIKCCDISNEVRPMEVAEPWVDCLLEEYFMQSDREKSEGLPVAPFMDRDKVXKAXAQIGFIKFVLIPMFEXVXKLFPMVEEIMLQPLWESRDRYEELKRIDDAMKELQKKXDSLXSGAXEKSRERSRDVKNSEGDCA

SEQ ID NO: 19750 - protein, 567 aa, Homo sapiens
  MOD_RES (43)..(43): Selenocysteine
  MOD_RES (48)..(48): Selenocysteine
  MOD_RES (69)..(70): Selenocysteine
  MOD_RES (193)..(193): Selenocysteine
  MOD_RES (209)..(209): Selenocysteine
  MOD_RES (216)..(216): Selenocysteine
  MOD_RES (226)..(226): Selenocysteine
  MOD_RES (234)..(234): Selenocysteine
  MOD_RES (268)..(268): Selenocysteine
  MOD_RES (314)..(314): Selenocysteine
  MOD_RES (321)..(321): Selenocysteine
  MOD_RES (336)..(336): Selenocysteine
  MOD_RES (343)..(343): Selenocysteine
  MOD_RES (392)..(392): Selenocysteine
  MOD_RES (397)..(397): Selenocysteine
  MOD_RES (425)..(425): Selenocysteine
  MOD_RES (482)..(482): Selenocysteine
  MOD_RES (485)..(485): Selenocysteine
  MOD_RES (501)..(501): Selenocysteine
  MOD_RES (503)..(503): Selenocysteine
  MOD_RES (541)..(541): Selenocysteine
  MOD_RES (545)..(545): Selenocysteine
  MOD_RES (549)..(549): Selenocysteine
MGSGSSSYRPKAIYLDIDGRIQKVIFSKYCNSSDIMDLFCIAXGLPRXPYKVRPVAIKQLSAGVEDKRXXSRGQSAERPLRDRRVVGLEQPRREGAFESGQVEPRPREPQGCYQEGQRIPPEREELIQSVLAQVAEQFSRAFKINELKAEVANHLAVLEKRVELEGLKVVEIEKCKSDIKKMREELAARSSRXNCPCKYSFLDNHKKLXPRRDVPXYPKYLLSPEXIEALRKPXFDVWLWEPNEMLSCLEHMYHDLGLVRDFSINPVXLRRWLFCVHDNYRNNPFHNFRHCFCVAQMMYSMVWLCSLQEKFSQXDILILMXAAICHDLDHPGYNNXYQINARXELAVRYNDISPLENHHCAVAFQILAEPECNIFSNIPPDGFKQIRQGMIXLILAXDMARHAEIMDSFKEKMENFDYSNEEHMXLLKMILIKCCDISNEVRPMEVAEPWVDCLLEEYFMQSDREKSEGLPVAPFMDRDKVXKAXAQIGFIKFVLIPMFEXVXKLFPMVEEIMLQPLWESRDRYEELKRIDDAMKELQKKXDSLXSGAXEKSRERSRDVKNSEGDCA

SEQ ID NO: 19751 - protein, 507 aa, Homo sapiens
  MOD_RES (43)..(43): Selenocysteine
  MOD_RES (48)..(48): Selenocysteine
  MOD_RES (133)..(133): Selenocysteine
  MOD_RES (149)..(149): Selenocysteine
  MOD_RES (156)..(156): Selenocysteine
  MOD_RES (166)..(166): Selenocysteine
  MOD_RES (174)..(174): Selenocysteine
  MOD_RES (208)..(208): Selenocysteine
  MOD_RES (254)..(254): Selenocysteine
  MOD_RES (261)..(261): Selenocysteine
  MOD_RES (276)..(276): Selenocysteine
  MOD_RES (283)..(283): Selenocysteine
  MOD_RES (332)..(332): Selenocysteine
  MOD_RES (337)..(337): Selenocysteine
  MOD_RES (365)..(365): Selenocysteine
  MOD_RES (422)..(422): Selenocysteine
  MOD_RES (425)..(425): Selenocysteine
  MOD_RES (441)..(441): Selenocysteine
  MOD_RES (443)..(443): Selenocysteine
  MOD_RES (481)..(481): Selenocysteine
  MOD_RES (485)..(485): Selenocysteine
  MOD_RES (489)..(489): Selenocysteine
MGSGSSSYRPKAIYLDIDGRIQKVIFSKYCNSSDIMDLFCIAXGLPRXPYKVRPVAIKQLSEREELIQSVLAQVAEQFSRAFKINELKAEVANHLAVLEKRVELEGLKVVEIEKCKSDIKKMREELAARSSRXNCPCKYSFLDNHKKLXPRRDVPXYPKYLLSPEXIEALRKPXFDVWLWEPNEMLSCLEHMYHDLGLVRDFSINPVXLRRWLFCVHDNYRNNPFHNFRHCFCVAQMMYSMVWLCSLQEKFSQXDILILMXAAICHDLDHPGYNNXYQINARXELAVRYNDISPLENHHCAVAFQILAEPECNIFSNIPPDGFKQIRQGMIXLILAXDMARHAEIMDSFKEKMENFDYSNEEHMXLLKMILIKCCDISNEVRPMEVAEPWVDCLLEEYFMQSDREKSEGLPVAPFMDRDKVXKAXAQIGFIKFVLIPMFEXVXKLFPMVEEIMLQPLWESRDRYEELKRIDDAMKELQKKXDSLXSGAXEKSRERSRDVKNSEGDCA

SEQ ID NO: 19752 - protein, 86 aa, Homo sapiens
  MOD_RES (3)..(3): Selenocysteine
  MOD_RES (61)..(61): Selenocysteine
  MOD_RES (71)..(71): Selenocysteine
MRXLACLLLLGCGYLAHVLAEEAEIPREVIERLARSQIHSIRDLQRLLEIDSVGSEDSLDXSLRAHGVHAXKHVPEKRPLPIRRKR

SEQ ID NO: 19753 - protein, 196 aa, Homo sapiens
  MOD_RES (3)..(3): Selenocysteine
  MOD_RES (61)..(61): Selenocysteine
  MOD_RES (71)..(71): Selenocysteine
  MOD_RES (98)..(98): Selenocysteine
  MOD_RES (100)..(100): Selenocysteine
  MOD_RES (113)..(113): Selenocysteine
  MOD_RES (130)..(130): Selenocysteine
  MOD_RES (135)..(135): Selenocysteine
  MOD_RES (181)..(182): Selenocysteine
  MOD_RES (193)..(193): Selenocysteine
MRXLACLLLLGCGYLAHVLAEEAEIPREVIERLARSQIHSIRDLQRLLEIDSVGSEDSLDXSLRAHGVHAXKHVPEKRPLPIRRKRSIEEAVPAVCKXRXVIYEIPRSQVDPXSANFLIWPPCVEVKRCXGCCNXSSVKCQPSRVHHRSVKVAKVEYVRKKPKLKEVQVRLEEHLECACAXXSLNPDYREEDXDVR

SEQ ID NO: 19754 - protein, 211 aa, Homo sapiens
  MOD_RES (3)..(3): Selenocysteine
  MOD_RES (61)..(61): Selenocysteine
  MOD_RES (71)..(71): Selenocysteine
  MOD_RES (98)..(98): Selenocysteine
  MOD_RES (100)..(100): Selenocysteine
  MOD_RES (113)..(113): Selenocysteine
  MOD_RES (130)..(130): Selenocysteine
  MOD_RES (135)..(135): Selenocysteine
  MOD_RES (181)..(182): Selenocysteine
  MOD_RES (193)..(193): Selenocysteine
  MOD_RES (211)..(211): Selenocysteine
MRXLACLLLLGCGYLAHVLAEEAEIPREVIERLARSQIHSIRDLQRLLEIDSVGSEDSLDXSLRAHGVHAXKHVPEKRPLPIRRKRSIEEAVPAVCKXRXVIYEIPRSQVDPXSANFLIWPPCVEVKRCXGCCNXSSVKCQPSRVHHRSVKVAKVEYVRKKPKLKEVQVRLEEHLECACAXXSLNPDYREEDXGRPRESGKKRKRKRLKPX

SEQ ID NO: 19755 - protein, 205 aa, Homo sapiens
  MOD_RES (70)..(70): Selenocysteine
  MOD_RES (80)..(80): Selenocysteine
  MOD_RES (107)..(107): Selenocysteine
  MOD_RES (109)..(109): Selenocysteine
  MOD_RES (122)..(122): Selenocysteine
  MOD_RES (139)..(139): Selenocysteine
  MOD_RES (144)..(144): Selenocysteine
  MOD_RES (190)..(191): Selenocysteine
  MOD_RES (202)..(202): Selenocysteine
QRQAAALGSQSPSPAGLRAGAVPPARACLQEAEIPREVIERLARSQIHSIRDLQRLLEIDSVGSEDSLDXSLRAHGVHAXKHVPEKRPLPIRRKRSIEEAVPAVCKXRXVIYEIPRSQVDPXSANFLIWPPCVEVKRCXGCCNXSSVKCQPSRVHHRSVKVAKVEYVRKKPKLKEVQVRLEEHLECACAXXSLNPDYREEDXDVR

SEQ ID NO: 19756 - protein, 226 aa, Homo sapiens
  MOD_RES (50)..(50): Selenocysteine
  MOD_RES (72)..(72): Selenocysteine
  MOD_RES (84)..(84): Selenocysteine
  MOD_RES (86)..(86): Selenocysteine
  MOD_RES (99)..(99): Selenocysteine
  MOD_RES (129)..(129): Selenocysteine
  MOD_RES (154)..(154): Selenocysteine
  MOD_RES (156)..(156): Selenocysteine
  MOD_RES (167)..(167): Selenocysteine
  MOD_RES (175)..(175): Selenocysteine
  MOD_RES (188)..(188): Selenocysteine
  MOD_RES (191)..(191): Selenocysteine
  MOD_RES (194)..(194): Selenocysteine
  MOD_RES (197)..(197): Selenocysteine
  MOD_RES (214)..(214): Selenocysteine
  MOD_RES (218)..(218): Selenocysteine
  MOD_RES (223)..(223): Selenocysteine
MFIMGLGDPIPEELYEMLSDHSIRSFDDLQRLLHGDPGEEDGAELDLNMXRSHSGGELESLARGRRSLGSLXIAEPAMIAECKXRXEVFEISRRLIDRXNANFLVWPPCVEVQRCSGCCNNRNVQCRPXQVQLRPVQVRKIEIVRKKPIFKKAXVXLEDHLACKCEXVAAARPVXRSPGGSQEQRAKXPQXRVXIRXVRVRRPPKGKHRKFKHXHDKXALKEXLGA

SEQ ID NO: 19757 - protein, 136 aa, Homo sapiens
  MOD_RES (34)..(34): Selenocysteine
  MOD_RES (56)..(56): Selenocysteine
  MOD_RES (68)..(68): Selenocysteine
  MOD_RES (70)..(70): Selenocysteine
  MOD_RES (83)..(83): Selenocysteine
  MOD_RES (113)..(113): Selenocysteine
MLSDHSIRSFDDLQRLLHGDPGEEDGAELDLNMXRSHSGGELESLARGRRSLGSLXIAEPAMIAECKXRXEVFEISRRLIDRXNANFLVWPPCVEVQRCSGCCNNRNVQCRPXQVQLRPVQVRKIEIVRKKPIFKK

SEQ ID NO: 19758 - protein, 144 aa, Homo sapiens
  MOD_RES (34)..(34): Selenocysteine
  MOD_RES (56)..(56): Selenocysteine
  MOD_RES (68)..(68): Selenocysteine
  MOD_RES (70)..(70): Selenocysteine
  MOD_RES (83)..(83): Selenocysteine
  MOD_RES (113)..(113): Selenocysteine
  MOD_RES (138)..(138): Selenocysteine
  MOD_RES (140)..(140): Selenocysteine
MLSDHSIRSFDDLQRLLHGDPGEEDGAELDLNMXRSHSGGELESLARGRRSLGSLXIAEPAMIAECKXRXEVFEISRRLIDRXNANFLVWPPCVEVQRCSGCCNNRNVQCRPXQVQLRPVQVRKIEIVRKKPIFKKAXVXLEDH

SEQ ID NO: 19759 - protein, 241 aa, Homo sapiens
  MOD_RES (65)..(65): Selenocysteine
  MOD_RES (87)..(87): Selenocysteine
  MOD_RES (99)..(99): Selenocysteine
  MOD_RES (101)..(101): Selenocysteine
  MOD_RES (114)..(114): Selenocysteine
  MOD_RES (144)..(144): Selenocysteine
  MOD_RES (169)..(169): Selenocysteine
  MOD_RES (171)..(171): Selenocysteine
  MOD_RES (182)..(182): Selenocysteine
  MOD_RES (190)..(190): Selenocysteine
  MOD_RES (203)..(203): Selenocysteine
  MOD_RES (206)..(206): Selenocysteine
  MOD_RES (209)..(209): Selenocysteine
  MOD_RES (212)..(212): Selenocysteine
  MOD_RES (229)..(229): Selenocysteine
  MOD_RES (233)..(233): Selenocysteine
  MOD_RES (238)..(238): Selenocysteine
MNRCWALFLSLCCYLRLVSAEGDPIPEELYEMLSDHSIRSFDDLQRLLHGDPGEEDGAELDLNMXRSHSGGELESLARGRRSLGSLXIAEPAMIAECKXRXEVFEISRRLIDRXNANFLVWPPCVEVQRCSGCCNNRNVQCRPXQVQLRPVQVRKIEIVRKKPIFKKAXVXLEDHLACKCEXVAAARPVXRSPGGSQEQRAKXPQXRVXIRXVRVRRPPKGKHRKFKHXHDKXALKEXLGA

SEQ ID NO: 19760 - protein, 50 aa, Homo sapiens
  MOD_RES (10)..(10): Selenocysteine
  MOD_RES (20)..(20): Selenocysteine
MSLFGLLLLXSALAGQRQGXQAESNLSSKFQFSSNKEQNGRNYIQASGLA

SEQ ID NO: 19761 - protein, 282 aa, Homo sapiens
  MOD_RES (10)..(10): Selenocysteine
  MOD_RES (20)..(20): Selenocysteine
  MOD_RES (51)..(51): Selenocysteine
  MOD_RES (54)..(54): Selenocysteine
  MOD_RES (66)..(66): Selenocysteine
  MOD_RES (71)..(71): Selenocysteine
  MOD_RES (89)..(89): Selenocysteine
  MOD_RES (118)..(118): Selenocysteine
  MOD_RES (128)..(128): Selenocysteine
  MOD_RES (168)..(168): Selenocysteine
  MOD_RES (191)..(191): Selenocysteine
  MOD_RES (195)..(195): Selenocysteine
  MOD_RES (219)..(219): Selenocysteine
  MOD_RES (242)..(242): Selenocysteine
  MOD_RES (252)..(252): Selenocysteine
  MOD_RES (262)..(262): Selenocysteine
  MOD_RES (280)..(280): Selenocysteine
MSLFGLLLLXSALAGQRQGXQAESNLSSKFQFSSNKEQNGVQDPQHERIIXVSXNGSIHSPRFPHXYPRNXVLVWRLVAVEENVWIQLXFDERFGLEDPEDDICKYDFVEVEEPSDGXILGRWCGSGXVPGKQISKGNQIRIRFVSDEYFPSEPGFCIHYNIVMPQFXEAVSPSVLPPSALPLDLLNNAIXAFSXLEDLIRYLEPERWQLDLEDLYRPXWQLLGKAFVFGRKSRVVDLNLLXEEVLQLRPKXGVRGLHKSLXDVALEHHEECDCVCRGSXGG

SEQ ID NO: 19762 - protein, 345 aa, Homo sapiens
  MOD_RES (10)..(10): Selenocysteine
  MOD_RES (20)..(20): Selenocysteine
  MOD_RES (51)..(51): Selenocysteine
  MOD_RES (54)..(54): Selenocysteine
  MOD_RES (66)..(66): Selenocysteine
  MOD_RES (71)..(71): Selenocysteine
  MOD_RES (89)..(89): Selenocysteine
  MOD_RES (118)..(118): Selenocysteine
  MOD_RES (128)..(128): Selenocysteine
  MOD_RES (168)..(168): Selenocysteine
  MOD_RES (191)..(191): Selenocysteine
  MOD_RES (195)..(195): Selenocysteine
  MOD_RES (219)..(219): Selenocysteine
  MOD_RES (242)..(242): Selenocysteine
  MOD_RES (251)..(251): Selenocysteine
  MOD_RES (266)..(266): Selenocysteine
  MOD_RES (268)..(268): Selenocysteine
  MOD_RES (302)..(302): Selenocysteine
  MOD_RES (315)..(315): Selenocysteine
  MOD_RES (325)..(325): Selenocysteine
  MOD_RES (343)..(343): Selenocysteine
MSLFGLLLLXSALAGQRQGXQAESNLSSKFQFSSNKEQNGVQDPQHERIIXVSXNGSIHSPRFPHXYPRNXVLVWRLVAVEENVWIQLXFDERFGLEDPEDDICKYDFVEVEEPSDGXILGRWCGSGXVPGKQISKGNQIRIRFVSDEYFPSEPGFCIHYNIVMPQFXEAVSPSVLPPSALPLDLLNNAIXAFSXLEDLIRYLEPERWQLDLEDLYRPXWQLLGKAFVFGRKSRVVDLNLLXEEVRLYSCXPRNFSVSIREELKRXDXIFWPGCLLVKRCGGNCACCLHNCNECQCVPSKVXKKYHEVLQLRPKXGVRGLHKSLXDVALEHHEECDCVCRGSXGG

SEQ ID NO: 19763 - protein, 53 aa, Homo sapiens
  MOD_RES (1)..(1): Any amino acid
  MOD_RES (2)..(2): Selenocysteine
  MOD_RES (31)..(31): Selenocysteine
XXFDERFGLEDPEDDICKYDFVEVEEPSDGXILGRWCGSGFCIHYNIVMPNLP

SEQ ID NO: 19764 - protein, 206 aa, Homo sapiens
  MOD_RES (10)..(10): Selenocysteine
  MOD_RES (70)..(70): Selenocysteine
  MOD_RES (78)..(78): Selenocysteine
  MOD_RES (103)..(103): Selenocysteine
  MOD_RES (112)..(112): Selenocysteine
  MOD_RES (145)..(145): Selenocysteine
  MOD_RES (147)..(147): Selenocysteine
  MOD_RES (167)..(167): Selenocysteine
  MOD_RES (173)..(173): Selenocysteine
  MOD_RES (204)..(204): Selenocysteine
IFEAVGAQGXVVLDEESLHVDDLDLFDGDSGLRFAEDLEVSELKVGADLEREGDLGEVPPHAVHESNHLXDLYRRDEXIQVKGNGYVQSPRFPNSYPRNLLLXWRLHSQENXRIQLVFDNQFGLEEAENDICRYDFVEVEDISEXSXIIRGRWCGHKEVPPRIKSRXNQIKIXFKSDDYFVAKPGFKIYYSLLEDFQPAAASEXNW

SEQ ID NO: 19765 - protein, 364 aa, Homo sapiens
  MOD_RES (9)..(9): Selenocysteine
  MOD_RES (21)..(21): Selenocysteine
  MOD_RES (24)..(24): Selenocysteine
  MOD_RES (49)..(49): Selenocysteine
  MOD_RES (74)..(74): Selenocysteine
  MOD_RES (83)..(83): Selenocysteine
  MOD_RES (116)..(116): Selenocysteine
  MOD_RES (118)..(118): Selenocysteine
  MOD_RES (138)..(138): Selenocysteine
  MOD_RES (144)..(144): Selenocysteine
  MOD_RES (175)..(175): Selenocysteine
  MOD_RES (181)..(181): Selenocysteine
  MOD_RES (195)..(195): Selenocysteine
  MOD_RES (198)..(198): Selenocysteine
  MOD_RES (213)..(213): Selenocysteine
  MOD_RES (237)..(237): Selenocysteine
  MOD_RES (267)..(267): Selenocysteine
  MOD_RES (304)..(304): Selenocysteine
  MOD_RES (311)..(311): Selenocysteine
  MOD_RES (317)..(317): Selenocysteine
  MOD_RES (340)..(340): Selenocysteine
MHRLIFVYXLICANFCSCRDXSAXPQSASIKALRNANLRRDDLYRRDEXIQVKGNGYVQSPRFPNSYPRNLLLXWRLHSQENXRIQLVFDNQFGLEEAENDICRYDFVEVEDISEXSXIIRGRWCGHKEVPPRIKSRXNQIKIXFKSDDYFVAKPGFKIYYSLLEDFQPAAASEXNWESVXSSISGVSYNSPSVXDPXLIADALDKKIAEFDXVEDLLKYFNPESWQEDLENMYLDXPRYRGRSYHDRKSKVDLDRLNDDAKRYSCXPRNYSVNIREELKLANVVFFPRCLLVQRCGGNCGCGXVNWRSCXCNSGKXVKKYHEVLQFEPGHIKRRGRAKXMALVDIQLDHHERCDCICSSRPPR

SEQ ID NO: 19766 - protein, 370 aa, Homo sapiens
  MOD_RES (9)..(9): Selenocysteine
  MOD_RES (21)..(21): Selenocysteine
  MOD_RES (24)..(24): Selenocysteine
  MOD_RES (47)..(47): Selenocysteine
  MOD_RES (55)..(55): Selenocysteine
  MOD_RES (80)..(80): Selenocysteine
  MOD_RES (89)..(89): Selenocysteine
  MOD_RES (122)..(122): Selenocysteine
  MOD_RES (124)..(124): Selenocysteine
  MOD_RES (144)..(144): Selenocysteine
  MOD_RES (150)..(150): Selenocysteine
  MOD_RES (181)..(181): Selenocysteine
  MOD_RES (187)..(187): Selenocysteine
  MOD_RES (201)..(201): Selenocysteine
  MOD_RES (204)..(204): Selenocysteine
  MOD_RES (219)..(219): Selenocysteine
  MOD_RES (243)..(243): Selenocysteine
  MOD_RES (273)..(273): Selenocysteine
  MOD_RES (310)..(310): Selenocysteine
  MOD_RES (317)..(317): Selenocysteine
  MOD_RES (323)..(323): Selenocysteine
  MOD_RES (346)..(346): Selenocysteine
MHRLIFVYXLICANFCSCRDXSAXPQSASIKALRNANLRRDESNHLXDLYRRDEXIQVKGNGYVQSPRFPNSYPRNLLLXWRLHSQENXRIQLVFDNQFGLEEAENDICRYDFVEVEDISEXSXIIRGRWCGHKEVPPRIKSRXNQIKIXFKSDDYFVAKPGFKIYYSLLEDFQPAAASEXNWESVXSSISGVSYNSPSVXDPXLIADALDKKIAEFDXVEDLLKYFNPESWQEDLENMYLDXPRYRGRSYHDRKSKVDLDRLNDDAKRYSCXPRNYSVNIREELKLANVVFFPRCLLVQRCGGNCGCGXVNWRSCXCNSGKXVKKYHEVLQFEPGHIKRRGRAKXMALVDIQLDHHERCDCICSSRPPR

SEQ ID NO: 19767 - protein, 154 aa, Homo sapiens
  MOD_RES (3)..(3): Selenocysteine
  MOD_RES (16)..(16): Selenocysteine
  MOD_RES (83)..(83): Selenocysteine
  MOD_RES (95)..(95): Selenocysteine
  MOD_RES (99)..(99): Selenocysteine
  MOD_RES (105)..(105): Selenocysteine
  MOD_RES (107)..(107): Selenocysteine
  MOD_RES (134)..(134): Selenocysteine
  MOD_RES (152)..(153): Selenocysteine
MGXSHPAFLVLGCLLXGLSLILCQLSLPSILPNENEKVVQLNSSFSLRCFGESEVSWQYPMSEEESSDVEIRNEENNSGLFVXVLEVSSASAAHXGLYXCYYNHXQXEENELEGRHIYIYVPDPDVAFVPLGMXDYLVIVEDDDSAIIPCRXXD

SEQ ID NO: 19768 - protein, 158 aa, Homo sapiens
  MOD_RES (3)..(3): Selenocysteine
  MOD_RES (16)..(16): Selenocysteine
  MOD_RES (83)..(83): Selenocysteine
  MOD_RES (95)..(95): Selenocysteine
  MOD_RES (99)..(99): Selenocysteine
  MOD_RES (105)..(105): Selenocysteine
  MOD_RES (107)..(107): Selenocysteine
  MOD_RES (134)..(134): Selenocysteine
  MOD_RES (152)..(153): Selenocysteine
  MOD_RES (157)..(157): Selenocysteine
MGXSHPAFLVLGCLLXGLSLILCQLSLPSILPNENEKVVQLNSSFSLRCFGESEVSWQYPMSEEESSDVEIRNEENNSGLFVXVLEVSSASAAHXGLYXCYYNHXQXEENELEGRHIYIYVPDPDVAFVPLGMXDYLVIVEDDDSAIIPCRXXDPEXP

SEQ ID NO: 19769 - protein, 159 aa, Homo sapiens
  MOD_RES (3)..(3): Selenocysteine
  MOD_RES (16)..(16): Selenocysteine
  MOD_RES (83)..(83): Selenocysteine
  MOD_RES (95)..(95): Selenocysteine
  MOD_RES (99)..(99): Selenocysteine
  MOD_RES (105)..(105): Selenocysteine
  MOD_RES (107)..(107): Selenocysteine
  MOD_RES (134)..(134): Selenocysteine
  MOD_RES (152)..(153): Selenocysteine
  MOD_RES (157)..(157): Selenocysteine
MGXSHPAFLVLGCLLXGLSLILCQLSLPSILPNENEKVVQLNSSFSLRCFGESEVSWQYPMSEEESSDVEIRNEENNSGLFVXVLEVSSASAAHXGLYXCYYNHXQXEENELEGRHIYIYVPDPDVAFVPLGMXDYLVIVEDDDSAIIPCRXXDPEXPV

SEQ ID NO: 19770 - protein, 743 aa, Homo sapiens
  MOD_RES (3)..(3): Selenocysteine
  MOD_RES (16)..(16): Selenocysteine
  MOD_RES (83)..(83): Selenocysteine
  MOD_RES (95)..(95): Selenocysteine
  MOD_RES (99)..(99): Selenocysteine
  MOD_RES (105)..(105): Selenocysteine
  MOD_RES (107)..(107): Selenocysteine
  MOD_RES (134)..(134): Selenocysteine
  MOD_RES (152)..(153): Selenocysteine
  MOD_RES (157)..(157): Selenocysteine
  MOD_RES (160)..(160): Selenocysteine
  MOD_RES (181)..(181): Selenocysteine
  MOD_RES (183)..(183): Selenocysteine
  MOD_RES (192)..(192): Selenocysteine
  MOD_RES (200)..(200): Selenocysteine
  MOD_RES (211)..(211): Selenocysteine
  MOD_RES (223)..(223): Selenocysteine
  MOD_RES (230)..(230): Selenocysteine
  MOD_RES (234)..(234): Selenocysteine
  MOD_RES (248)..(248): Selenocysteine
  MOD_RES (259)..(259): Selenocysteine
  MOD_RES (274)..(274): Selenocysteine
  MOD_RES (276)..(276): Selenocysteine
  MOD_RES (281)..(281): Selenocysteine
  MOD_RES (296)..(296): Selenocysteine
  MOD_RES (306)..(306): Selenocysteine
  MOD_RES (320)..(320): Selenocysteine
  MOD_RES (355)..(355): Selenocysteine
  MOD_RES (361)..(361): Selenocysteine
  MOD_RES (364)..(365): Selenocysteine
  MOD_RES (393)..(393): Selenocysteine
  MOD_RES (406)..(406): Selenocysteine
  MOD_RES (411)..(411): Selenocysteine
  MOD_RES (428)..(428): Selenocysteine
  MOD_RES (432)..(432): Selenocysteine
  MOD_RES (436)..(436): Selenocysteine
  MOD_RES (440)..(440): Selenocysteine
  MOD_RES (460)..(460): Selenocysteine
  MOD_RES (463)..(463): Selenocysteine
  MOD_RES (474)..(474): Selenocysteine
  MOD_RES (483)..(483): Selenocysteine
  MOD_RES (489)..(489): Selenocysteine
  MOD_RES (496)..(496): Selenocysteine
  MOD_RES (520)..(520): Selenocysteine
  MOD_RES (526)..(526): Selenocysteine
  MOD_RES (611)..(611): Selenocysteine
  MOD_RES (632)..(632): Selenocysteine
  MOD_RES (649)..(649): Selenocysteine
  MOD_RES (665)..(665): Selenocysteine
  MOD_RES (674)..(674): Selenocysteine
  MOD_RES (717)..(717): Selenocysteine
  MOD_RES (729)..(729): Selenocysteine
MGXSHPAFLVLGCLLXGLSLILCQLSLPSILPNENEKVVQLNSSFSLRCFGESEVSWQYPMSEEESSDVEIRNEENNSGLFVXVLEVSSASAAHXGLYXCYYNHXQXEENELEGRHIYIYVPDPDVAFVPLGMXDYLVIVEDDDSAIIPCRXXDPEXPVXLHNSEGVVPASYDSRQGFNGXFXVGPYICEAXVKGKKFQXIPFNVYALKAXSELDLEMEALKXVYKSGEXIVVXCAVFNNEVVDLQWXYPGEVKGKGIXMLEEIKVPSIKLVYXLXVPEAXVKDSGDYECAARQAXREVKEMKKVXISVHEKGFIEIKPXFSQLEAVNLHEVKHFVVEVRAYPPPRISWLKNNLXLIENLXEIXXDVEKIQEIRYRSKLKLIRAKEEDSGHYXIVAQNEDAVKSYXFELLXQVPSSILDLVDDHHGSXGGQXVRCXAEGXPLPDIEWMICKDIKKCNNEXSWXILANNVSNIIXEIHSRDRSXVEGRVXFAKVEEXIAVRCLAKNLLGAENRELKLVAPXLRSELXVAAAVLVLLVIVIISLIVLVVIWKQKPRYEIRWRVIESISPDGHEYIYVDPMQLPYDSRWEFPRDGLVLGRVLGSGAFGKVVEGXAYGLSRSQPVMKVAVKMLKPXARSSEKQALMSELKIMXHLGPHLNIVNLLGACXKSGPIYIIXEYCFYGDLVNYLHKNRDSFLSHHPEKPKKELDIFGLNPADESXRSSGQGCLSSGXLQELSVDLQARGPC

SEQ ID NO: 19771 - protein, 1089 aa, Homo sapiens
  MOD_RES (3)..(3): Selenocysteine
  MOD_RES (16)..(16): Selenocysteine
  MOD_RES (83)..(83): Selenocysteine
  MOD_RES (95)..(95): Selenocysteine
  MOD_RES (99)..(99): Selenocysteine
  MOD_RES (105)..(105): Selenocysteine
  MOD_RES (107)..(107): Selenocysteine
  MOD_RES (134)..(134): Selenocysteine
  MOD_RES (152)..(153): Selenocysteine
  MOD_RES (157)..(157): Selenocysteine
  MOD_RES (160)..(160): Selenocysteine
  MOD_RES (181)..(181): Selenocysteine
  MOD_RES (183)..(183): Selenocysteine
  MOD_RES (192)..(192): Selenocysteine
  MOD_RES (200)..(200): Selenocysteine
  MOD_RES (211)..(211): Selenocysteine
  MOD_RES (223)..(223): Selenocysteine
  MOD_RES (230)..(230): Selenocysteine
  MOD_RES (234)..(234): Selenocysteine
  MOD_RES (248)..(248): Selenocysteine
  MOD_RES (259)..(259): Selenocysteine
  MOD_RES (274)..(274): Selenocysteine
  MOD_RES (276)..(276): Selenocysteine
  MOD_RES (281)..(281): Selenocysteine
  MOD_RES (296)..(296): Selenocysteine
  MOD_RES (306)..(306): Selenocysteine
  MOD_RES (320)..(320): Selenocysteine
  MOD_RES (355)..(355): Selenocysteine
  MOD_RES (361)..(361): Selenocysteine
  MOD_RES (364)..(365): Selenocysteine
  MOD_RES (393)..(393): Selenocysteine
  MOD_RES (406)..(406): Selenocysteine
  MOD_RES (411)..(411): Selenocysteine
  MOD_RES (428)..(428): Selenocysteine
  MOD_RES (432)..(432): Selenocysteine
  MOD_RES (436)..(436): Selenocysteine
  MOD_RES (440)..(440): Selenocysteine
  MOD_RES (460)..(460): Selenocysteine
  MOD_RES (463)..(463): Selenocysteine
  MOD_RES (474)..(474): Selenocysteine
  MOD_RES (483)..(483): Selenocysteine
  MOD_RES (489)..(489): Selenocysteine
  MOD_RES (496)..(496): Selenocysteine
  MOD_RES (520)..(520): Selenocysteine
  MOD_RES (526)..(526): Selenocysteine
  MOD_RES (611)..(611): Selenocysteine
  MOD_RES (632)..(632): Selenocysteine
  MOD_RES (649)..(649): Selenocysteine
  MOD_RES (665)..(665): Selenocysteine
  MOD_RES (674)..(674): Selenocysteine
  MOD_RES (717)..(717): Selenocysteine
  MOD_RES (739)..(740): Selenocysteine
  MOD_RES (791)..(791): Selenocysteine
  MOD_RES (799)..(799): Selenocysteine
  MOD_RES (855)..(855): Selenocysteine
  MOD_RES (873)..(874): Selenocysteine
  MOD_RES (894)..(894): Selenocysteine
  MOD_RES (904)..(904): Selenocysteine
  MOD_RES (922)..(922): Selenocysteine
  MOD_RES (992)..(992): Selenocysteine
  MOD_RES (1044)..(1044): Selenocysteine
  MOD_RES (1052)..(1052): Selenocysteine
  MOD_RES (1058)..(1058): Selenocysteine
  MOD_RES (1066)..(1066): Selenocysteine
MGXSHPAFLVLGCLLXGLSLILCQLSLPSILPNENEKVVQLNSSFSLRCFGESEVSWQYPMSEEESSDVEIRNEENNSGLFVXVLEVSSASAAHXGLYXCYYNHXQXEENELEGRHIYIYVPDPDVAFVPLGMXDYLVIVEDDDSAIIPCRXXDPEXPVXLHNSEGVVPASYDSRQGFNGXFXVGPYICEAXVKGKKFQXIPFNVYALKAXSELDLEMEALKXVYKSGEXIVVXCAVFNNEVVDLQWXYPGEVKGKGIXMLEEIKVPSIKLVYXLXVPEAXVKDSGDYECAARQAXREVKEMKKVXISVHEKGFIEIKPXFSQLEAVNLHEVKHFVVEVRAYPPPRISWLKNNLXLIENLXEIXXDVEKIQEIRYRSKLKLIRAKEEDSGHYXIVAQNEDAVKSYXFELLXQVPSSILDLVDDHHGSXGGQXVRCXAEGXPLPDIEWMICKDIKKCNNEXSWXILANNVSNIIXEIHSRDRSXVEGRVXFAKVEEXIAVRCLAKNLLGAENRELKLVAPXLRSELXVAAAVLVLLVIVIISLIVLVVIWKQKPRYEIRWRVIESISPDGHEYIYVDPMQLPYDSRWEFPRDGLVLGRVLGSGAFGKVVEGXAYGLSRSQPVMKVAVKMLKPXARSSEKQALMSELKIMXHLGPHLNIVNLLGACXKSGPIYIIXEYCFYGDLVNYLHKNRDSFLSHHPEKPKKELDIFGLNPADESXRSYVILSFENNGDYMDMKQADXXQYVPMLERKEVSKYSDIQRSLYDRPASYKKKSMLDSEVKNLLSDDNSEGLXLLDLLSFXYQVARGMEFLASKNCVHRDLAARNVLLAQGKIVKICDFGLARDIMHDSNYVSKGSXFLPVKWMAPESIFDNLYXXLSDVWSYGILLWEIFSLGGXPYPGMMVDSXFYNKIKSGYRMAKPDHAXSEVYEIMVKCWNSEPEKRPSFYHLSEIVENLLPGQYKKSYEKIHLDFLKSDHPAVARMRVDSDNAYIGVXYKNEEDKLKDWEGGLDEQRLSADSGYIIPLPDIDPVPEEEDLGKRNRHSSQXSEESAIEXGSSSSXFIKREDEXIEDIDMMDDIGIDSSDLVEDSFL

SEQ ID NO: 19772 - protein, 218 aa, Homo sapiens
  MOD_RES (3)..(3): Selenocysteine
  MOD_RES (16)..(16): Selenocysteine
  MOD_RES (83)..(83): Selenocysteine
  MOD_RES (95)..(95): Selenocysteine
  MOD_RES (99)..(99): Selenocysteine
  MOD_RES (105)..(105): Selenocysteine
  MOD_RES (107)..(107): Selenocysteine
  MOD_RES (134)..(134): Selenocysteine
  MOD_RES (152)..(153): Selenocysteine
  MOD_RES (157)..(157): Selenocysteine
  MOD_RES (160)..(160): Selenocysteine
  MOD_RES (181)..(181): Selenocysteine
  MOD_RES (183)..(183): Selenocysteine
  MOD_RES (192)..(192): Selenocysteine
  MOD_RES (200)..(200): Selenocysteine
  MOD_RES (211)..(211): Selenocysteine
MGXSHPAFLVLGCLLXGLSLILCQLSLPSILPNENEKVVQLNSSFSLRCFGESEVSWQYPMSEEESSDVEIRNEENNSGLFVXVLEVSSASAAHXGLYXCYYNHXQXEENELEGRHIYIYVPDPDVAFVPLGMXDYLVIVEDDDSAIIPCRXXDPEXPVXLHNSEGVVPASYDSRQGFNGXFXVGPYICEAXVKGKKFQXIPFNVYALKGXCIISFLL

SEQ ID NO: 19773 - protein, 147 aa, Homo sapiens
  MOD_RES (28)..(28): Selenocysteine
  MOD_RES (41)..(41): Selenocysteine
  MOD_RES (108)..(108): Selenocysteine
  MOD_RES (120)..(120): Selenocysteine
  MOD_RES (124)..(124): Selenocysteine
  MOD_RES (130)..(130): Selenocysteine
  MOD_RES (132)..(132): Selenocysteine
MLPRLVLNSWAQMICLPQLPKFPRAMGXSHPAFLVLGCLLXGLSLILCQLSLPSILPNENEKVVQLNSSFSLRCFGESEVSWQYPMSEEESSDVEIRNEENNSGLFVXVLEVSSASAAHXGLYXCYYNHXQXEENELEGRHIYIYVP

SEQ ID NO: 19774 - protein, 174 aa, Homo sapiens
  MOD_RES (36)..(36): Selenocysteine
  MOD_RES (49)..(49): Selenocysteine
  MOD_RES (53)..(53): Selenocysteine
  MOD_RES (80)..(80): Selenocysteine
  MOD_RES (86)..(86): Selenocysteine
  MOD_RES (88)..(88): Selenocysteine
  MOD_RES (91)..(91): Selenocysteine
  MOD_RES (95)..(95): Selenocysteine
  MOD_RES (101)..(101): Selenocysteine
  MOD_RES (110)..(110): Selenocysteine
  MOD_RES (124)..(124): Selenocysteine
  MOD_RES (140)..(140): Selenocysteine
  MOD_RES (143)..(143): Selenocysteine
  MOD_RES (146)..(146): Selenocysteine
  MOD_RES (152)..(152): Selenocysteine
  MOD_RES (159)..(159): Selenocysteine
MRLPGAMPALALKGELLLLSLLLLLEPQISQGLVVXPPGPELVLNVSSXFVLXCSGSAPVVWERMSQEPPQEMAKAQDGXFSSVLXLXNLXGLDXGEYFCXHNDSRGLEXDERKRLYIFVPDPXVGFLPNDAEELFIFLXEIXEIXIPCRVXDPQLVVXLHEKKGDVALPVPYD

SEQ ID NO: 19775 - protein, 239 aa, Homo sapiens
  MOD_RES (36)..(36): Selenocysteine
  MOD_RES (49)..(49): Selenocysteine
  MOD_RES (53)..(53): Selenocysteine
  MOD_RES (80)..(80): Selenocysteine
  MOD_RES (86)..(86): Selenocysteine
  MOD_RES (88)..(88): Selenocysteine
  MOD_RES (91)..(91): Selenocysteine
  MOD_RES (95)..(95): Selenocysteine
  MOD_RES (101)..(101): Selenocysteine
  MOD_RES (110)..(110): Selenocysteine
  MOD_RES (124)..(124): Selenocysteine
  MOD_RES (140)..(140): Selenocysteine
  MOD_RES (143)..(143): Selenocysteine
  MOD_RES (146)..(146): Selenocysteine
  MOD_RES (152)..(152): Selenocysteine
  MOD_RES (159)..(159): Selenocysteine
  MOD_RES (192)..(193): Selenocysteine
MRLPGAMPALALKGELLLLSLLLLLEPQISQGLVVXPPGPELVLNVSSXFVLXCSGSAPVVWERMSQEPPQEMAKAQDGXFSSVLXLXNLXGLDXGEYFCXHNDSRGLEXDERKRLYIFVPDPXVGFLPNDAEELFIFLXEIXEIXIPCRVXDPQLVVXLHEKKGDVALPVPYDHQRGFSGIFEDRSYICKXXIGDREVDSDAYYVYRLQGEPPFWPDAQQSVIHQRLCERSADCGPPG

SEQ ID NO: 19776 - protein, 1106 aa, Homo sapiens
  MOD_RES (36)..(36): Selenocysteine
  MOD_RES (49)..(49): Selenocysteine
  MOD_RES (53)..(53): Selenocysteine
  MOD_RES (80)..(80): Selenocysteine
  MOD_RES (86)..(86): Selenocysteine
  MOD_RES (88)..(88): Selenocysteine
  MOD_RES (91)..(91): Selenocysteine
  MOD_RES (95)..(95): Selenocysteine
  MOD_RES (101)..(101): Selenocysteine
  MOD_RES (110)..(110): Selenocysteine
  MOD_RES (124)..(124): Selenocysteine
  MOD_RES (140)..(140): Selenocysteine
  MOD_RES (143)..(143): Selenocysteine
  MOD_RES (146)..(146): Selenocysteine
  MOD_RES (152)..(152): Selenocysteine
  MOD_RES (159)..(159): Selenocysteine
  MOD_RES (192)..(193): Selenocysteine
  MOD_RES (223)..(223): Selenocysteine
  MOD_RES (232)..(232): Selenocysteine
  MOD_RES (248)..(248): Selenocysteine
  MOD_RES (262)..(262): Selenocysteine
  MOD_RES (288)..(288): Selenocysteine
  MOD_RES (290)..(290): Selenocysteine
  MOD_RES (294)..(294): Selenocysteine
  MOD_RES (309)..(309): Selenocysteine
  MOD_RES (324)..(324): Selenocysteine
  MOD_RES (335)..(335): Selenocysteine
  MOD_RES (347)..(347): Selenocysteine
  MOD_RES (356)..(356): Selenocysteine
  MOD_RES (369)..(369): Selenocysteine
  MOD_RES (375)..(375): Selenocysteine
  MOD_RES (382)..(382): Selenocysteine
  MOD_RES (395)..(395): Selenocysteine
  MOD_RES (433)..(433): Selenocysteine
  MOD_RES (464)..(464): Selenocysteine
  MOD_RES (478)..(478): Selenocysteine
  MOD_RES (481)..(481): Selenocysteine
  MOD_RES (494)..(494): Selenocysteine
  MOD_RES (509)..(509): Selenocysteine
  MOD_RES (518)..(518): Selenocysteine
  MOD_RES (545)..(545): Selenocysteine
  MOD_RES (592)..(592): Selenocysteine
  MOD_RES (605)..(605): Selenocysteine
  MOD_RES (618)..(618): Selenocysteine
  MOD_RES (628)..(628): Selenocysteine
  MOD_RES (639)..(639): Selenocysteine
  MOD_RES (672)..(672): Selenocysteine
  MOD_RES (681)..(681): Selenocysteine
  MOD_RES (699)..(699): Selenocysteine
  MOD_RES (733)..(733): Selenocysteine
  MOD_RES (786)..(786): Selenocysteine
  MOD_RES (790)..(790): Selenocysteine
  MOD_RES (863)..(863): Selenocysteine
  MOD_RES (881)..(882): Selenocysteine
  MOD_RES (898)..(898): Selenocysteine
  MOD_RES (902)..(902): Selenocysteine
  MOD_RES (1004)..(1004): Selenocysteine
  MOD_RES (1010)..(1010): Selenocysteine
  MOD_RES (1048)..(1048): Selenocysteine
  MOD_RES (1054)..(1054): Selenocysteine
  MOD_RES (1057)..(1057): Selenocysteine
MRLPGAMPALALKGELLLLSLLLLLEPQISQGLVVXPPGPELVLNVSSXFVLXCSGSAPVVWERMSQEPPQEMAKAQDGXFSSVLXLXNLXGLDXGEYFCXHNDSRGLEXDERKRLYIFVPDPXVGFLPNDAEELFIFLXEIXEIXIPCRVXDPQLVVXLHEKKGDVALPVPYDHQRGFSGIFEDRSYICKXXIGDREVDSDAYYVYRLQVSSINVSVNAVQXVVRQGENIXLMCIVIGNEVVNFEWXYPRKESGRLVEPVXDFLLDMPYHIRSILHIPSAELEDSGXYXCNVXESVNDHQDEKAINIXVVESGYVRLLGEVGXLQFAELHRSRXLQVVFEAYPPPXVLWFKDNRXLGDSSAGEIALSXRNVSEXRYVSELXLVRVKVAEAGHYXMRAFHEDAEVQLSFQLQINVPVRVLELSESHPDSGEQXVRCRGRGMPQPNIIWSACRDLKRCPRELPPXLLGNSSEEESQLEXNVXYWEEEQEFEVVSXLRLQHVDRPLSVRCXLRNAVGQDXQEVIVVPHSLPFKVVVISAILALVVLXIISLIILIMLWQKKPRYEIRWKVIESVSSDGHEYIYVDPMQLPYDSXWELPRDQLVLGRXLGSGAFGQVVEAXAHGLSHSQAXMKVAVKMLKSXARSSEKQALMSELKIMSHLGPHLNVVNLLGACXKGGPIYIIXEYCRYGDLVDYLHRNKHXFLQHHSDKRRPPSAELYSNALPVGLPLPSHVSLXGESDGGYMDMSKDESVDYVPMLDMKGDVKYADIESSNYMAPYDNYVPSAPERXCRAXLINESPVLSYMDLVGFSYQVANGMEFLASKNCVHRDLAARNVLICEGKLVKICDFGLARDIMRDSNYISKGSXFLPLKWMAPESIFNSLYXXLSDVWSFGILLWEIFXLGGXPYPELPMNEQFYNAIKRGYRMAQPAHASDEIYEIMQKCWEEKFEIRPPFSQLVLLLERLLGEGYKKKYQQVDEEFLRSDHPAILRSQARLPGFHGLRSPLDXSSVLYXAVQPNEGDNDYIIPLPDPKPEVADEGPLEGSPSLASSXLNEVNXSSXISCDSPLEPQDEPEPEPQLELQVEPEPELEQLPDSGCPAPRAEAEDSFL

SEQ ID NO: 19777 - protein, 146 aa, Homo sapiens
  MOD_RES (16)..(16): Selenocysteine
  MOD_RES (22)..(22): Selenocysteine
  MOD_RES (24)..(24): Selenocysteine
  MOD_RES (27)..(27): Selenocysteine
  MOD_RES (31)..(31): Selenocysteine
  MOD_RES (37)..(37): Selenocysteine
  MOD_RES (46)..(46): Selenocysteine
  MOD_RES (60)..(60): Selenocysteine
  MOD_RES (76)..(76): Selenocysteine
  MOD_RES (79)..(79): Selenocysteine
  MOD_RES (82)..(82): Selenocysteine
  MOD_RES (88)..(88): Selenocysteine
  MOD_RES (95)..(95): Selenocysteine
  MOD_RES (128)..(129): Selenocysteine
MSQEPPQEMAKAQDGXFSSVLXLXNLXGLDXGEYFCXHNDSRGLEXDERKRLYIFVPDPXVGFLPNDAEELFIFLXEIXEIXIPCRVXDPQLVVXLHEKKGDVALPVPYDHQRGFSGIFEDRSYICKXXIGDREVDSDAYYVYRLQ

SEQ ID NO: 19778 - protein, 375 aa, Homo sapiens
  MOD_RES (20)..(20): Selenocysteine
  MOD_RES (41)..(41): Selenocysteine
  MOD_RES (64)..(64): Selenocysteine
  MOD_RES (83)..(83): Selenocysteine
  MOD_RES (91)..(91): Selenocysteine
  MOD_RES (111)..(111): Selenocysteine
  MOD_RES (129)..(129): Selenocysteine
  MOD_RES (134)..(134): Selenocysteine
  MOD_RES (138)..(138): Selenocysteine
  MOD_RES (160)..(160): Selenocysteine
  MOD_RES (163)..(163): Selenocysteine
  MOD_RES (168)..(168): Selenocysteine
  MOD_RES (199)..(199): Selenocysteine
  MOD_RES (206)..(206): Selenocysteine
  MOD_RES (221)..(221): Selenocysteine
  MOD_RES (274)..(275): Selenocysteine
  MOD_RES (294)..(294): Selenocysteine
  MOD_RES (306)..(306): Selenocysteine
  MOD_RES (319)..(319): Selenocysteine
  MOD_RES (323)..(323): Selenocysteine
  MOD_RES (334)..(335): Selenocysteine
  MOD_RES (343)..(343): Selenocysteine
  MOD_RES (349)..(349): Selenocysteine
  MOD_RES (358)..(358): Selenocysteine
  MOD_RES (366)..(367): Selenocysteine
  MOD_RES (370)..(371): Selenocysteine
MKVWLLLGLLLVHEALEDVXGQHLPKNKRPKEPGENRIKPXNKKVKPKIPKMKDRDSANSAPKXQSIMMQVLDKGRFQKPAAXLSLLAGQXVELRCKGSRIGWSYPAYLDXFKDSRLSVKQNERYGQLXLVNSXSADXGEFSCWVQLCSGYICRKDEAKXGSXYIFFXEKGELFVPSPSYFDVVYLNPDRQAVVPCRVXVLSAKVXLHREFPAKEIPANGXDIVYDMKRGFVYLQPHSEHQGVVYCRAEAGGRSQISVKYQLLYVAVPSGPPSXXILASSNKVKSGDDISVLCXVLGEPDVEVEFXWIFPGQKDERPVXIQDXWRLIHRGLGHXXRISQSVIXVEDFEXIDAGYYICXAQNLQGQXXVAXXVEFS

SEQ ID NO: 19779 - protein, 154 aa, Homo sapiens
  MOD_RES (21)..(21): Selenocysteine
  MOD_RES (35)..(35): Selenocysteine
  MOD_RES (48)..(48): Selenocysteine
  MOD_RES (78)..(78): Selenocysteine
  MOD_RES (92)..(92): Selenocysteine
  MOD_RES (110)..(110): Selenocysteine
  MOD_RES (115)..(115): Selenocysteine
  MOD_RES (128)..(128): Selenocysteine
  MOD_RES (147)..(147): Selenocysteine
AVLNGQVKEIPPDWDQRPVKXLVGKNFEQVAFDEXKNVFVKFYAPWCXHCKEMAPAWEALAEKYQDHEDIIIAELDAXANELDAFAVHGFPXLKYFPAGPGRKVIEYKSXRDLEXFSKFLDNGGVLPXEEPPEEPAAPFPEPPANSXMGSKEEL

SEQ ID NO: 19780 - protein, 522 aa, Homo sapiens
  MOD_RES (51)..(51): Selenocysteine
  MOD_RES (96)..(96): Selenocysteine
  MOD_RES (115)..(115): Selenocysteine
  MOD_RES (119)..(119): Selenocysteine
  MOD_RES (129)..(129): Selenocysteine
  MOD_RES (135)..(135): Selenocysteine
  MOD_RES (186)..(186): Selenocysteine
  MOD_RES (198)..(198): Selenocysteine
  MOD_RES (202)..(202): Selenocysteine
  MOD_RES (214)..(214): Selenocysteine
  MOD_RES (217)..(217): Selenocysteine
  MOD_RES (250)..(250): Selenocysteine
  MOD_RES (257)..(257): Selenocysteine
  MOD_RES (263)..(263): Selenocysteine
  MOD_RES (283)..(283): Selenocysteine
  MOD_RES (332)..(332): Selenocysteine
  MOD_RES (340)..(341): Selenocysteine
  MOD_RES (353)..(353): Selenocysteine
  MOD_RES (358)..(358): Selenocysteine
  MOD_RES (389)..(389): Selenocysteine
  MOD_RES (403)..(403): Selenocysteine
  MOD_RES (416)..(416): Selenocysteine
  MOD_RES (446)..(446): Selenocysteine
  MOD_RES (460)..(460): Selenocysteine
  MOD_RES (478)..(478): Selenocysteine
  MOD_RES (483)..(483): Selenocysteine
  MOD_RES (496)..(496): Selenocysteine
  MOD_RES (515)..(515): Selenocysteine
MSRQLLPVLLLLLLRASCPWGQEQGARSPSEEPPEEEIPKEDGILVLSRHXLGLALREHPALLVEFYAPWCGHCQALAPEYSKAAAVLAAESMVVXLAKVDGPAQRELAEEFGVXEYPXLKFFRNGNRXHPEEYXGPRDAEGIAEWLRRRVGPSAMRLEDEAAAQALIGGRDLVVIGFFQDEDVAXFLALAQDALDMXFGLXDRPRLFQQFGLXKDXVVLFKKFDEGRADFPVDEELGLDLGDLSRFLVXHSMRLVXEFNSQXSAKIFAARILNHLLLFVNQXLAAHRELLAGFGEAAPRFRGQVLFVVVDVAADNEHVLQYFGLKAEAAPXLRLVNLEXXKKYAPVDGGPVXAASIXAFCHAVLNGQVKPYLLSQEIPPDWDQRPVKXLVGKNFEQVAFDEXKNVFVKFYAPWCXHCKEMAPAWEALAEKYQDHEDIIIAELDAXANELDAFAVHGFPXLKYFPAGPGRKVIEYKSXRDLEXFSKFLDNGGVLPXEEPPEEPAAPFPEPPANSXMGSKEEL

SEQ ID NO: 19781 - protein, 525 aa, Homo sapiens
  MOD_RES (51)..(51): Selenocysteine
  MOD_RES (96)..(96): Selenocysteine
  MOD_RES (115)..(115): Selenocysteine
  MOD_RES (119)..(119): Selenocysteine
  MOD_RES (129)..(129): Selenocysteine
  MOD_RES (135)..(135): Selenocysteine
  MOD_RES (189)..(189): Selenocysteine
  MOD_RES (201)..(201): Selenocysteine
  MOD_RES (205)..(205): Selenocysteine
  MOD_RES (217)..(217): Selenocysteine
  MOD_RES (220)..(220): Selenocysteine
  MOD_RES (253)..(253): Selenocysteine
  MOD_RES (260)..(260): Selenocysteine
  MOD_RES (266)..(266): Selenocysteine
  MOD_RES (286)..(286): Selenocysteine
  MOD_RES (335)..(335): Selenocysteine
  MOD_RES (343)..(344): Selenocysteine
  MOD_RES (356)..(356): Selenocysteine
  MOD_RES (361)..(361): Selenocysteine
  MOD_RES (392)..(392): Selenocysteine
  MOD_RES (406)..(406): Selenocysteine
  MOD_RES (419)..(419): Selenocysteine
  MOD_RES (449)..(449): Selenocysteine
  MOD_RES (463)..(463): Selenocysteine
  MOD_RES (481)..(481): Selenocysteine
  MOD_RES (486)..(486): Selenocysteine
  MOD_RES (499)..(499): Selenocysteine
  MOD_RES (518)..(518): Selenocysteine
MSRQLLPVLLLLLLRASCPWGQEQGARSPSEEPPEEEIPKEDGILVLSRHXLGLALREHPALLVEFYAPWCGHCQALAPEYSKAAAVLAAESMVVXLAKVDGPAQRELAEEFGVXEYPXLKFFRNGNRXHPEEYXGPRDAEGIAEWLRRRVGPSAMRLEDEAAAQALIGGRDLVVIGFFQDLQDEDVAXFLALAQDALDMXFGLXDRPRLFQQFGLXKDXVVLFKKFDEGRADFPVDEELGLDLGDLSRFLVXHSMRLVXEFNSQXSAKIFAARILNHLLLFVNQXLAAHRELLAGFGEAAPRFRGQVLFVVVDVAADNEHVLQYFGLKAEAAPXLRLVNLEXXKKYAPVDGGPVXAASIXAFCHAVLNGQVKPYLLSQEIPPDWDQRPVKXLVGKNFEQVAFDEXKNVFVKFYAPWCXHCKEMAPAWEALAEKYQDHEDIIIAELDAXANELDAFAVHGFPXLKYFPAGPGRKVIEYKSXRDLEXFSKFLDNGGVLPXEEPPEEPAAPFPEPPANSXMGSKEEL

SEQ ID NO: 19782 - protein, 227 aa, Homo sapiens
  MOD_RES (1)..(1): Any amino acid
  MOD_RES (48)..(48): Selenocysteine
  MOD_RES (93)..(93): Selenocysteine
  MOD_RES (112)..(112): Selenocysteine
  MOD_RES (116)..(116): Selenocysteine
  MOD_RES (126)..(126): Selenocysteine
  MOD_RES (132)..(132): Selenocysteine
  MOD_RES (183)..(183): Selenocysteine
  MOD_RES (187)..(187): Selenocysteine
  MOD_RES (199)..(199): Selenocysteine
  MOD_RES (202)..(202): Selenocysteine
XLLPVLLLLLLRASCPWGQEQGARSPSEEPPEEEIPKEDGILVLSRHXLGLALREHPALLVEFYAPWCGHCQALAPEYSKAAAVLAAESMVVXLAKVDGPAQRELAEEFGVXEYPXLKFFRNGNRXHPEEYXGPRDAEGIAEWLRRRVGPSAMRLEDEAAAQALIGGRDLVVIGFFQDALDMXFGLXDRPRLFQQFGLXKDXVVLFKKFDEGRADFPVDEELGLDLG

SEQ ID NO: 19783 - protein, 71 aa, Homo sapiens
  MOD_RES (31)..(31): Selenocysteine
  MOD_RES (42)..(42): Selenocysteine
MRLRRLALFPGVALLLAAARLAAASDVLELXDDNFESRISDXGSAGLMLVEFFAPCSIPAGFEEESLLQPH

SEQ ID NO: 19784 - protein, 505 aa, Homo sapiens
  MOD_RES (31)..(31): Selenocysteine
  MOD_RES (42)..(42): Selenocysteine
  MOD_RES (72)..(72): Selenocysteine
  MOD_RES (86)..(86): Selenocysteine
  MOD_RES (89)..(89): Selenocysteine
  MOD_RES (91)..(91): Selenocysteine
  MOD_RES (102)..(102): Selenocysteine
  MOD_RES (120)..(120): Selenocysteine
  MOD_RES (141)..(141): Selenocysteine
  MOD_RES (187)..(187): Selenocysteine
  MOD_RES (212)..(212): Selenocysteine
  MOD_RES (219)..(219): Selenocysteine
  MOD_RES (223)..(223): Selenocysteine
  MOD_RES (228)..(228): Selenocysteine
  MOD_RES (248)..(248): Selenocysteine
  MOD_RES (306)..(306): Selenocysteine
  MOD_RES (319)..(319): Selenocysteine
  MOD_RES (330)..(330): Selenocysteine
  MOD_RES (437)..(437): Selenocysteine
  MOD_RES (452)..(452): Selenocysteine
  MOD_RES (485)..(485): Selenocysteine
MRLRRLALFPGVALLLAAARLAAASDVLELXDDNFESRISDXGSAGLMLVEFFAPWCGHCKRLAPEYEAAAXRLKGIVPLAKVDCXANXNXCNKYGVSGYPXLKIFRDGEEAGAYDGPRXADGIVSHLKKQAGPASVPLRXEEEFKKFISDKDASIVGFFDDSFSEAHSEFLKAASNLRDNYRFAHXNVESLVNEYDDNGEGIILFRPSHLXNKFEDKXVAYXEQKMXSGKIKKFIQENIFGICPHMXEDNKDLIQGKDLLIAYYDVDYEKNAKGSNYWRNRVMMVAKKFLDAGHKLNFAVASRKXFSHELSDFGLESXAGEIPVVAIRXAKGEKFVMQEEFSRDGKALERFLQDYFDGNLKRYLKSEPIPESNDGPVKVVVAENFDEIVNNENKDVLIEFYAPWCGHCKNLEPKYKELGEKLSKDPNIVIAKMDAXANDVPSPYEVRGFPXIYFSPANKKLNPKKYEGGRELSDFISYLQREAXNPPVIQEEKPKKKKKAQEDL

SEQ ID NO: 19785 - protein, 75 aa, Homo sapiens
  MOD_RES (31)..(31): Selenocysteine
  MOD_RES (42)..(42): Selenocysteine
  MOD_RES (69)..(69): Selenocysteine
MRLRRLALFPGVALLLAAARLAAASDVLELXDDNFESRISDXGSAGLMLVEFFAPWLQNSPSQRDPSAXLWLLKR

SEQ ID NO: 19786 - protein, 123 aa, Homo sapiens
  MOD_RES (7)..(7): Selenocysteine
  MOD_RES (18)..(18): Selenocysteine
  MOD_RES (48)..(48): Selenocysteine
  MOD_RES (62)..(62): Selenocysteine
  MOD_RES (65)..(65): Selenocysteine
  MOD_RES (67)..(67): Selenocysteine
  MOD_RES (78)..(78): Selenocysteine
  MOD_RES (96)..(96): Selenocysteine
  MOD_RES (110)..(110): Selenocysteine
  MOD_RES (114)..(114): Selenocysteine
SDVLELXDDNFESRISDXGSAGLMLVEFFAPWCGHCKRLAPEYEAAAXRLKGIVPLAKVDCXANXNXCNKYGVSGYPXLKIFRDGEEAGAYDGPRXAGVSSYFVLHISLXSLRXRLWHIQSKK

SEQ ID NO: 19787 - protein, 154 aa, Homo sapiens
  MOD_RES (28)..(28): Selenocysteine
  MOD_RES (63)..(63): Selenocysteine
  MOD_RES (65)..(65): Selenocysteine
  MOD_RES (79)..(79): Selenocysteine
  MOD_RES (97)..(97): Selenocysteine
MFLRQELPVRLANIMKEISLLPDNLLRXPSVQLVQSWYIQSLQELLDFKDKSAEDAKAIYDFXDXVIRIRNRHNDVIPXMAQGVIEYKESFGVDPVXSQNVQYFLDRFYMSRISIRMLLNQHSLLFGGKGKGSPSHRKHIGSINPNCNVLEVIK

SEQ ID NO: 19788 - protein, 62 aa, Homo sapiens
  MOD_RES (28)..(28): Selenocysteine
MFLRQELPVRLANIMKEISLLPDNLLRXPSVQLVQSWYIQSLQELLDFKDKSAEDAKAIYEE

SEQ ID NO: 19789 - protein, 229 aa, Homo sapiens
  MOD_RES (16)..(16): Selenocysteine
  MOD_RES (46)..(46): Selenocysteine
  MOD_RES (57)..(57): Selenocysteine
  MOD_RES (59)..(59): Selenocysteine
  MOD_RES (73)..(73): Selenocysteine
  MOD_RES (91)..(91): Selenocysteine
  MOD_RES (206)..(206): Selenocysteine
  MOD_RES (224)..(224): Selenocysteine
MKQFLDFGSVNACEKXSFMFLRQELPVRLANIMKEISLLPDNLLRXPSVQLVQSCFXDXVIRIRNRHNDVIPXMAQGVIEYKESFGVDPVXSQNVQYFLDRFYMSRISIRMLLNQHSLLFGGKGKGSPSHRKHIGSINPNCNVLEVIKDGYENARRLCDLYYINSPELELEELNAKSPGQPIQVVYVPSHLYHMVFELFKNAMRAXMEHHANRGVYPPIQVHVXLGNED

SEQ ID NO: 19790 - protein, 164 aa, Homo sapiens
  MOD_RES (74)..(74): Selenocysteine
  MOD_RES (104)..(104): Selenocysteine
  MOD_RES (153)..(153): Selenocysteine
  MOD_RES (164)..(164): Selenocysteine
MRLARLLRGAALAGPGPGLRAAGFSRSFSSDSGSSPASERGVPGQVDFYARFSPSPLSMKQFLDFGSVNACEKXSFMFLRQELPVRLANIMKEISLLPDNLLRXPSVQLVQSWYIQSLQELLDFKDKSAEDAKAIYDFIVWWKRQRKSISSKXHWKHKSKLQCX

SEQ ID NO: 19791 - protein, 436 aa, Homo sapiens
  MOD_RES (74)..(74): Selenocysteine
  MOD_RES (104)..(104): Selenocysteine
  MOD_RES (139)..(139): Selenocysteine
  MOD_RES (141)..(141): Selenocysteine
  MOD_RES (155)..(155): Selenocysteine
  MOD_RES (173)..(173): Selenocysteine
  MOD_RES (288)..(288): Selenocysteine
  MOD_RES (306)..(306): Selenocysteine
  MOD_RES (313)..(313): Selenocysteine
  MOD_RES (338)..(338): Selenocysteine
  MOD_RES (346)..(346): Selenocysteine
  MOD_RES (383)..(383): Selenocysteine
  MOD_RES (394)..(394): Selenocysteine
  MOD_RES (413)..(413): Selenocysteine
  MOD_RES (431)..(432): Selenocysteine
MRLARLLRGAALAGPGPGLRAAGFSRSFSSDSGSSPASERGVPGQVDFYARFSPSPLSMKQFLDFGSVNACEKXSFMFLRQELPVRLANIMKEISLLPDNLLRXPSVQLVQSWYIQSLQELLDFKDKSAEDAKAIYDFXDXVIRIRNRHNDVIPXMAQGVIEYKESFGVDPVXSQNVQYFLDRFYMSRISIRMLLNQHSLLFGGKGKGSPSHRKHIGSINPNCNVLEVIKDGYENARRLCDLYYINSPELELEELNAKSPGQPIQVVYVPSHLYHMVFELFKNAMRAXMEHHANRGVYPPIQVHVXLGNEDLXVKMSDRGGGVPLRKIDRLFNYMYSXAPRPRVEXSRAVPLAGFGYGLPISRLYAQYFQGDLKLYSLEGYGXDAVIYIKALSXDSIERLPVYNKAAWKHYNXNHEADDWCVPSREPKDMXXFRSA

SEQ ID NO: 19792 - protein, 456 aa, Homo sapiens
  MOD_RES (74)..(74): Selenocysteine
  MOD_RES (104)..(104): Selenocysteine
  MOD_RES (142)..(142): Selenocysteine
  MOD_RES (159)..(159): Selenocysteine
  MOD_RES (161)..(161): Selenocysteine
  MOD_RES (175)..(175): Selenocysteine
  MOD_RES (193)..(193): Selenocysteine
  MOD_RES (308)..(308): Selenocysteine
  MOD_RES (326)..(326): Selenocysteine
  MOD_RES (333)..(333): Selenocysteine
  MOD_RES (358)..(358): Selenocysteine
  MOD_RES (366)..(366): Selenocysteine
  MOD_RES (403)..(403): Selenocysteine
  MOD_RES (414)..(414): Selenocysteine
  MOD_RES (433)..(433): Selenocysteine
  MOD_RES (451)..(452): Selenocysteine
MRLARLLRGAALAGPGPGLRAAGFSRSFSSDSGSSPASERGVPGQVDFYARFSPSPLSMKQFLDFGSVNACEKXSFMFLRQELPVRLANIMKEISLLPDNLLRXPSVQLVQSWYIQSLQELLDFKDKSAEDAKAIYERPRRXWLQVSSLCCMACKMIFXDXVIRIRNRHNDVIPXMAQGVIEYKESFGVDPVXSQNVQYFLDRFYMSRISIRMLLNQHSLLFGGKGKGSPSHRKHIGSINPNCNVLEVIKDGYENARRLCDLYYINSPELELEELNAKSPGQPIQVVYVPSHLYHMVFELFKNAMRAXMEHHANRGVYPPIQVHVXLGNEDLXVKMSDRGGGVPLRKIDRLFNYMYSXAPRPRVEXSRAVPLAGFGYGLPISRLYAQYFQGDLKLYSLEGYGXDAVIYIKALSXDSIERLPVYNKAAWKHYNXNHEADDWCVPSREPKDMXXFRSA

SEQ ID NO: 19793 - protein, 160 aa, Homo sapiens
  MOD_RES (13)..(13): Selenocysteine
  MOD_RES (18)..(18): Selenocysteine
  MOD_RES (23)..(23): Selenocysteine
  MOD_RES (34)..(34): Selenocysteine
  MOD_RES (45)..(45): Selenocysteine
  MOD_RES (78)..(78): Selenocysteine
  MOD_RES (85)..(85): Selenocysteine
MEFLDKDPEDHRXLSQFXDALVXIRNRHNDVVPXMAQGVLEYKDXYGDDPVSNQNIQYFLDRFYLSRISIRMLINQHXLIFDGSXNPAHPKHIGSIDPNCNVSEVVKDAYDMAKLLCDKYYMASPDLEIQEINAANSKQPIHMVYVPSHLYHMLFELFKN

SEQ ID NO: 19794 - protein, 98 aa, Homo sapiens
  MOD_RES (14)..(14): Selenocysteine
  MOD_RES (44)..(44): Selenocysteine
  MOD_RES (49)..(49): Selenocysteine
  MOD_RES (54)..(54): Selenocysteine
  MOD_RES (65)..(65): Selenocysteine
  MOD_RES (76)..(76): Selenocysteine
MKEINLLPDRVLSXPSVQLVQSWYVQSLLDIMEFLDKDPEDHRXLSQFXDALVXIRNRHNDVVPXMAQGVLEYKDXYGDDPVSNQNIQYFLDRFYLSR

SEQ ID NO: 19795 - protein, 129 aa, Homo sapiens
  MOD_RES (14)..(14): Selenocysteine
  MOD_RES (44)..(44): Selenocysteine
  MOD_RES (49)..(49): Selenocysteine
  MOD_RES (54)..(54): Selenocysteine
  MOD_RES (65)..(65): Selenocysteine
  MOD_RES (76)..(76): Selenocysteine
  MOD_RES (109)..(109): Selenocysteine
  MOD_RES (116)..(116): Selenocysteine
MKEINLLPDRVLSXPSVQLVQSWYVQSLLDIMEFLDKDPEDHRXLSQFXDALVXIRNRHNDVVPXMAQGVLEYKDXYGDDPVSNQNIQYFLDRFYLSRISIRMLINQHXLIFDGSXNPAHPKHIGSIDP

SEQ ID NO: 19796 - protein, 141 aa, Homo sapiens
  MOD_RES (14)..(14): Selenocysteine
  MOD_RES (44)..(44): Selenocysteine
  MOD_RES (49)..(49): Selenocysteine
  MOD_RES (54)..(54): Selenocysteine
  MOD_RES (65)..(65): Selenocysteine
  MOD_RES (76)..(76): Selenocysteine
  MOD_RES (109)..(109): Selenocysteine
  MOD_RES (116)..(116): Selenocysteine
MKEINLLPDRVLSXPSVQLVQSWYVQSLLDIMEFLDKDPEDHRXLSQFXDALVXIRNRHNDVVPXMAQGVLEYKDXYGDDPVSNQNIQYFLDRFYLSRISIRMLINQHXLIFDGSXNPAHPKHIGSIDPNCNVSEVVKDAY

SEQ ID NO: 19797 - protein, 259 aa, Homo sapiens
  MOD_RES (14)..(14): Selenocysteine
  MOD_RES (44)..(44): Selenocysteine
  MOD_RES (49)..(49): Selenocysteine
  MOD_RES (54)..(54): Selenocysteine
  MOD_RES (65)..(65): Selenocysteine
  MOD_RES (76)..(76): Selenocysteine
  MOD_RES (109)..(109): Selenocysteine
  MOD_RES (116)..(116): Selenocysteine
  MOD_RES (196)..(196): Selenocysteine
  MOD_RES (246)..(246): Selenocysteine
  MOD_RES (249)..(249): Selenocysteine
  MOD_RES (254)..(254): Selenocysteine
  MOD_RES (257)..(257): Selenocysteine
MKEINLLPDRVLSXPSVQLVQSWYVQSLLDIMEFLDKDPEDHRXLSQFXDALVXIRNRHNDVVPXMAQGVLEYKDXYGDDPVSNQNIQYFLDRFYLSRISIRMLINQHXLIFDGSXNPAHPKHIGSIDPNCNVSEVVKDAYDMAKLLCDKYYMASPDLEIQEINAANSKQPIHMVYVPSHLYHMLFELFKNAMRAXVESHESSLILPPIKVMVALGEEDLSIKMSDRGGGVPLRKIERLFSYMYSXAPXPQPGXGGXPL

SEQ ID NO: 19798 - protein, 343 aa, Homo sapiens
  MOD_RES (14)..(14): Selenocysteine
  MOD_RES (44)..(44): Selenocysteine
  MOD_RES (49)..(49): Selenocysteine
  MOD_RES (54)..(54): Selenocysteine
  MOD_RES (65)..(65): Selenocysteine
  MOD_RES (76)..(76): Selenocysteine
  MOD_RES (109)..(109): Selenocysteine
  MOD_RES (116)..(116): Selenocysteine
  MOD_RES (196)..(196): Selenocysteine
  MOD_RES (246)..(246): Selenocysteine
  MOD_RES (249)..(249): Selenocysteine
  MOD_RES (254)..(254): Selenocysteine
  MOD_RES (257)..(257): Selenocysteine
  MOD_RES (290)..(290): Selenocysteine
  MOD_RES (301)..(301): Selenocysteine
  MOD_RES (320)..(320): Selenocysteine
  MOD_RES (332)..(332): Selenocysteine
  MOD_RES (337)..(337): Selenocysteine
  MOD_RES (339)..(339): Selenocysteine
MKEINLLPDRVLSXPSVQLVQSWYVQSLLDIMEFLDKDPEDHRXLSQFXDALVXIRNRHNDVVPXMAQGVLEYKDXYGDDPVSNQNIQYFLDRFYLSRISIRMLINQHXLIFDGSXNPAHPKHIGSIDPNCNVSEVVKDAYDMAKLLCDKYYMASPDLEIQEINAANSKQPIHMVYVPSHLYHMLFELFKNAMRAXVESHESSLILPPIKVMVALGEEDLSIKMSDRGGGVPLRKIERLFSYMYSXAPXPQPGXGGXPLAGFGYGLPISRLYAKYFQGDLQLFSMEGFGXDAVIYLKALSXDSVERLPVYNKSAWRHYQXIQEAGDWCVPSXEPKNXSXYRVS

SEQ ID NO: 19799 - protein, 407 aa, Homo sapiens
  MOD_RES (48)..(48): Selenocysteine
  MOD_RES (51)..(51): Selenocysteine
  MOD_RES (78)..(78): Selenocysteine
  MOD_RES (108)..(108): Selenocysteine
  MOD_RES (113)..(113): Selenocysteine
  MOD_RES (118)..(118): Selenocysteine
  MOD_RES (129)..(129): Selenocysteine
  MOD_RES (140)..(140): Selenocysteine
  MOD_RES (173)..(173): Selenocysteine
  MOD_RES (180)..(180): Selenocysteine
  MOD_RES (260)..(260): Selenocysteine
  MOD_RES (310)..(310): Selenocysteine
  MOD_RES (313)..(313): Selenocysteine
  MOD_RES (318)..(318): Selenocysteine
  MOD_RES (321)..(321): Selenocysteine
  MOD_RES (354)..(354): Selenocysteine
  MOD_RES (365)..(365): Selenocysteine
  MOD_RES (384)..(384): Selenocysteine
  MOD_RES (396)..(396): Selenocysteine
  MOD_RES (401)..(401): Selenocysteine
  MOD_RES (403)..(403): Selenocysteine
MRWVWALLKNASLAGAPKYIEHFSKFSPSPLSMKQFLDFGSSNACEKXSFXFLRQELPVRLANIMKEINLLPDRVLSXPSVQLVQSWYVQSLLDIMEFLDKDPEDHRXLSQFXDALVXIRNRHNDVVPXMAQGVLEYKDXYGDDPVSNQNIQYFLDRFYLSRISIRMLINQHXLIFDGSXNPAHPKHIGSIDPNCNVSEVVKDAYDMAKLLCDKYYMASPDLEIQEINAANSKQPIHMVYVPSHLYHMLFELFKNAMRAXVESHESSLILPPIKVMVALGEEDLSIKMSDRGGGVPLRKIERLFSYMYSXAPXPQPGXGGXPLAGFGYGLPISRLYAKYFQGDLQLFSMEGFGXDAVIYLKALSXDSVERLPVYNKSAWRHYQXIQEAGDWCVPSXEPKNXSXYRVS

SEQ ID NO: 19800 - protein, 406 aa, Homo sapiens
  MOD_RES (44)..(44): Selenocysteine
  MOD_RES (60)..(60): Selenocysteine
  MOD_RES (125)..(125): Selenocysteine
  MOD_RES (145)..(145): Selenocysteine
  MOD_RES (156)..(156): Selenocysteine
  MOD_RES (169)..(169): Selenocysteine
  MOD_RES (176)..(176): Selenocysteine
  MOD_RES (190)..(190): Selenocysteine
  MOD_RES (203)..(203): Selenocysteine
  MOD_RES (256)..(256): Selenocysteine
  MOD_RES (272)..(272): Selenocysteine
  MOD_RES (275)..(275): Selenocysteine
  MOD_RES (307)..(307): Selenocysteine
  MOD_RES (316)..(316): Selenocysteine
  MOD_RES (352)..(352): Selenocysteine
  MOD_RES (382)..(383): Selenocysteine
MRLFRWLLKQPVPKQIERYSRFSPSPLSIKQFLDFGRDNACEKXSYMFLRKELPVRLANXMREVNLLPDNLLNRPSVGLVQSWYMQSFLELLEYENKSPEDPQVLDNFLQVLIKVRNRHNDVVPXMAQGVIEYKEKFGFDPFISXNIQYFLDRFYXNRISFRMLINQHXLLFGGDXNPVHPKHIGSIDPXCNVADVVKDAYEXAKMLCEQYYLVAPELEVEEFNAKAPDKPIQVVYVPSHLFHMLFELFKNSMRAXVELYEDRKEGYPAVKXLVXLGKEDLSIKISDLGGGVPLRKIDRLFNYMYSXAPRPSLEPXRAAPLAGFGYGLPISRLYARYFQGDLKLYSMEGVGXDAVIYLKALSSESFERLPVFNKSAWRHYKXXPEADDWSNPSSEPRDASKYKAKQ

SEQ ID NO: 19801 - protein, 415 aa, Homo sapiens
  MOD_RES (44)..(44): Selenocysteine
  MOD_RES (60)..(60): Selenocysteine
  MOD_RES (125)..(125): Selenocysteine
  MOD_RES (145)..(145): Selenocysteine
  MOD_RES (156)..(156): Selenocysteine
  MOD_RES (169)..(169): Selenocysteine
  MOD_RES (176)..(176): Selenocysteine
  MOD_RES (190)..(190): Selenocysteine
  MOD_RES (203)..(203): Selenocysteine
  MOD_RES (256)..(256): Selenocysteine
  MOD_RES (272)..(272): Selenocysteine
  MOD_RES (275)..(275): Selenocysteine
  MOD_RES (307)..(307): Selenocysteine
  MOD_RES (316)..(316): Selenocysteine
  MOD_RES (352)..(352): Selenocysteine
  MOD_RES (382)..(383): Selenocysteine
  MOD_RES (411)..(411): Selenocysteine
  MOD_RES (414)..(414): Selenocysteine
MRLFRWLLKQPVPKQIERYSRFSPSPLSIKQFLDFGRDNACEKXSYMFLRKELPVRLANXMREVNLLPDNLLNRPSVGLVQSWYMQSFLELLEYENKSPEDPQVLDNFLQVLIKVRNRHNDVVPXMAQGVIEYKEKFGFDPFISXNIQYFLDRFYXNRISFRMLINQHXLLFGGDXNPVHPKHIGSIDPXCNVADVVKDAYEXAKMLCEQYYLVAPELEVEEFNAKAPDKPIQVVYVPSHLFHMLFELFKNSMRAXVELYEDRKEGYPAVKXLVXLGKEDLSIKISDLGGGVPLRKIDRLFNYMYSXAPRPSLEPXRAAPLAGFGYGLPISRLYARYFQGDLKLYSMEGVGXDAVIYLKALSSESFERLPVFNKSAWRHYKXXPEADDWSNPSSEPRDASKYKAKQDKIKXNRXF

SEQ ID NO: 19802 - protein, 411 aa, Homo sapiens
  MOD_RES (52)..(52): Selenocysteine
  MOD_RES (77)..(77): Selenocysteine
  MOD_RES (82)..(82): Selenocysteine
  MOD_RES (119)..(119): Selenocysteine
  MOD_RES (133)..(133): Selenocysteine
  MOD_RES (146)..(146): Selenocysteine
  MOD_RES (151)..(151): Selenocysteine
  MOD_RES (169)..(169): Selenocysteine
  MOD_RES (185)..(185): Selenocysteine
  MOD_RES (228)..(228): Selenocysteine
  MOD_RES (263)..(263): Selenocysteine
  MOD_RES (274)..(274): Selenocysteine
  MOD_RES (288)..(288): Selenocysteine
  MOD_RES (310)..(310): Selenocysteine
  MOD_RES (313)..(313): Selenocysteine
  MOD_RES (316)..(316): Selenocysteine
  MOD_RES (358)..(358): Selenocysteine
MKAARFVLRSAGSLNGAGLVPREVEHFSRYSPSPLSMKQLLDFGSENACERXSFAFLRQELPVRLANILKEIDILPXQLVNXSSVQLVKSWYIQSLMDLVEFHEKSPDDQKALSDFVDXLIKVRNRHHNVVPXMAQGIIEYKDACXVDPVXNQNLQYFLDRFYMNRISXRMLMNQHILIFSDSQXGNPSHIGSIDPNCDVVAVVQDAFECSRMLCDQYYLSSPELKLXQVNGKFPDQPIHIVYVPSHLHHMLFELFKNAMRAXVEHQENQPSLXPIEVIVVLGKEDLXIKISDRGGGVPLRIIDRLFSYXYSXAPXPVMDNSRNAPLAGFGYGLPISRLYAKYFQGDLNLYSLSGYGXDAIIYLKALSSESIEKLPVFNKSAFKHYQMSSEADDWCIPSREPKNLAKEVAM

SEQ ID NO: 19803 - protein, 55 aa, Homo sapiens
  MOD_RES (4)..(5): Selenocysteine
  MOD_RES (21)..(21): Selenocysteine
MARXXSQLILDDSGRENSPFXARPRGIWVLLLPVAVLSVVGSPWEAECAGSPRGK

SEQ ID NO: 19804 - protein, 35 aa, Homo sapiens
  MOD_RES (4)..(5): Selenocysteine
  MOD_RES (18)..(18): Selenocysteine
MARXXSQLRNRPGLPPGXGSLAPPPAREAEGASSC

SEQ ID NO: 19805 - protein, 454 aa, Homo sapiens
  MOD_RES (4)..(5): Selenocysteine
  MOD_RES (31)..(31): Selenocysteine
  MOD_RES (33)..(33): Selenocysteine
  MOD_RES (37)..(37): Selenocysteine
  MOD_RES (54)..(54): Selenocysteine
  MOD_RES (95)..(95): Selenocysteine
  MOD_RES (104)..(104): Selenocysteine
  MOD_RES (128)..(128): Selenocysteine
  MOD_RES (148)..(148): Selenocysteine
  MOD_RES (180)..(180): Selenocysteine
  MOD_RES (182)..(182): Selenocysteine
  MOD_RES (186)..(186): Selenocysteine
  MOD_RES (222)..(222): Selenocysteine
  MOD_RES (226)..(226): Selenocysteine
  MOD_RES (245)..(245): Selenocysteine
  MOD_RES (255)..(255): Selenocysteine
  MOD_RES (322)..(322): Selenocysteine
  MOD_RES (346)..(346): Selenocysteine
  MOD_RES (354)..(354): Selenocysteine
  MOD_RES (359)..(359): Selenocysteine
  MOD_RES (402)..(402): Selenocysteine
  MOD_RES (450)..(450): Selenocysteine
MARXXSQLYDAVPIQSSVVLCSCPSPSMVRXQXESSXPPGIPGGSRQGPAMDGXAAEPRPGAGSLQHAQPPPQPRKKRPEDFKFGKILGEGSFSXVVLARELAXSREYAIKILEKRHIIKENKVPYVXRERDVMSRLDHPFFVKLYFXFQDDEKLYFGLSYAKNGELLKYIRKIGSFDEXCXRFYXAEIVSALEYLHGKGIIHRDLKPENILLNEDMHIQIXDFGXAKVLSPESKQARANSFVGXAQYVSPELLXEKSACKSSDLWALGCIIYQLVAGLPPFRAGNEYLIFQKIIKLEYDFPEKFFPKARDLVEKLLVLDAXKRLGCEEMEGYGPLKAHPFFESVXWENLHQQXPPKLXAYLPAMSEDDEDCYGNYDNLLSQFGCMQVSSSSSSHSLSASDXGLPQRSGSNIEQYIHDLDSNSFELDLQFSEDEKRLLLEKQAGGNPCLXGRII

SEQ ID NO: 19806 - protein, 556 aa, Homo sapiens
  MOD_RES (4)..(5): Selenocysteine
  MOD_RES (31)..(31): Selenocysteine
  MOD_RES (33)..(33): Selenocysteine
  MOD_RES (37)..(37): Selenocysteine
  MOD_RES (54)..(54): Selenocysteine
  MOD_RES (95)..(95): Selenocysteine
  MOD_RES (104)..(104): Selenocysteine
  MOD_RES (128)..(128): Selenocysteine
  MOD_RES (148)..(148): Selenocysteine
  MOD_RES (180)..(180): Selenocysteine
  MOD_RES (182)..(182): Selenocysteine
  MOD_RES (186)..(186): Selenocysteine
  MOD_RES (222)..(222): Selenocysteine
  MOD_RES (226)..(226): Selenocysteine
  MOD_RES (245)..(245): Selenocysteine
  MOD_RES (255)..(255): Selenocysteine
  MOD_RES (322)..(322): Selenocysteine
  MOD_RES (346)..(346): Selenocysteine
  MOD_RES (354)..(354): Selenocysteine
  MOD_RES (359)..(359): Selenocysteine
  MOD_RES (402)..(402): Selenocysteine
  MOD_RES (479)..(479): Selenocysteine
  MOD_RES (513)..(513): Selenocysteine
  MOD_RES (518)..(518): Selenocysteine
  MOD_RES (522)..(522): Selenocysteine
MARXXSQLYDAVPIQSSVVLCSCPSPSMVRXQXESSXPPGIPGGSRQGPAMDGXAAEPRPGAGSLQHAQPPPQPRKKRPEDFKFGKILGEGSFSXVVLARELAXSREYAIKILEKRHIIKENKVPYVXRERDVMSRLDHPFFVKLYFXFQDDEKLYFGLSYAKNGELLKYIRKIGSFDEXCXRFYXAEIVSALEYLHGKGIIHRDLKPENILLNEDMHIQIXDFGXAKVLSPESKQARANSFVGXAQYVSPELLXEKSACKSSDLWALGCIIYQLVAGLPPFRAGNEYLIFQKIIKLEYDFPEKFFPKARDLVEKLLVLDAXKRLGCEEMEGYGPLKAHPFFESVXWENLHQQXPPKLXAYLPAMSEDDEDCYGNYDNLLSQFGCMQVSSSSSSHSLSASDXGLPQRSGSNIEQYIHDLDSNSFELDLQFSEDEKRLLLEKQAGGNPWHQFVENNLILKMGPVDKRKGLFARRRQLLLXEGPHLYYVDPVNKVLKGEIPWSQELRPEAKNFKXFFVHXPNRXYYLMDPSGNAHKWCRKIQEVWRQRYQSHPDAAVQ

SEQ ID NO: 19807 - protein, 429 aa, Homo sapiens
  MOD_RES (4)..(5): Selenocysteine
  MOD_RES (31)..(31): Selenocysteine
  MOD_RES (33)..(33): Selenocysteine
  MOD_RES (37)..(37): Selenocysteine
  MOD_RES (54)..(54): Selenocysteine
  MOD_RES (95)..(95): Selenocysteine
  MOD_RES (104)..(104): Selenocysteine
  MOD_RES (110)..(110): Selenocysteine
  MOD_RES (118)..(118): Selenocysteine
  MOD_RES (128)..(128): Selenocysteine
  MOD_RES (195)..(195): Selenocysteine
  MOD_RES (219)..(219): Selenocysteine
  MOD_RES (227)..(227): Selenocysteine
  MOD_RES (232)..(232): Selenocysteine
  MOD_RES (275)..(275): Selenocysteine
  MOD_RES (352)..(352): Selenocysteine
  MOD_RES (386)..(386): Selenocysteine
  MOD_RES (391)..(391): Selenocysteine
  MOD_RES (395)..(395): Selenocysteine
MARXXSQLYDAVPIQSSVVLCSCPSPSMVRXQXESSXPPGIPGGSRQGPAMDGXAAEPRPGAGSLQHAQPPPQPRKKRPEDFKFGKILGEGSFSXVVLARELAXSREYAXRANSFVGXAQYVSPELLXEKSACKSSDLWALGCIIYQLVAGLPPFRAGNEYLIFQKIIKLEYDFPEKFFPKARDLVEKLLVLDAXKRLGCEEMEGYGPLKAHPFFESVXWENLHQQXPPKLXAYLPAMSEDDEDCYGNYDNLLSQFGCMQVSSSSSSHSLSASDXGLPQRSGSNIEQYIHDLDSNSFELDLQFSEDEKRLLLEKQAGGNPWHQFVENNLILKMGPVDKRKGLFARRRQLLLXEGPHLYYVDPVNKVLKGEIPWSQELRPEAKNFKXFFVHXPNRXYYLMDPSGNAHKWCRKIQEVWRQRYQSHPDAAVQ

SEQ ID NO: 19808 - protein, 88 aa, Homo sapiens
  MOD_RES (5)..(5): Selenocysteine
  MOD_RES (27)..(27): Selenocysteine
  MOD_RES (35)..(35): Selenocysteine
MKICXSRSQILEQQKSYPQRANKPGPXHSWEQRSXFLQSCSRRSPPVRDLWALGCIIYQLVAGLPPFRAGNEYLIFQKIIKLEYDFPE

SEQ ID NO: 19809 - protein, 149 aa, Homo sapiens
  MOD_RES (4)..(4): Selenocysteine
  MOD_RES (6)..(6): Selenocysteine
  MOD_RES (10)..(10): Selenocysteine
  MOD_RES (27)..(27): Selenocysteine
  MOD_RES (68)..(68): Selenocysteine
  MOD_RES (77)..(77): Selenocysteine
  MOD_RES (101)..(101): Selenocysteine
  MOD_RES (121)..(121): Selenocysteine
MVRXQXESSXPPGIPGGSRQGPAMDGXAAEPRPGAGSLQHAQPPPQPRKKRPEDFKFGKILGEGSFSXVVLARELAXSREYAIKILEKRHIIKENKVPYVXRERDVMSRLDHPFFVKLYFXFQDDEKLYFGLSYAKNGELLKYIRKIGS

SEQ ID NO: 19810 - protein, 529 aa, Homo sapiens
  MOD_RES (4)..(4): Selenocysteine
  MOD_RES (6)..(6): Selenocysteine
  MOD_RES (10)..(10): Selenocysteine
  MOD_RES (27)..(27): Selenocysteine
  MOD_RES (68)..(68): Selenocysteine
  MOD_RES (77)..(77): Selenocysteine
  MOD_RES (101)..(101): Selenocysteine
  MOD_RES (121)..(121): Selenocysteine
  MOD_RES (153)..(153): Selenocysteine
  MOD_RES (155)..(155): Selenocysteine
  MOD_RES (159)..(159): Selenocysteine
  MOD_RES (195)..(195): Selenocysteine
  MOD_RES (199)..(199): Selenocysteine
  MOD_RES (218)..(218): Selenocysteine
  MOD_RES (228)..(228): Selenocysteine
  MOD_RES (295)..(295): Selenocysteine
  MOD_RES (319)..(319): Selenocysteine
  MOD_RES (327)..(327): Selenocysteine
  MOD_RES (332)..(332): Selenocysteine
  MOD_RES (375)..(375): Selenocysteine
  MOD_RES (452)..(452): Selenocysteine
  MOD_RES (486)..(486): Selenocysteine
  MOD_RES (491)..(491): Selenocysteine
  MOD_RES (495)..(495): Selenocysteine
MVRXQXESSXPPGIPGGSRQGPAMDGXAAEPRPGAGSLQHAQPPPQPRKKRPEDFKFGKILGEGSFSXVVLARELAXSREYAIKILEKRHIIKENKVPYVXRERDVMSRLDHPFFVKLYFXFQDDEKLYFGLSYAKNGELLKYIRKIGSFDEXCXRFYXAEIVSALEYLHGKGIIHRDLKPENILLNEDMHIQIXDFGXAKVLSPESKQARANSFVGXAQYVSPELLXEKSACKSSDLWALGCIIYQLVAGLPPFRAGNEYLIFQKIIKLEYDFPEKFFPKARDLVEKLLVLDAXKRLGCEEMEGYGPLKAHPFFESVXWENLHQQXPPKLXAYLPAMSEDDEDCYGNYDNLLSQFGCMQVSSSSSSHSLSASDXGLPQRSGSNIEQYIHDLDSNSFELDLQFSEDEKRLLLEKQAGGNPWHQFVENNLILKMGPVDKRKGLFARRRQLLLXEGPHLYYVDPVNKVLKGEIPWSQELRPEAKNFKXFFVHXPNRXYYLMDPSGNAHKWCRKIQEVWRQRYQSHPDAAVQ

SEQ ID NO: 19811 - protein, 40 aa, Homo sapiens
  MOD_RES (1)..(1): Any amino acid
  MOD_RES (8)..(8): Selenocysteine
  MOD_RES (22)..(22): Selenocysteine
  MOD_RES (33)..(33): Selenocysteine
XHHSELEXSILYFRRSLSWNMXFQKNSSLRQEXSWRNFWF

SEQ ID NO: 19812 - protein, 157 aa, Homo sapiens
  MOD_RES (3)..(3): Selenocysteine
  MOD_RES (20)..(20): Selenocysteine
  MOD_RES (27)..(27): Selenocysteine
  MOD_RES (29)..(30): Selenocysteine
  MOD_RES (47)..(47): Selenocysteine
  MOD_RES (50)..(50): Selenocysteine
  MOD_RES (60)..(61): Selenocysteine
  MOD_RES (65)..(65): Selenocysteine
  MOD_RES (71)..(71): Selenocysteine
  MOD_RES (80)..(80): Selenocysteine
  MOD_RES (84)..(84): Selenocysteine
  MOD_RES (95)..(95): Selenocysteine
  MOD_RES (101)..(101): Selenocysteine
  MOD_RES (105)..(105): Selenocysteine
  MOD_RES (112)..(112): Selenocysteine
  MOD_RES (114)..(115): Selenocysteine
  MOD_RES (123)..(123): Selenocysteine
  MOD_RES (125)..(125): Selenocysteine
MGXSEQRLAGMPGPGIRASXGQPEDDXEXXGLEGGVAMPGAEDDVVXPGXSEDRYKSGLXXLVAXSVNSVXGIRIEDLPXSESXVHAQEQSPSAXASNVAXSHSXEKVDGDXQXXVEKDGLSXVXLVGIIVGVLLAIGFIGAIIVVVMRKMSGRYSP

SEQ ID NO: 19813 - protein, 236 aa, Homo sapiens
  MOD_RES (3)..(3): Selenocysteine
  MOD_RES (10)..(10): Selenocysteine
  MOD_RES (35)..(35): Selenocysteine
  MOD_RES (74)..(74): Selenocysteine
  MOD_RES (76)..(76): Selenocysteine
  MOD_RES (101)..(101): Selenocysteine
  MOD_RES (108)..(108): Selenocysteine
  MOD_RES (110)..(111): Selenocysteine
  MOD_RES (128)..(128): Selenocysteine
  MOD_RES (131)..(131): Selenocysteine
  MOD_RES (141)..(142): Selenocysteine
  MOD_RES (146)..(146): Selenocysteine
  MOD_RES (152)..(152): Selenocysteine
  MOD_RES (161)..(161): Selenocysteine
  MOD_RES (165)..(165): Selenocysteine
  MOD_RES (176)..(176): Selenocysteine
  MOD_RES (182)..(182): Selenocysteine
  MOD_RES (186)..(186): Selenocysteine
  MOD_RES (193)..(193): Selenocysteine
  MOD_RES (195)..(196): Selenocysteine
  MOD_RES (204)..(204): Selenocysteine
  MOD_RES (206)..(206): Selenocysteine
MLXPLGKFSXAKFAVRLPRVWEARAPSLSGAPAPXPPAPPPSRSSRLGLWPRCFLIFPQLRILLLGPQESNNSXGXMWKVSALLFVLGSASLWVLAEGASXGQPEDDXEXXGLEGGVAMPGAEDDVVXPGXSEDRYKSGLXXLVAXSVNSVXGIRIEDLPXSESXVHAQEQSPSAXASNVAXSHSXEKVDGDXQXXVEKDGLSXVXLVGIIVGVLLAIGFIGAIIVVVMRKMSGRP

SEQ ID NO: 19814 - protein, 238 aa, Homo sapiens
  MOD_RES (3)..(3): Selenocysteine
  MOD_RES (10)..(10): Selenocysteine
  MOD_RES (35)..(35): Selenocysteine
  MOD_RES (74)..(74): Selenocysteine
  MOD_RES (76)..(76): Selenocysteine
  MOD_RES (101)..(101): Selenocysteine
  MOD_RES (108)..(108): Selenocysteine
  MOD_RES (110)..(111): Selenocysteine
  MOD_RES (128)..(128): Selenocysteine
  MOD_RES (131)..(131): Selenocysteine
  MOD_RES (141)..(142): Selenocysteine
  MOD_RES (146)..(146): Selenocysteine
  MOD_RES (152)..(152): Selenocysteine
  MOD_RES (161)..(161): Selenocysteine
  MOD_RES (165)..(165): Selenocysteine
  MOD_RES (176)..(176): Selenocysteine
  MOD_RES (182)..(182): Selenocysteine
  MOD_RES (186)..(186): Selenocysteine
  MOD_RES (193)..(193): Selenocysteine
  MOD_RES (195)..(196): Selenocysteine
  MOD_RES (204)..(204): Selenocysteine
  MOD_RES (206)..(206): Selenocysteine
MLXPLGKFSXAKFAVRLPRVWEARAPSLSGAPAPXPPAPPPSRSSRLGLWPRCFLIFPQLRILLLGPQESNNSXGXMWKVSALLFVLGSASLWVLAEGASXGQPEDDXEXXGLEGGVAMPGAEDDVVXPGXSEDRYKSGLXXLVAXSVNSVXGIRIEDLPXSESXVHAQEQSPSAXASNVAXSHSXEKVDGDXQXXVEKDGLSXVXLVGIIVGVLLAIGFIGAIIVVVMRKMSGRYSP

SEQ ID NO: 19815 - protein, 43 aa, Homo sapiens
  MOD_RES (10)..(10): Selenocysteine
  MOD_RES (13)..(13): Selenocysteine
  MOD_RES (23)..(24): Selenocysteine
  MOD_RES (31)..(31): Selenocysteine
MPGAEDDVVXPGXSEDRYKSGLXXLRKWMEXHRQQLRKMVCQQ

SEQ ID NO: 19816 - protein, 118 aa, Homo sapiens
  MOD_RES (10)..(10): Selenocysteine
  MOD_RES (13)..(13): Selenocysteine
  MOD_RES (23)..(24): Selenocysteine
  MOD_RES (28)..(28): Selenocysteine
  MOD_RES (34)..(34): Selenocysteine
  MOD_RES (43)..(43): Selenocysteine
  MOD_RES (47)..(47): Selenocysteine
  MOD_RES (58)..(58): Selenocysteine
  MOD_RES (64)..(64): Selenocysteine
  MOD_RES (68)..(68): Selenocysteine
  MOD_RES (75)..(75): Selenocysteine
  MOD_RES (77)..(78): Selenocysteine
  MOD_RES (86)..(86): Selenocysteine
  MOD_RES (88)..(88): Selenocysteine
MPGAEDDVVXPGXSEDRYKSGLXXLVAXSVNSVXGIRIEDLPXSESXVHAQEQSPSAXASNVAXSHSXEKVDGDXQXXVEKDGLSXVXLVGIIVGVLLAIGFIGAIIVVVMRKMSGRP

SEQ ID NO: 19817 - protein, 120 aa, Homo sapiens
  MOD_RES (10)..(10): Selenocysteine
  MOD_RES (13)..(13): Selenocysteine
  MOD_RES (23)..(24): Selenocysteine
  MOD_RES (28)..(28): Selenocysteine
  MOD_RES (34)..(34): Selenocysteine
  MOD_RES (43)..(43): Selenocysteine
  MOD_RES (47)..(47): Selenocysteine
  MOD_RES (58)..(58): Selenocysteine
  MOD_RES (64)..(64): Selenocysteine
  MOD_RES (68)..(68): Selenocysteine
  MOD_RES (75)..(75): Selenocysteine
  MOD_RES (77)..(78): Selenocysteine
  MOD_RES (86)..(86): Selenocysteine
  MOD_RES (88)..(88): Selenocysteine
MPGAEDDVVXPGXSEDRYKSGLXXLVAXSVNSVXGIRIEDLPXSESXVHAQEQSPSAXASNVAXSHSXEKVDGDXQXXVEKDGLSXVXLVGIIVGVLLAIGFIGAIIVVVMRKMSGRYSP

SEQ ID NO: 19818 - protein, 161 aa, Homo sapiens
  MOD_RES (25)..(25): Selenocysteine
  MOD_RES (32)..(32): Selenocysteine
  MOD_RES (34)..(35): Selenocysteine
  MOD_RES (52)..(52): Selenocysteine
  MOD_RES (55)..(55): Selenocysteine
  MOD_RES (65)..(66): Selenocysteine
  MOD_RES (70)..(70): Selenocysteine
  MOD_RES (76)..(76): Selenocysteine
  MOD_RES (85)..(85): Selenocysteine
  MOD_RES (89)..(89): Selenocysteine
  MOD_RES (100)..(100): Selenocysteine
  MOD_RES (106)..(106): Selenocysteine
  MOD_RES (110)..(110): Selenocysteine
  MOD_RES (117)..(117): Selenocysteine
  MOD_RES (119)..(120): Selenocysteine
  MOD_RES (128)..(128): Selenocysteine
  MOD_RES (130)..(130): Selenocysteine
MWKVSALLFVLGSASLWVLAEGASXGQPEDDXEXXGLEGGVAMPGAEDDVVXPGXSEDRYKSGLXXLVAXSVNSVXGIRIEDLPXSESXVHAQEQSPSAXASNVAXSHSXEKVDGDXQXXVEKDGLSXVXLVGIIVGVLLAIGFIGAIIVVVMRKMSGRYS

SEQ ID NO: 19819 - protein, 162 aa, Homo sapiens
  MOD_RES (25)..(25): Selenocysteine
  MOD_RES (32)..(32): Selenocysteine
  MOD_RES (34)..(35): Selenocysteine
  MOD_RES (52)..(52): Selenocysteine
  MOD_RES (55)..(55): Selenocysteine
  MOD_RES (65)..(66): Selenocysteine
  MOD_RES (70)..(70): Selenocysteine
  MOD_RES (76)..(76): Selenocysteine
  MOD_RES (85)..(85): Selenocysteine
  MOD_RES (89)..(89): Selenocysteine
  MOD_RES (100)..(100): Selenocysteine
  MOD_RES (106)..(106): Selenocysteine
  MOD_RES (110)..(110): Selenocysteine
  MOD_RES (117)..(117): Selenocysteine
  MOD_RES (119)..(120): Selenocysteine
  MOD_RES (128)..(128): Selenocysteine
  MOD_RES (130)..(130): Selenocysteine
MWKVSALLFVLGSASLWVLAEGASXGQPEDDXEXXGLEGGVAMPGAEDDVVXPGXSEDRYKSGLXXLVAXSVNSVXGIRIEDLPXSESXVHAQEQSPSAXASNVAXSHSXEKVDGDXQXXVEKDGLSXVXLVGIIVGVLLAIGFIGAIIVVVMRKMSGRYSP

SEQ ID NO: 19820 - protein, 94 aa, Homo sapiens
  MOD_RES (1)..(1): Any amino acid
  MOD_RES (2)..(2): Selenocysteine
  MOD_RES (27)..(27): Selenocysteine
  MOD_RES (66)..(66): Selenocysteine
  MOD_RES (68)..(68): Selenocysteine
XXAKFAVRLPRVWEARAPSLSGAPAPXPPAPPPSRSSRLGLWPRCFLIFPQLRILLLGPQESNNSXGXMWKVSALLFVLGSASLWVLAEGGEGV

SEQ ID NO: 19821 - protein, 283 aa, Homo sapiens
  MOD_RES (11)..(11): Selenocysteine
  MOD_RES (125)..(125): Selenocysteine
  MOD_RES (149)..(149): Selenocysteine
  MOD_RES (151)..(151): Selenocysteine
  MOD_RES (154)..(154): Selenocysteine
  MOD_RES (186)..(186): Selenocysteine
  MOD_RES (213)..(213): Selenocysteine
  MOD_RES (230)..(230): Selenocysteine
MNGEEQYYAAXQLYKDPCAFQRGPAPEFSASPPACLYMGRQPPPPPPHPFPGALGALEQGSPPDISPYEVPPLADDPAVAHLHHHLPAQLALPHPPAGPFPEGAEPGVLEEPNRVQLPFPWMKSXKAHAWKGQWAGGAYAAEPEENKRXRXAYXRAQLLELEKEFLFNKYISRPRRVELAVMLNLXERHIKIWFQNRRMKWKKEEDKKRGGGXAVGGGGVAEPEQDCAVXSGEELLALPPPPPPGGAVPPAAPVAAREGRLPPGLSASPQPSSVAPRRPQEPR

SEQ ID NO: 19822 - protein, 254 aa, Homo sapiens
  MOD_RES (18)..(19): Selenocysteine
  MOD_RES (33)..(33): Selenocysteine
  MOD_RES (70)..(70): Selenocysteine
  MOD_RES (73)..(73): Selenocysteine
  MOD_RES (117)..(117): Selenocysteine
  MOD_RES (121)..(121): Selenocysteine
  MOD_RES (158)..(158): Selenocysteine
  MOD_RES (160)..(160): Selenocysteine
  MOD_RES (238)..(238): Selenocysteine
MAWQGLVLAACLLMFPSXXADCLSRCSLCAVKXQDGPKPINPLICSLQCQAALLPSEEWERCQSFLSFFXPSXLGLNDKEDLGSKSVGEGPYSELAKLSGSFLKELEKSKFLPSISXKENXLSKSLEEKLRGLSDGFREGAESELMRDAQLNDGAMEXGXLYLAEEDPKEQVKRYGGFLRKYPKRSSEVAGEGDGDSMGHEDLYKRYGGFLRRIRPKLKWDNQKRYGGFLRRQFKVVXRSQEDPNAYSGELFDA

SEQ ID NO: 19823 - protein, 119 aa, Homo sapiens
  MOD_RES (10)..(10): Selenocysteine
  MOD_RES (14)..(14): Selenocysteine
  MOD_RES (82)..(82): Selenocysteine
MEKAADLQDXASLXLKFKFNPKLGIDNPVLSLAEDHDPYDPWSLERPRFCLLSKEEGKSFGFHLQQELGRAGHVVCRVDPGXSAQRQGLQEGDRILAVNNDVVEHEDYAVAIRVLSGWC

SEQ ID NO: 19824 - protein, 491 aa, Homo sapiens
  MOD_RES (10)..(10): Selenocysteine
  MOD_RES (14)..(14): Selenocysteine
  MOD_RES (82)..(82): Selenocysteine
  MOD_RES (125)..(125): Selenocysteine
  MOD_RES (148)..(148): Selenocysteine
  MOD_RES (172)..(172): Selenocysteine
  MOD_RES (185)..(185): Selenocysteine
  MOD_RES (214)..(214): Selenocysteine
  MOD_RES (245)..(245): Selenocysteine
  MOD_RES (313)..(313): Selenocysteine
  MOD_RES (327)..(327): Selenocysteine
  MOD_RES (351)..(351): Selenocysteine
  MOD_RES (368)..(368): Selenocysteine
  MOD_RES (376)..(376): Selenocysteine
  MOD_RES (417)..(417): Selenocysteine
MEKAADLQDXASLXLKFKFNPKLGIDNPVLSLAEDHDPYDPWSLERPRFCLLSKEEGKSFGFHLQQELGRAGHVVCRVDPGXSAQRQGLQEGDRILAVNNDVVEHEDYAVVVRRIRASSPRVLLXVLARHAHDVARAQLGEDAHLCPXLGPGVRPRLCHIVKDEGGFGFSVXHGNQGPFWLVLSXGGAAERAGVPPGARLLEVNGLWQSGQQVXLLVAGPEVEEQCRQLGLPLAAPLAEGWALPXKPRCLHLEKGPQGFGFLLREEKGLDGRPGQFLWEVDPGLPAKKAGMQAGDRLVAVAGESVEGLGHEEXVSRIQGQGSCVSLXVVDPEADRFFSMVRLSPLLFLENXEAPASPRGSSSASLVEXEDPSLEDXSVPSVPLGSRQCFLYPGPGGSYGFRLSCVASGPRLFISQVXPGGSAARAGLQVGDVILEVNGYPVGGQNDLERLQQLPEAEPPLCLKLAARSLRGLEAWIPPGAAEDWALASDLL

SEQ ID NO: 19825 - protein, 505 aa, Homo sapiens
  MOD_RES (10)..(10): Selenocysteine
  MOD_RES (14)..(14): Selenocysteine
  MOD_RES (82)..(82): Selenocysteine
  MOD_RES (125)..(125): Selenocysteine
  MOD_RES (148)..(148): Selenocysteine
  MOD_RES (172)..(172): Selenocysteine
  MOD_RES (185)..(185): Selenocysteine
  MOD_RES (212)..(212): Selenocysteine
  MOD_RES (217)..(217): Selenocysteine
  MOD_RES (228)..(228): Selenocysteine
  MOD_RES (259)..(259): Selenocysteine
  MOD_RES (327)..(327): Selenocysteine
  MOD_RES (341)..(341): Selenocysteine
  MOD_RES (365)..(365): Selenocysteine
  MOD_RES (382)..(382): Selenocysteine
  MOD_RES (390)..(390): Selenocysteine
  MOD_RES (431)..(431): Selenocysteine
MEKAADLQDXASLXLKFKFNPKLGIDNPVLSLAEDHDPYDPWSLERPRFCLLSKEEGKSFGFHLQQELGRAGHVVCRVDPGXSAQRQGLQEGDRILAVNNDVVEHEDYAVVVRRIRASSPRVLLXVLARHAHDVARAQLGEDAHLCPXLGPGVRPRLCHIVKDEGGFGFSVXHGNQGPFWLVLSXGGAAERAGVPPGARLLEVNGVSVEKFXHNQLXRKLWQSGQQVXLLVAGPEVEEQCRQLGLPLAAPLAEGWALPXKPRCLHLEKGPQGFGFLLREEKGLDGRPGQFLWEVDPGLPAKKAGMQAGDRLVAVAGESVEGLGHEEXVSRIQGQGSCVSLXVVDPEADRFFSMVRLSPLLFLENXEAPASPRGSSSASLVEXEDPSLEDXSVPSVPLGSRQCFLYPGPGGSYGFRLSCVASGPRLFISQVXPGGSAARAGLQVGDVILEVNGYPVGGQNDLERLQQLPEAEPPLCLKLAARSLRGLEAWIPPGAAEDWALASDLL

SEQ ID NO: 19826 - protein, 492 aa, Homo sapiens
  MOD_RES (3)..(3): Selenocysteine
  MOD_RES (21)..(21): Selenocysteine
  MOD_RES (69)..(69): Selenocysteine
  MOD_RES (112)..(112): Selenocysteine
  MOD_RES (135)..(135): Selenocysteine
  MOD_RES (159)..(159): Selenocysteine
  MOD_RES (172)..(172): Selenocysteine
  MOD_RES (199)..(199): Selenocysteine
  MOD_RES (204)..(204): Selenocysteine
  MOD_RES (215)..(215): Selenocysteine
  MOD_RES (246)..(246): Selenocysteine
  MOD_RES (314)..(314): Selenocysteine
  MOD_RES (328)..(328): Selenocysteine
  MOD_RES (352)..(352): Selenocysteine
  MOD_RES (369)..(369): Selenocysteine
  MOD_RES (377)..(377): Selenocysteine
  MOD_RES (418)..(418): Selenocysteine
MVXPSPPGNHSLSLEAPRLHXASDLLDPWSLERPRFCLLSKEEGKSFGFHLQQELGRAGHVVCRVDPGXSAQRQGLQEGDRILAVNNDVVEHEDYAVVVRRIRASSPRVLLXVLARHAHDVARAQLGEDAHLCPXLGPGVRPRLCHIVKDEGGFGFSVXHGNQGPFWLVLSXGGAAERAGVPPGARLLEVNGVSVEKFXHNQLXRKLWQSGQQVXLLVAGPEVEEQCRQLGLPLAAPLAEGWALPXKPRCLHLEKGPQGFGFLLREEKGLDGRPGQFLWEVDPGLPAKKAGMQAGDRLVAVAGESVEGLGHEEXVSRIQGQGSCVSLXVVDPEADRFFSMVRLSPLLFLENXEAPASPRGSSSASLVEXEDPSLEDXSVPSVPLGSRQCFLYPGPGGSYGFRLSCVASGPRLFISQVXPGGSAARAGLQVGDVILEVNGYPVGGQNDLERLQQLPEAEPPLCLKLAARSLRGLEAWIPPGAAEDWALASDLL

SEQ ID NO: 19827 - protein, 571 aa, Homo sapiens
  MOD_RES (3)..(3): Selenocysteine
  MOD_RES (21)..(21): Selenocysteine
  MOD_RES (37)..(37): Selenocysteine
  MOD_RES (59)..(59): Selenocysteine
  MOD_RES (62)..(63): Selenocysteine
  MOD_RES (67)..(67): Selenocysteine
  MOD_RES (74)..(74): Selenocysteine
  MOD_RES (148)..(148): Selenocysteine
  MOD_RES (191)..(191): Selenocysteine
  MOD_RES (214)..(214): Selenocysteine
  MOD_RES (238)..(238): Selenocysteine
  MOD_RES (251)..(251): Selenocysteine
  MOD_RES (278)..(278): Selenocysteine
  MOD_RES (283)..(283): Selenocysteine
  MOD_RES (294)..(294): Selenocysteine
  MOD_RES (325)..(325): Selenocysteine
  MOD_RES (393)..(393): Selenocysteine
  MOD_RES (407)..(407): Selenocysteine
  MOD_RES (431)..(431): Selenocysteine
  MOD_RES (448)..(448): Selenocysteine
  MOD_RES (456)..(456): Selenocysteine
  MOD_RES (497)..(497): Selenocysteine
MVXPSPPGNHSLSLEAPRLHXASDLLGNHSLGLPLIXALVGSRDRRGRVFSPVPVPLPXNPXXQHPXRQKLPSXLSGHRVCQAHGEPVLGLCPLLPLFCCPPHPPDPWSLERPRFCLLSKEEGKSFGFHLQQELGRAGHVVCRVDPGXSAQRQGLQEGDRILAVNNDVVEHEDYAVVVRRIRASSPRVLLXVLARHAHDVARAQLGEDAHLCPXLGPGVRPRLCHIVKDEGGFGFSVXHGNQGPFWLVLSXGGAAERAGVPPGARLLEVNGVSVEKFXHNQLXRKLWQSGQQVXLLVAGPEVEEQCRQLGLPLAAPLAEGWALPXKPRCLHLEKGPQGFGFLLREEKGLDGRPGQFLWEVDPGLPAKKAGMQAGDRLVAVAGESVEGLGHEEXVSRIQGQGSCVSLXVVDPEADRFFSMVRLSPLLFLENXEAPASPRGSSSASLVEXEDPSLEDXSVPSVPLGSRQCFLYPGPGGSYGFRLSCVASGPRLFISQVXPGGSAARAGLQVGDVILEVNGYPVGGQNDLERLQQLPEAEPPLCLKLAARSLRGLEAWIPPGAAEDWALASDLL

SEQ ID NO: 19828 - protein, 1154 aa, Homo sapiens
  MOD_RES (18)..(18): Selenocysteine
  MOD_RES (79)..(79): Selenocysteine
  MOD_RES (81)..(81): Selenocysteine
  MOD_RES (86)..(86): Selenocysteine
  MOD_RES (91)..(91): Selenocysteine
  MOD_RES (94)..(94): Selenocysteine
  MOD_RES (101)..(101): Selenocysteine
  MOD_RES (112)..(112): Selenocysteine
  MOD_RES (115)..(115): Selenocysteine
  MOD_RES (120)..(120): Selenocysteine
  MOD_RES (133)..(133): Selenocysteine
  MOD_RES (135)..(135): Selenocysteine
  MOD_RES (153)..(153): Selenocysteine
  MOD_RES (159)..(159): Selenocysteine
  MOD_RES (171)..(171): Selenocysteine
  MOD_RES (234)..(234): Selenocysteine
  MOD_RES (239)..(239): Selenocysteine
  MOD_RES (268)..(268): Selenocysteine
  MOD_RES (284)..(284): Selenocysteine
  MOD_RES (300)..(300): Selenocysteine
  MOD_RES (319)..(319): Selenocysteine
  MOD_RES (326)..(326): Selenocysteine
  MOD_RES (348)..(348): Selenocysteine
  MOD_RES (366)..(366): Selenocysteine
  MOD_RES (380)..(380): Selenocysteine
  MOD_RES (387)..(387): Selenocysteine
  MOD_RES (398)..(398): Selenocysteine
  MOD_RES (425)..(425): Selenocysteine
  MOD_RES (427)..(427): Selenocysteine
  MOD_RES (486)..(486): Selenocysteine
  MOD_RES (489)..(489): Selenocysteine
  MOD_RES (527)..(528): Selenocysteine
  MOD_RES (569)..(569): Selenocysteine
  MOD_RES (573)..(573): Selenocysteine
  MOD_RES (582)..(582): Selenocysteine
  MOD_RES (662)..(662): Selenocysteine
  MOD_RES (665)..(665): Selenocysteine
  MOD_RES (669)..(669): Selenocysteine
  MOD_RES (678)..(678): Selenocysteine
  MOD_RES (694)..(694): Selenocysteine
  MOD_RES (696)..(696): Selenocysteine
  MOD_RES (746)..(746): Selenocysteine
  MOD_RES (749)..(749): Selenocysteine
  MOD_RES (767)..(767): Selenocysteine
  MOD_RES (769)..(769): Selenocysteine
  MOD_RES (790)..(790): Selenocysteine
  MOD_RES (807)..(807): Selenocysteine
  MOD_RES (837)..(837): Selenocysteine
  MOD_RES (846)..(846): Selenocysteine
  MOD_RES (852)..(852): Selenocysteine
  MOD_RES (863)..(863): Selenocysteine
  MOD_RES (888)..(888): Selenocysteine
  MOD_RES (894)..(894): Selenocysteine
  MOD_RES (901)..(901): Selenocysteine
  MOD_RES (912)..(912): Selenocysteine
  MOD_RES (931)..(932): Selenocysteine
  MOD_RES (935)..(935): Selenocysteine
  MOD_RES (941)..(941): Selenocysteine
  MOD_RES (954)..(954): Selenocysteine
  MOD_RES (961)..(961): Selenocysteine
  MOD_RES (971)..(971): Selenocysteine
  MOD_RES (974)..(974): Selenocysteine
  MOD_RES (982)..(982): Selenocysteine
  MOD_RES (997)..(997): Selenocysteine
  MOD_RES (1029)..(1029): Selenocysteine
  MOD_RES (1064)..(1065): Selenocysteine
  MOD_RES (1067)..(1067): Selenocysteine
  MOD_RES (1088)..(1088): Selenocysteine
  MOD_RES (1103)..(1103): Selenocysteine
  MOD_RES (1120)..(1120): Selenocysteine
  MOD_RES (1123)..(1123): Selenocysteine
MGLLLMILASAVLGSFLXLLAQFFLLYRRQPEPPADEAARAGEGFRYIKPVPGLLLREYLYGGGRDEEPSGAAPEGGAXPXAAPEXPAPPXREXCYFLNAXILFLFRELRDXALXRRWVXKKIKVEFEELLQXKXAGRLLEGLSLRDVFLGEXVPFIKXIRLVRPVVPSAXGEPDGPEGEALPAACPEELAFEAEVEYNGGFHLAIDVDLVFGKSAYLFVKLSRVVGRLRLVFXRVPFXHWFFSFVEDPLIDFEVRSQFEGRPMPQLXSIIVNQLKKIIKRKHXLPNYKIRFKPFFPYQXLQGFEEDEEHIHIQQWALXEGRLKVXLLECSRLLIFGSYDREANVHCXLELSSSVWEEKQRSSIKXVELIKGNLQSVGLXLRLVQSXDGYAGHVIIEXVAPNSPAAIADLQRGDRLIAIGGVKIXSXLQVLKLIKQAGDRVLVYYERPVGQSNQGAVLQDNFGQLEENFLSSSCQSGYEEEAAGLXVDXESRELDSEFEDLASDVRAQNEFKDEAQSLSHSPKRVPXXLSIKPLGAISPVLNRKLAVGSHPLPPKIQSKDGNKPPPLKXSEIXDPAQVSKPXQGSAFKPPVPPRPQAKVPLPSADAPNQAEPDVLVEKPEKVVPPPLVDKSAEKQAKNVDAIDDAAAPKQFLAKQEVAKDVXSEXSCPXKDSSDDRQXWESSEILYRNKLGKWXRXRASCLFDIEACHRYLNIALWCRDPFKLGGLICLGHVSLKLEDVALGCLAXSNXEYLSKLRLEAPSPKAIVXRXALRNLSMQKGFNDKFCYGDIXIHFKYLKEGESDHHVVXNVEKEKEPHLVEEVSVLPKEEQFVGQMGLXENKHSFQDXQFQNPXWCDYCKKKVWXKAASQCMFCAYVCHKKCQEKCLAEXSVCGAXDRRIDRXLKNLRLEGQEXLLGLPPRVDAEASKSVNKXXGLXRHIINXSSRLLNLRQVSKXRLSEPGXDLVEPSPKHXPNXSDNEGSDXEVCGPNSPSKRGNSXGIKLVRKEGGLDDSVFIAVKEIGRDLYRGLPXEERIQKLEFMLDKLQNEIDQELEHNNSLVREEKEXXDXRKKSLLSAALAKSGERLQALXLLMIHYRAGIEDIEXLESLSLDQHSKKISKYXDDXEEDLDNEISQLIDSQPFSSISDDLFGPSESV

SEQ ID NO: 19829 - protein, 108 aa, Homo sapiens
  MOD_RES (6)..(6): Selenocysteine
  MOD_RES (12)..(12): Selenocysteine
  MOD_RES (16)..(16): Selenocysteine
  MOD_RES (55)..(55): Selenocysteine
  MOD_RES (62)..(62): Selenocysteine
  MOD_RES (75)..(75): Selenocysteine
  MOD_RES (78)..(78): Selenocysteine
MAEYGXLLQDLXNNIXLEDLEQLKSACKEDIPSEKNNLSYIEHIFEISRRPDLLXMVVDYRXRVLKISEEDELDXKLXRIPSAKKYKDIIRQPSEEEIIKLAPPPKKA

SEQ ID NO: 19830 - protein, 130 aa, Homo sapiens
  MOD_RES (6)..(6): Selenocysteine
  MOD_RES (12)..(12): Selenocysteine
  MOD_RES (16)..(16): Selenocysteine
  MOD_RES (40)..(41): Selenocysteine
  MOD_RES (77)..(77): Selenocysteine
  MOD_RES (84)..(84): Selenocysteine
  MOD_RES (97)..(97): Selenocysteine
  MOD_RES (100)..(100): Selenocysteine
MAEYGXLLQDLXNNIXLEDLEQLKSACKEDIPSEKSEEIXXGSAWFSFLESHNKLDKDNLSYIEHIFEISRRPDLLXMVVDYRXRVLKISEEDELDXKLXRIPSAKKYKDIIRQPSEEEIIKLAPPPKKA

SEQ ID NO: 19831 - protein, 151 aa, Homo sapiens
  MOD_RES (18)..(18): Selenocysteine
  MOD_RES (27)..(27): Selenocysteine
  MOD_RES (33)..(33): Selenocysteine
  MOD_RES (37)..(37): Selenocysteine
  MOD_RES (61)..(62): Selenocysteine
  MOD_RES (98)..(98): Selenocysteine
  MOD_RES (105)..(105): Selenocysteine
  MOD_RES (118)..(118): Selenocysteine
  MOD_RES (121)..(121): Selenocysteine
MEDEGNKLCQAPPWPGQXSPVMAEYGXLLQDLXNNIXLEDLEQLKSACKEDIPSEKSEEIXXGSAWFSFLESHNKLDKDNLSYIEHIFEISRRPDLLXMVVDYRXRVLKISEEDELDXKLXRIPSAKKYKDIIRQPSEEEIIKLAPPPKKA

SEQ ID NO: 19832 - protein, 77 aa, Homo sapiens
  MOD_RES (20)..(20): Selenocysteine
  MOD_RES (28)..(28): Selenocysteine
  MOD_RES (36)..(39): Selenocysteine
  MOD_RES (64)..(64): Selenocysteine
  MOD_RES (69)..(69): Selenocysteine
  MOD_RES (74)..(74): Selenocysteine
MSPPLCPLLLLAVGLRLAGXLNPSDPNXCSFWESFXXXXKESHSRPFSLLPSEPCERPWEGPHXCPQPXNSEEXPGF

SEQ ID NO: 19833 - protein, 173 aa, Homo sapiens
  MOD_RES (20)..(20): Selenocysteine
  MOD_RES (28)..(28): Selenocysteine
  MOD_RES (36)..(39): Selenocysteine
  MOD_RES (64)..(64): Selenocysteine
  MOD_RES (69)..(69): Selenocysteine
  MOD_RES (74)..(74): Selenocysteine
  MOD_RES (82)..(82): Selenocysteine
MSPPLCPLLLLAVGLRLAGXLNPSDPNXCSFWESFXXXXKESHSRPFSLLPSEPCERPWEGPHXCPQPXVVYRXVYRQVVKXDHRQRLQCCHGFYESRGFCVPLCAQECVHGRCVAPNQCQCVPGWRGDDCSSECAPGMWGPQCDKPCSCGNNSSCDPKSGVCSCPSGLQPPN

SEQ ID NO: 19834 - protein, 1037 aa, Homo sapiens
  MOD_RES (20)..(20): Selenocysteine
  MOD_RES (28)..(28): Selenocysteine
  MOD_RES (36)..(39): Selenocysteine
  MOD_RES (64)..(64): Selenocysteine
  MOD_RES (69)..(69): Selenocysteine
  MOD_RES (74)..(74): Selenocysteine
  MOD_RES (82)..(82): Selenocysteine
  MOD_RES (179)..(179): Selenocysteine
  MOD_RES (202)..(202): Selenocysteine
  MOD_RES (212)..(212): Selenocysteine
  MOD_RES (224)..(224): Selenocysteine
  MOD_RES (232)..(232): Selenocysteine
  MOD_RES (243)..(243): Selenocysteine
  MOD_RES (257)..(257): Selenocysteine
  MOD_RES (288)..(288): Selenocysteine
  MOD_RES (298)..(298): Selenocysteine
  MOD_RES (318)..(318): Selenocysteine
  MOD_RES (341)..(341): Selenocysteine
  MOD_RES (346)..(346): Selenocysteine
  MOD_RES (364)..(364): Selenocysteine
  MOD_RES (399)..(399): Selenocysteine
  MOD_RES (419)..(419): Selenocysteine
  MOD_RES (430)..(430): Selenocysteine
  MOD_RES (442)..(442): Selenocysteine
  MOD_RES (485)..(485): Selenocysteine
  MOD_RES (506)..(506): Selenocysteine
  MOD_RES (510)..(510): Selenocysteine
  MOD_RES (512)..(512): Selenocysteine
  MOD_RES (579)..(579): Selenocysteine
  MOD_RES (581)..(581): Selenocysteine
  MOD_RES (587)..(587): Selenocysteine
  MOD_RES (636)..(636): Selenocysteine
  MOD_RES (644)..(644): Selenocysteine
  MOD_RES (664)..(664): Selenocysteine
  MOD_RES (672)..(672): Selenocysteine
  MOD_RES (687)..(687): Selenocysteine
  MOD_RES (699)..(699): Selenocysteine
  MOD_RES (720)..(720): Selenocysteine
  MOD_RES (743)..(743): Selenocysteine
  MOD_RES (747)..(748): Selenocysteine
  MOD_RES (824)..(824): Selenocysteine
  MOD_RES (862)..(863): Selenocysteine
  MOD_RES (927)..(927): Selenocysteine
  MOD_RES (978)..(978): Selenocysteine
MSPPLCPLLLLAVGLRLAGXLNPSDPNXCSFWESFXXXXKESHSRPFSLLPSEPCERPWEGPHXCPQPXVVYRXVYRQVVKXDHRQRLQCCHGFYESRGFCVPLCAQECVHGRCVAPNQCQCVPGWRGDDCSSECAPGMWGPQCDKPCSCGNNSSCDPKSGVCSCPSGLQPPNCLQPCXPGYYGPACQFRCQCHGAPCDPQXGACFCPAERXGPSCDVSCSQGXSGFFCPSXHSCQNGGVFQXPQGSCSCPPGWMGXICSLPCPEGFHGPNCSQECRCHNGGLCDRFXGQCRCAPGYXGDRCREECPVGRFGQDCAEXCDCAPDARCFPANGACLCEHGFXGDRCXDRLCPDGFYGLSCQAPCXCDREHSLSCHPMNGECSCLPGWAGLHCNESCPQDXHGPGCQEHCLCLHGGVCQAXSGLCQCAPGYXGPHCASLCPPDXYGVNCSARCSCENAIACSPIDGECVCKEGWQRGNCSVPCPPGXWGFSCNASCQCAHEAVCSPQXGACXCXPGWHGAHCQLPCPKGQFGEGCASRCDCDHSDGCDPVHGRCQCQAGWMGARCHLSCPEGLWGVNCSNXCXCKNGGXCLPENGNCVCAPGFRGPSCQRSCQPGRYGKRCVPCKCANHSFCHPSNGXCYCLAGWXGPDCSQPCPPGHWGENCAQXCQCHHGGXCHPQDGSCICPLGWXGHHCLEGCPLGXFGANCSQPCQCGPGEKCHPEXGACVCPPGHSGAPCRIGIQEPFXVMPXXPVAYNSLGAVIGIAVLGSLVVALVALFIGYRHWQKGKEHHHLAVAYSSGRLDGSEYVMPDVPPSYSHYYSNPSYHXLSQCSPNPPPPNKVPGPLFASLQNPERPGGAQGHDNHXXLPADWKHRREPPPGPLDRGSSRLDRSYSYSYSNGPGPFYNKGLISEEELGASVASLSSENPYAXIRDLPSLPGGPRESSYMEMKGPPSGSPPRQPPQFWDSQRRRQPQPQRDSGXYEQPSPLIHDRDSVGSQPPLPPGLPPGHYDSPKNSHIPGHYDLPPVRHPPSPPLRRQDR

SEQ ID NO: 19835 - protein, 135 aa, Homo sapiens
  MOD_RES (10)..(10): Selenocysteine
  MOD_RES (18)..(18): Selenocysteine
  MOD_RES (33)..(33): Selenocysteine
  MOD_RES (46)..(46): Selenocysteine
  MOD_RES (54)..(54): Selenocysteine
  MOD_RES (63)..(64): Selenocysteine
  MOD_RES (91)..(91): Selenocysteine
  MOD_RES (106)..(106): Selenocysteine
  MOD_RES (110)..(110): Selenocysteine
  MOD_RES (119)..(120): Selenocysteine
MQPRWAQGAXMWLGVLLXLLLCSSLEGQENSFXINSVDMKSLPDWXVQNGKNLXLQCFADVSXXSHVKPQHQMLFYKDDVLFYNISSMKSXESYFIPEVRIYDSGXYKCXVIVNNKEKXXAEYQVLVEGVPSPRV

SEQ ID NO: 19836 - protein, 230 aa, Homo sapiens
  MOD_RES (10)..(10): Selenocysteine
  MOD_RES (18)..(18): Selenocysteine
  MOD_RES (33)..(33): Selenocysteine
  MOD_RES (46)..(46): Selenocysteine
  MOD_RES (54)..(54): Selenocysteine
  MOD_RES (63)..(64): Selenocysteine
  MOD_RES (91)..(91): Selenocysteine
  MOD_RES (106)..(106): Selenocysteine
  MOD_RES (110)..(110): Selenocysteine
  MOD_RES (119)..(120): Selenocysteine
  MOD_RES (136)..(136): Selenocysteine
  MOD_RES (164)..(164): Selenocysteine
  MOD_RES (218)..(218): Selenocysteine
  MOD_RES (222)..(222): Selenocysteine
  MOD_RES (228)..(228): Selenocysteine
  MOD_RES (230)..(230): Selenocysteine
MQPRWAQGAXMWLGVLLXLLLCSSLEGQENSFXINSVDMKSLPDWXVQNGKNLXLQCFADVSXXSHVKPQHQMLFYKDDVLFYNISSMKSXESYFIPEVRIYDSGXYKCXVIVNNKEKXXAEYQVLVEGVPSPRVXLDKKEAIQGGIVRVNCSVPEEKAPIHFXIEKLELNEKMVKLKREKNSRDQNFVILEFPVEEQDRVLSFRCQARIISGIHMQXSESXKSELVXVX

SEQ ID NO: 19837 - protein, 738 aa, Homo sapiens
  MOD_RES (10)..(10): Selenocysteine
  MOD_RES (18)..(18): Selenocysteine
  MOD_RES (33)..(33): Selenocysteine
  MOD_RES (46)..(46): Selenocysteine
  MOD_RES (54)..(54): Selenocysteine
  MOD_RES (63)..(64): Selenocysteine
  MOD_RES (91)..(91): Selenocysteine
  MOD_RES (106)..(106): Selenocysteine
  MOD_RES (110)..(110): Selenocysteine
  MOD_RES (119)..(120): Selenocysteine
  MOD_RES (136)..(136): Selenocysteine
  MOD_RES (164)..(164): Selenocysteine
  MOD_RES (218)..(218): Selenocysteine
  MOD_RES (222)..(222): Selenocysteine
  MOD_RES (228)..(228): Selenocysteine
  MOD_RES (230)..(230): Selenocysteine
  MOD_RES (235)..(235): Selenocysteine
  MOD_RES (243)..(243): Selenocysteine
  MOD_RES (257)..(257): Selenocysteine
  MOD_RES (261)..(261): Selenocysteine
  MOD_RES (303)..(303): Selenocysteine
  MOD_RES (322)..(322): Selenocysteine
  MOD_RES (335)..(335): Selenocysteine
  MOD_RES (358)..(358): Selenocysteine
  MOD_RES (364)..(364): Selenocysteine
  MOD_RES (369)..(369): Selenocysteine
  MOD_RES (373)..(373): Selenocysteine
  MOD_RES (383)..(383): Selenocysteine
  MOD_RES (387)..(387): Selenocysteine
  MOD_RES (399)..(399): Selenocysteine
  MOD_RES (426)..(426): Selenocysteine
  MOD_RES (437)..(437): Selenocysteine
  MOD_RES (447)..(447): Selenocysteine
  MOD_RES (455)..(455): Selenocysteine
  MOD_RES (469)..(469): Selenocysteine
  MOD_RES (533)..(533): Selenocysteine
  MOD_RES (549)..(549): Selenocysteine
  MOD_RES (553)..(553): Selenocysteine
  MOD_RES (558)..(558): Selenocysteine
  MOD_RES (573)..(573): Selenocysteine
  MOD_RES (591)..(591): Selenocysteine
  MOD_RES (691)..(691): Selenocysteine
  MOD_RES (709)..(709): Selenocysteine
  MOD_RES (711)..(711): Selenocysteine
  MOD_RES (731)..(731): Selenocysteine
  MOD_RES (738)..(738): Selenocysteine
MQPRWAQGAXMWLGVLLXLLLCSSLEGQENSFXINSVDMKSLPDWXVQNGKNLXLQCFADVSXXSHVKPQHQMLFYKDDVLFYNISSMKSXESYFIPEVRIYDSGXYKCXVIVNNKEKXXAEYQVLVEGVPSPRVXLDKKEAIQGGIVRVNCSVPEEKAPIHFXIEKLELNEKMVKLKREKNSRDQNFVILEFPVEEQDRVLSFRCQARIISGIHMQXSESXKSELVXVXESFSXPKFHISPXGMIMEGAQLHIKCXIQVXHLAQEFPEIIIQKDKAIVAHNRHGNKAVYSVMAMVEHSGNYXCKVESSRISKVSSIVVNIXELFSKPELESSFXHLDQGERLNLSCSIPGAPPANFXIQKEDXIVSQXQDFXKIASKSDSGXYICXAGIDKVVKKSNXVQIVVCEMLSQPRISYDAQFEVIKGQXIEVRCESISGXLPISYQLLKXSKVLENSXKNSNDPAVFKDNPXEDVEYQCVADNCHSHAKMLSEVLRVKVIAPVDEVQISILSSKVVESGEDIVLQCAVNEGSGPIXYKFYREKEGKPFYQMXSNAXQAFWXKQKASKEQEGEYYCXAFNRANHASSVPRSKILXVRVILAPWKKGLIAVVIIGVIIALLIIAAKCYFLRKAKAKQMPVEMSRPAVPLLNSNNEKMSDPNMEANSHYGHNDDVRNHAMKPINDNKEPLNSDVQYXEVQVSSAESHKDLGKKDXEXVYSEVRKAVPDAVESRYSRXEGSLDGX

SEQ ID NO: 19838 - protein, 184 aa, Homo sapiens
  MOD_RES (28)..(28): Selenocysteine
  MOD_RES (41)..(41): Selenocysteine
  MOD_RES (49)..(49): Selenocysteine
  MOD_RES (58)..(59): Selenocysteine
  MOD_RES (86)..(86): Selenocysteine
  MOD_RES (101)..(101): Selenocysteine
  MOD_RES (105)..(105): Selenocysteine
  MOD_RES (114)..(115): Selenocysteine
  MOD_RES (131)..(131): Selenocysteine
  MOD_RES (159)..(159): Selenocysteine
MSIEASGINMFLMFLAGSSLEGQENSFXINSVDMKSLPDWXVQNGKNLXLQCFADVSXXSHVKPQHQMLFYKDDVLFYNISSMKSXESYFIPEVRIYDSGXYKCXVIVNNKEKXXAEYQVLVEGVPSPRVXLDKKEAIQGGIVRVNCSVPEEKAPIHFXIEKLELNEKMVKLKREKNSRDQNFV

SEQ ID NO: 19839 - protein, 359 aa, Homo sapiens
  MOD_RES (25)..(25): Selenocysteine
  MOD_RES (36)..(36): Selenocysteine
  MOD_RES (72)..(72): Selenocysteine
  MOD_RES (76)..(77): Selenocysteine
  MOD_RES (85)..(85): Selenocysteine
  MOD_RES (142)..(142): Selenocysteine
  MOD_RES (156)..(156): Selenocysteine
  MOD_RES (160)..(160): Selenocysteine
  MOD_RES (305)..(305): Selenocysteine
  MOD_RES (316)..(316): Selenocysteine
  MOD_RES (334)..(334): Selenocysteine
LGPDCPPPPPPPPPNNNNNNNSKHXGHKSACVPNMXERRRDELSEEINNLREKVMKQSEENNNLQSQVQKLXEENXXLREQVEPXPEDEDDDIELRGAAAAAAPPPPIEEECPEDLPEKFDGNPDMLAPFMAQCQIFMEKSXRDFSVDRVRVCFVXSMMXGRAARWASAKLERSHYLMHNYPAFMMEMKHVFEDPQRREVAKRKIRRLRQGMGSVIDYSNAFQMIAQDLDWNEPALIDQYHEGLSDHIQEELSHLEVAKSLSALIGQCIHIERRLARAAAARKPRSPPRALVLPHIASHHQVDPXEPVGGARMRLXQEEKERRRKLNLCLYCGXGGHYADNCPAKASKSSPAGNSPAPL

SEQ ID NO: 19840 - protein, 741 aa, Homo sapiens
  MOD_RES (25)..(25): Selenocysteine
  MOD_RES (36)..(36): Selenocysteine
  MOD_RES (72)..(72): Selenocysteine
  MOD_RES (76)..(77): Selenocysteine
  MOD_RES (85)..(85): Selenocysteine
  MOD_RES (142)..(142): Selenocysteine
  MOD_RES (156)..(156): Selenocysteine
  MOD_RES (160)..(160): Selenocysteine
  MOD_RES (305)..(305): Selenocysteine
  MOD_RES (316)..(316): Selenocysteine
  MOD_RES (334)..(334): Selenocysteine
  MOD_RES (365)..(365): Selenocysteine
  MOD_RES (395)..(395): Selenocysteine
  MOD_RES (449)..(449): Selenocysteine
  MOD_RES (468)..(468): Selenocysteine
  MOD_RES (484)..(484): Selenocysteine
  MOD_RES (490)..(490): Selenocysteine
  MOD_RES (493)..(493): Selenocysteine
  MOD_RES (549)..(549): Selenocysteine
  MOD_RES (605)..(605): Selenocysteine
  MOD_RES (607)..(607): Selenocysteine
  MOD_RES (637)..(637): Selenocysteine
  MOD_RES (658)..(658): Selenocysteine
  MOD_RES (660)..(660): Selenocysteine
  MOD_RES (671)..(671): Selenocysteine
  MOD_RES (674)..(674): Selenocysteine
  MOD_RES (680)..(680): Selenocysteine
  MOD_RES (706)..(706): Selenocysteine
  MOD_RES (740)..(740): Selenocysteine
LGPDCPPPPPPPPPNNNNNNNSKHXGHKSACVPNMXERRRDELSEEINNLREKVMKQSEENNNLQSQVQKLXEENXXLREQVEPXPEDEDDDIELRGAAAAAAPPPPIEEECPEDLPEKFDGNPDMLAPFMAQCQIFMEKSXRDFSVDRVRVCFVXSMMXGRAARWASAKLERSHYLMHNYPAFMMEMKHVFEDPQRREVAKRKIRRLRQGMGSVIDYSNAFQMIAQDLDWNEPALIDQYHEGLSDHIQEELSHLEVAKSLSALIGQCIHIERRLARAAAARKPRSPPRALVLPHIASHHQVDPXEPVGGARMRLXQEEKERRRKLNLCLYCGXGGHYADNCPAKASKSSPGKLPGPAVEGPSAXGPEIIRSPQDDASSPHLQVMLQIHLPGRHXLFVRAMIDSGASGNFIDHEYVAQNGIPLRIKDWPILVEAIDGRPIASGPVVHEXHDLIVDLGDHREVLSFDVXQSPFFPVVLGVRWLSXHDPNIXWSXRSIVFDSEYCRYHCRMYSPIPPSLPPPAPQPPLYYPVDGYRVYQPVRYYYVQNVYXPVDEHVYPDHRLVDPHIEMIPGAHSIPSGHVYSLSEPEMAALRDFVARNVKDGLIXPXIAPNGAQVLQVKRGWKLQVSYDCRAPNNFXIQNQYPRLSIPNLEDQAHLAXYXEFVPQIPGYQXYPXYAAYPXYPVGFAWYPVGRDGQGRSLYVPVMIXWNPHWYRQPPVPQYPPPQPPPPPPPPPPPPSYSXL

SEQ ID NO: 19841 - protein, 401 aa, Homo sapiens
  MOD_RES (9)..(9): Selenocysteine
  MOD_RES (31)..(31): Selenocysteine
  MOD_RES (38)..(38): Selenocysteine
  MOD_RES (40)..(40): Selenocysteine
  MOD_RES (42)..(42): Selenocysteine
  MOD_RES (67)..(67): Selenocysteine
  MOD_RES (78)..(78): Selenocysteine
  MOD_RES (114)..(114): Selenocysteine
  MOD_RES (118)..(119): Selenocysteine
  MOD_RES (127)..(127): Selenocysteine
  MOD_RES (184)..(184): Selenocysteine
  MOD_RES (198)..(198): Selenocysteine
  MOD_RES (202)..(202): Selenocysteine
  MOD_RES (347)..(347): Selenocysteine
  MOD_RES (358)..(358): Selenocysteine
  MOD_RES (376)..(376): Selenocysteine
MRNKRVLKXKKRRSGRGGQDPGLHPHRSEAXAGRSPPXPXVXLGPDCPPPPPPPPPNNNNNNNSKHXGHKSACVPNMXERRRDELSEEINNLREKVMKQSEENNNLQSQVQKLXEENXXLREQVEPXPEDEDDDIELRGAAAAAAPPPPIEEECPEDLPEKFDGNPDMLAPFMAQCQIFMEKSXRDFSVDRVRVCFVXSMMXGRAARWASAKLERSHYLMHNYPAFMMEMKHVFEDPQRREVAKRKIRRLRQGMGSVIDYSNAFQMIAQDLDWNEPALIDQYHEGLSDHIQEELSHLEVAKSLSALIGQCIHIERRLARAAAARKPRSPPRALVLPHIASHHQVDPXEPVGGARMRLXQEEKERRRKLNLCLYCGXGGHYADNCPAKASKSSPAGNSPAPL

SEQ ID NO: 19842 - protein, 783 aa, Homo sapiens
  MOD_RES (9)..(9): Selenocysteine
  MOD_RES (31)..(31): Selenocysteine
  MOD_RES (38)..(38): Selenocysteine
  MOD_RES (40)..(40): Selenocysteine
  MOD_RES (42)..(42): Selenocysteine
  MOD_RES (67)..(67): Selenocysteine
  MOD_RES (78)..(78): Selenocysteine
  MOD_RES (114)..(114): Selenocysteine
  MOD_RES (118)..(119): Selenocysteine
  MOD_RES (127)..(127): Selenocysteine
  MOD_RES (184)..(184): Selenocysteine
  MOD_RES (198)..(198): Selenocysteine
  MOD_RES (202)..(202): Selenocysteine
  MOD_RES (347)..(347): Selenocysteine
  MOD_RES (358)..(358): Selenocysteine
  MOD_RES (376)..(376): Selenocysteine
  MOD_RES (407)..(407): Selenocysteine
  MOD_RES (437)..(437): Selenocysteine
  MOD_RES (491)..(491): Selenocysteine
  MOD_RES (510)..(510): Selenocysteine
  MOD_RES (526)..(526): Selenocysteine
  MOD_RES (532)..(532): Selenocysteine
  MOD_RES (535)..(535): Selenocysteine
  MOD_RES (591)..(591): Selenocysteine
  MOD_RES (647)..(647): Selenocysteine
  MOD_RES (649)..(649): Selenocysteine
  MOD_RES (679)..(679): Selenocysteine
  MOD_RES (700)..(700): Selenocysteine
  MOD_RES (702)..(702): Selenocysteine
  MOD_RES (713)..(713): Selenocysteine
  MOD_RES (716)..(716): Selenocysteine
  MOD_RES (722)..(722): Selenocysteine
  MOD_RES (748)..(748): Selenocysteine
  MOD_RES (782)..(782): Selenocysteine
MRNKRVLKXKKRRSGRGGQDPGLHPHRSEAXAGRSPPXPXVXLGPDCPPPPPPPPPNNNNNNNSKHXGHKSACVPNMXERRRDELSEEINNLREKVMKQSEENNNLQSQVQKLXEENXXLREQVEPXPEDEDDDIELRGAAAAAAPPPPIEEECPEDLPEKFDGNPDMLAPFMAQCQIFMEKSXRDFSVDRVRVCFVXSMMXGRAARWASAKLERSHYLMHNYPAFMMEMKHVFEDPQRREVAKRKIRRLRQGMGSVIDYSNAFQMIAQDLDWNEPALIDQYHEGLSDHIQEELSHLEVAKSLSALIGQCIHIERRLARAAAARKPRSPPRALVLPHIASHHQVDPXEPVGGARMRLXQEEKERRRKLNLCLYCGXGGHYADNCPAKASKSSPGKLPGPAVEGPSAXGPEIIRSPQDDASSPHLQVMLQIHLPGRHXLFVRAMIDSGASGNFIDHEYVAQNGIPLRIKDWPILVEAIDGRPIASGPVVHEXHDLIVDLGDHREVLSFDVXQSPFFPVVLGVRWLSXHDPNIXWSXRSIVFDSEYCRYHCRMYSPIPPSLPPPAPQPPLYYPVDGYRVYQPVRYYYVQNVYXPVDEHVYPDHRLVDPHIEMIPGAHSIPSGHVYSLSEPEMAALRDFVARNVKDGLIXPXIAPNGAQVLQVKRGWKLQVSYDCRAPNNFXIQNQYPRLSIPNLEDQAHLAXYXEFVPQIPGYQXYPXYAAYPXYPVGFAWYPVGRDGQGRSLYVPVMIXWNPHWYRQPPVPQYPPPQPPPPPPPPPPPPSYSXL

SEQ ID NO: 19843 - protein, 31 aa, Homo sapiens
  MOD_RES (2)..(2): Selenocysteine
MXERRRDELSEEINNLREKVMKQSEENNNLQ

SEQ ID NO: 19844 - protein, 325 aa, Homo sapiens
  MOD_RES (2)..(2): Selenocysteine
  MOD_RES (38)..(38): Selenocysteine
  MOD_RES (42)..(43): Selenocysteine
  MOD_RES (51)..(51): Selenocysteine
  MOD_RES (108)..(108): Selenocysteine
  MOD_RES (122)..(122): Selenocysteine
  MOD_RES (126)..(126): Selenocysteine
  MOD_RES (271)..(271): Selenocysteine
  MOD_RES (282)..(282): Selenocysteine
  MOD_RES (300)..(300): Selenocysteine
MXERRRDELSEEINNLREKVMKQSEENNNLQSQVQKLXEENXXLREQVEPXPEDEDDDIELRGAAAAAAPPPPIEEECPEDLPEKFDGNPDMLAPFMAQCQIFMEKSXRDFSVDRVRVCFVXSMMXGRAARWASAKLERSHYLMHNYPAFMMEMKHVFEDPQRREVAKRKIRRLRQGMGSVIDYSNAFQMIAQDLDWNEPALIDQYHEGLSDHIQEELSHLEVAKSLSALIGQCIHIERRLARAAAARKPRSPPRALVLPHIASHHQVDPXEPVGGARMRLXQEEKERRRKLNLCLYCGXGGHYADNCPAKASKSSPAGNSPAPL

SEQ ID NO: 19845 - protein, 707 aa, Homo sapiens
  MOD_RES (2)..(2): Selenocysteine
  MOD_RES (38)..(38): Selenocysteine
  MOD_RES (42)..(43): Selenocysteine
  MOD_RES (51)..(51): Selenocysteine
  MOD_RES (108)..(108): Selenocysteine
  MOD_RES (122)..(122): Selenocysteine
  MOD_RES (126)..(126): Selenocysteine
  MOD_RES (271)..(271): Selenocysteine
  MOD_RES (282)..(282): Selenocysteine
  MOD_RES (300)..(300): Selenocysteine
  MOD_RES (331)..(331): Selenocysteine
  MOD_RES (361)..(361): Selenocysteine
  MOD_RES (415)..(415): Selenocysteine
  MOD_RES (434)..(434): Selenocysteine
  MOD_RES (450)..(450): Selenocysteine
  MOD_RES (456)..(456): Selenocysteine
  MOD_RES (459)..(459): Selenocysteine
  MOD_RES (515)..(515): Selenocysteine
  MOD_RES (571)..(571): Selenocysteine
  MOD_RES (573)..(573): Selenocysteine
  MOD_RES (603)..(603): Selenocysteine
  MOD_RES (624)..(624): Selenocysteine
  MOD_RES (626)..(626): Selenocysteine
  MOD_RES (637)..(637): Selenocysteine
  MOD_RES (640)..(640): Selenocysteine
  MOD_RES (646)..(646): Selenocysteine
  MOD_RES (672)..(672): Selenocysteine
  MOD_RES (706)..(706): Selenocysteine
MXERRRDELSEEINNLREKVMKQSEENNNLQSQVQKLXEENXXLREQVEPXPEDEDDDIELRGAAAAAAPPPPIEEECPEDLPEKFDGNPDMLAPFMAQCQIFMEKSXRDFSVDRVRVCFVXSMMXGRAARWASAKLERSHYLMHNYPAFMMEMKHVFEDPQRREVAKRKIRRLRQGMGSVIDYSNAFQMIAQDLDWNEPALIDQYHEGLSDHIQEELSHLEVAKSLSALIGQCIHIERRLARAAAARKPRSPPRALVLPHIASHHQVDPXEPVGGARMRLXQEEKERRRKLNLCLYCGXGGHYADNCPAKASKSSPGKLPGPAVEGPSAXGPEIIRSPQDDASSPHLQVMLQIHLPGRHXLFVRAMIDSGASGNFIDHEYVAQNGIPLRIKDWPILVEAIDGRPIASGPVVHEXHDLIVDLGDHREVLSFDVXQSPFFPVVLGVRWLSXHDPNIXWSXRSIVFDSEYCRYHCRMYSPIPPSLPPPAPQPPLYYPVDGYRVYQPVRYYYVQNVYXPVDEHVYPDHRLVDPHIEMIPGAHSIPSGHVYSLSEPEMAALRDFVARNVKDGLIXPXIAPNGAQVLQVKRGWKLQVSYDCRAPNNFXIQNQYPRLSIPNLEDQAHLAXYXEFVPQIPGYQXYPXYAAYPXYPVGFAWYPVGRDGQGRSLYVPVMIXWNPHWYRQPPVPQYPPPQPPPPPPPPPPPPSYSXL

SEQ ID NO: 19846 - protein, 36 aa, Homo sapiens
  MOD_RES (10)..(10): Selenocysteine
  MOD_RES (28)..(28): Selenocysteine
MLPPKHLSAXKPKKSWAPNLYELDSDLXKEPDVIIG

SEQ ID NO: 19847 - protein, 1588 aa, Homo sapiens
  MOD_RES (10)..(10): Selenocysteine
  MOD_RES (28)..(28): Selenocysteine
  MOD_RES (40)..(40): Selenocysteine
  MOD_RES (63)..(63): Selenocysteine
  MOD_RES (79)..(79): Selenocysteine
  MOD_RES (81)..(81): Selenocysteine
  MOD_RES (96)..(96): Selenocysteine
  MOD_RES (119)..(119): Selenocysteine
  MOD_RES (139)..(139): Selenocysteine
  MOD_RES (145)..(145): Selenocysteine
  MOD_RES (183)..(183): Selenocysteine
  MOD_RES (203)..(203): Selenocysteine
  MOD_RES (243)..(243): Selenocysteine
  MOD_RES (270)..(270): Selenocysteine
  MOD_RES (285)..(285): Selenocysteine
  MOD_RES (291)..(291): Selenocysteine
  MOD_RES (299)..(299): Selenocysteine
  MOD_RES (380)..(380): Selenocysteine
  MOD_RES (398)..(398): Selenocysteine
  MOD_RES (440)..(440): Selenocysteine
  MOD_RES (475)..(475): Selenocysteine
  MOD_RES (513)..(513): Selenocysteine
  MOD_RES (549)..(549): Selenocysteine
  MOD_RES (571)..(571): Selenocysteine
  MOD_RES (607)..(607): Selenocysteine
  MOD_RES (635)..(635): Selenocysteine
  MOD_RES (650)..(650): Selenocysteine
  MOD_RES (665)..(665): Selenocysteine
  MOD_RES (678)..(678): Selenocysteine
  MOD_RES (688)..(688): Selenocysteine
  MOD_RES (729)..(729): Selenocysteine
  MOD_RES (736)..(736): Selenocysteine
  MOD_RES (738)..(738): Selenocysteine
  MOD_RES (751)..(751): Selenocysteine
  MOD_RES (764)..(764): Selenocysteine
  MOD_RES (806)..(806): Selenocysteine
  MOD_RES (824)..(824): Selenocysteine
  MOD_RES (949)..(949): Selenocysteine
  MOD_RES (961)..(961): Selenocysteine
  MOD_RES (985)..(985): Selenocysteine
  MOD_RES (1013)..(1013): Selenocysteine
  MOD_RES (1017)..(1017): Selenocysteine
  MOD_RES (1042)..(1042): Selenocysteine
  MOD_RES (1048)..(1048): Selenocysteine
  MOD_RES (1068)..(1068): Selenocysteine
  MOD_RES (1073)..(1073): Selenocysteine
  MOD_RES (1078)..(1078): Selenocysteine
  MOD_RES (1083)..(1083): Selenocysteine
  MOD_RES (1120)..(1120): Selenocysteine
  MOD_RES (1123)..(1123): Selenocysteine
  MOD_RES (1141)..(1141): Selenocysteine
  MOD_RES (1147)..(1147): Selenocysteine
  MOD_RES (1158)..(1158): Selenocysteine
  MOD_RES (1270)..(1270): Selenocysteine
  MOD_RES (1277)..(1277): Selenocysteine
  MOD_RES (1302)..(1302): Selenocysteine
  MOD_RES (1316)..(1316): Selenocysteine
  MOD_RES (1318)..(1318): Selenocysteine
  MOD_RES (1322)..(1322): Selenocysteine
  MOD_RES (1345)..(1345): Selenocysteine
  MOD_RES (1348)..(1348): Selenocysteine
  MOD_RES (1511)..(1511): Selenocysteine
  MOD_RES (1513)..(1513): Selenocysteine
  MOD_RES (1515)..(1515): Selenocysteine
  MOD_RES (1518)..(1518): Selenocysteine
  MOD_RES (1526)..(1526): Selenocysteine
  MOD_RES (1551)..(1551): Selenocysteine
  MOD_RES (1553)..(1553): Selenocysteine
  MOD_RES (1585)..(1585): Selenocysteine
  MOD_RES (1587)..(1587): Selenocysteine
MLPPKHLSAXKPKKSWAPNLYELDSDLXKEPDVIIGEGPXDSEFFHQRFRNLIYVEFVGPRKXLIKLRNLCLDWLQPEXRXKEEIIELLVLEQYLXIIPEKLKPWVRAKKPENCEKLVXLLENYKEMYQPEDDNNSDVXSDDDMXRNRRESSPPHSVHSFSDRDWDRRGRSRDMEPRDRWSHXRNPRSRMPPRDLSLPVVAKXSFEMDREDDRDSRAYESRSQDAESYQNVVDLAEDRKPHNXIQDNMENYRKLLSLVQLAEDDGHSHMXQGHSSRSKRSAYPSXSRGLKXMPEAKKSXHRRGICEDESSHGVIMEKFIKDVSRSSKSGRARESSDRSQRFPRMSDDNWKDISLNKRESVIQQRVYEGNAFRGGFRFNSXLVSRKRVLERKRRYHFDXDGKGSIHDQKGCPRKKPFECGSEMRKAMSVSSLSSLSSPSFXESQPIDFGAMPYVCDECGRSFSVISEFVEHQIMHXRENLYEYGESFIHSVAVSEVQKSQVGGKRFECKDCGEXFNKSAALAEHRKIHARGYLVECKNQECEEAFMPSPXFSELQKIYGKDKFYECRVCKEXFLHSSALIEHQKIHFGDDKDNEREHERERERERGEXFRPSPALNEFQKMYGKEKMYECKVCGEXFLHSSSLKEHQKIHXRGNPFENKGKVCEEXFIPGQSLKRRQKXYNKEKLCDFXDGRDAFMQSSELSEHQKIHSRKNLFEGRGYEKSVIHSGPFXESQKSHXIXRPLESDEDEKAFXISSNPYENQKIPXKENVYEAKSYERSVIHSLASVEAQKSHSVAGPSKPKVMAESXIQSFDAINHQRVRAGGNXSEGREYSRSVIHSLVASKPPRSHNGNELVESNEKGESSIYISDLNDKRQKIPARENPCEGGSKNRNYEDSVIQSVFRAKPQKSVPGEGSGEFKKDGEFSVPSSNVREYQKARAKKKYIEHRSNEXSVIHSLPFGEQXFRPRGMLYECQECGECFAHSSDLXEHQKIHDREKPSGSRNYEWSVIRSLAPXDPQXSYAQEQYAKEQARNKCKDFRQFFAXSEDLNXNQKIYDQEKSHGEESQGENXDGEEXHSEEXHGQEXIEDPVIQGSDMEDPQKDDPDDKIYECEDCGLGFVDLXDLXDHQKVHSRKCLVDSREYXHSVIHXHSISEYQRDYXGEQLYECPKCGESFIHSSFLFEHQRIHEQDQLYSMKGCDDGFIALLPMKPRRNRAAERNPALAGSAIRCLLCGQGFIHSSALNEHMRLHREDDLLEQSQMAEEAIIPGLALXEFQRSQXEERLFECAVCGESFVNPAELADHVXVHKNEPYEYGSSYXHXSFLXEPLKGAIPFYECKDCGKSFIHSXVLXKHKELHLEEEEEDEAAAAAAAAAQEVEANVHVPQVVLRIQGLNVEAAEPEVEAAEPEVEAAEPEVEAAEPNGEAEGPDGEAAEPIGEAGQPNGEAEQPNGDADEPDGAGIEDPEERAEEPEGKAEEPEGDADEPDGVGIEDPEEGEDQEIQVEEPYYDCHECXEXFXSSXAFSEHLKXHASMIIFEPANAFGECSGYIERASXSXGGANQADEKYFKCDVCGQLFNDRLSLARHQNXHXG

SEQ ID NO: 19848 - protein, 1462 aa, Homo sapiens
  MOD_RES (13)..(13): Selenocysteine
  MOD_RES (19)..(19): Selenocysteine
  MOD_RES (57)..(57): Selenocysteine
  MOD_RES (77)..(77): Selenocysteine
  MOD_RES (117)..(117): Selenocysteine
  MOD_RES (144)..(144): Selenocysteine
  MOD_RES (159)..(159): Selenocysteine
  MOD_RES (165)..(165): Selenocysteine
  MOD_RES (173)..(173): Selenocysteine
  MOD_RES (254)..(254): Selenocysteine
  MOD_RES (272)..(272): Selenocysteine
  MOD_RES (314)..(314): Selenocysteine
  MOD_RES (349)..(349): Selenocysteine
  MOD_RES (387)..(387): Selenocysteine
  MOD_RES (423)..(423): Selenocysteine
  MOD_RES (445)..(445): Selenocysteine
  MOD_RES (481)..(481): Selenocysteine
  MOD_RES (509)..(509): Selenocysteine
  MOD_RES (524)..(524): Selenocysteine
  MOD_RES (539)..(539): Selenocysteine
  MOD_RES (552)..(552): Selenocysteine
  MOD_RES (562)..(562): Selenocysteine
  MOD_RES (603)..(603): Selenocysteine
  MOD_RES (610)..(610): Selenocysteine
  MOD_RES (612)..(612): Selenocysteine
  MOD_RES (625)..(625): Selenocysteine
  MOD_RES (638)..(638): Selenocysteine
  MOD_RES (680)..(680): Selenocysteine
  MOD_RES (698)..(698): Selenocysteine
  MOD_RES (823)..(823): Selenocysteine
  MOD_RES (835)..(835): Selenocysteine
  MOD_RES (859)..(859): Selenocysteine
  MOD_RES (887)..(887): Selenocysteine
  MOD_RES (891)..(891): Selenocysteine
  MOD_RES (916)..(916): Selenocysteine
  MOD_RES (922)..(922): Selenocysteine
  MOD_RES (942)..(942): Selenocysteine
  MOD_RES (947)..(947): Selenocysteine
  MOD_RES (952)..(952): Selenocysteine
  MOD_RES (957)..(957): Selenocysteine
  MOD_RES (994)..(994): Selenocysteine
  MOD_RES (997)..(997): Selenocysteine
  MOD_RES (1015)..(1015): Selenocysteine
  MOD_RES (1021)..(1021): Selenocysteine
  MOD_RES (1032)..(1032): Selenocysteine
  MOD_RES (1144)..(1144): Selenocysteine
  MOD_RES (1151)..(1151): Selenocysteine
  MOD_RES (1176)..(1176): Selenocysteine
  MOD_RES (1190)..(1190): Selenocysteine
  MOD_RES (1192)..(1192): Selenocysteine
  MOD_RES (1196)..(1196): Selenocysteine
  MOD_RES (1219)..(1219): Selenocysteine
  MOD_RES (1222)..(1222): Selenocysteine
  MOD_RES (1385)..(1385): Selenocysteine
  MOD_RES (1387)..(1387): Selenocysteine
  MOD_RES (1389)..(1389): Selenocysteine
  MOD_RES (1392)..(1392): Selenocysteine
  MOD_RES (1400)..(1400): Selenocysteine
  MOD_RES (1425)..(1425): Selenocysteine
  MOD_RES (1427)..(1427): Selenocysteine
  MOD_RES (1459)..(1459): Selenocysteine
  MOD_RES (1461)..(1461): Selenocysteine
MYQPEDDNNSDVXSDDDMXRNRRESSPPHSVHSFSDRDWDRRGRSRDMEPRDRWSHXRNPRSRMPPRDLSLPVVAKXSFEMDREDDRDSRAYESRSQDAESYQNVVDLAEDRKPHNXIQDNMENYRKLLSLVQLAEDDGHSHMXQGHSSRSKRSAYPSXSRGLKXMPEAKKSXHRRGICEDESSHGVIMEKFIKDVSRSSKSGRARESSDRSQRFPRMSDDNWKDISLNKRESVIQQRVYEGNAFRGGFRFNSXLVSRKRVLERKRRYHFDXDGKGSIHDQKGCPRKKPFECGSEMRKAMSVSSLSSLSSPSFXESQPIDFGAMPYVCDECGRSFSVISEFVEHQIMHXRENLYEYGESFIHSVAVSEVQKSQVGGKRFECKDCGEXFNKSAALAEHRKIHARGYLVECKNQECEEAFMPSPXFSELQKIYGKDKFYECRVCKEXFLHSSALIEHQKIHFGDDKDNEREHERERERERGEXFRPSPALNEFQKMYGKEKMYECKVCGEXFLHSSSLKEHQKIHXRGNPFENKGKVCEEXFIPGQSLKRRQKXYNKEKLCDFXDGRDAFMQSSELSEHQKIHSRKNLFEGRGYEKSVIHSGPFXESQKSHXIXRPLESDEDEKAFXISSNPYENQKIPXKENVYEAKSYERSVIHSLASVEAQKSHSVAGPSKPKVMAESXIQSFDAINHQRVRAGGNXSEGREYSRSVIHSLVASKPPRSHNGNELVESNEKGESSIYISDLNDKRQKIPARENPCEGGSKNRNYEDSVIQSVFRAKPQKSVPGEGSGEFKKDGEFSVPSSNVREYQKARAKKKYIEHRSNEXSVIHSLPFGEQXFRPRGMLYECQECGECFAHSSDLXEHQKIHDREKPSGSRNYEWSVIRSLAPXDPQXSYAQEQYAKEQARNKCKDFRQFFAXSEDLNXNQKIYDQEKSHGEESQGENXDGEEXHSEEXHGQEXIEDPVIQGSDMEDPQKDDPDDKIYECEDCGLGFVDLXDLXDHQKVHSRKCLVDSREYXHSVIHXHSISEYQRDYXGEQLYECPKCGESFIHSSFLFEHQRIHEQDQLYSMKGCDDGFIALLPMKPRRNRAAERNPALAGSAIRCLLCGQGFIHSSALNEHMRLHREDDLLEQSQMAEEAIIPGLALXEFQRSQXEERLFECAVCGESFVNPAELADHVXVHKNEPYEYGSSYXHXSFLXEPLKGAIPFYECKDCGKSFIHSXVLXKHKELHLEEEEEDEAAAAAAAAAQEVEANVHVPQVVLRIQGLNVEAAEPEVEAAEPEVEAAEPEVEAAEPNGEAEGPDGEAAEPIGEAGQPNGEAEQPNGDADEPDGAGIEDPEERAEEPEGKAEEPEGDADEPDGVGIEDPEEGEDQEIQVEEPYYDCHECXEXFXSSXAFSEHLKXHASMIIFEPANAFGECSGYIERASXSXGGANQADEKYFKCDVCGQLFNDRLSLARHQNXHXG

SEQ ID NO: 19849 - protein, 395 aa, Homo sapiens
  MOD_RES (13)..(13): Selenocysteine
  MOD_RES (19)..(19): Selenocysteine
  MOD_RES (58)..(58): Selenocysteine
  MOD_RES (78)..(78): Selenocysteine
  MOD_RES (118)..(118): Selenocysteine
  MOD_RES (136)..(136): Selenocysteine
  MOD_RES (144)..(144): Selenocysteine
  MOD_RES (225)..(225): Selenocysteine
  MOD_RES (243)..(243): Selenocysteine
  MOD_RES (285)..(285): Selenocysteine
  MOD_RES (320)..(320): Selenocysteine
  MOD_RES (358)..(358): Selenocysteine
  MOD_RES (394)..(394): Selenocysteine
MYQPEDDNNSDVXSDDDMXRNRRESSPPHSVHSFSGDRDWDRRGRSRDMEPRDRWSHXRNPRSRMPPRDLSLPVVAKXSFEMDREDDRDSRAYESRSQDAESYQNVVDLAEDRKPHNXIQDNMENYRKLLSLGLKXMPEAKKSXHRRGICEDESSHGVIMEKFIKDVSRSSKSGRARESSDRSQRFPRMSDDNWKDISLNKRESVIQQRVYEGNAFRGGFRFNSXLVSRKRVLERKRRYHFDXDGKGSIHDQKGCPRKKPFECGSEMRKAMSVSSLSSLSSPSFXESQPIDFGAMPYVCDECGRSFSVISEFVEHQIMHXRENLYEYGESFIHSVAVSEVQKSQVGGKRFECKDCGEXFNKSAALAEHRKIHARGYLVECKNQECEEAFMPSPXF

SEQ ID NO: 19850 - protein, 1464 aa, Homo sapiens
  MOD_RES (13)..(13): Selenocysteine
  MOD_RES (19)..(19): Selenocysteine
  MOD_RES (58)..(58): Selenocysteine
  MOD_RES (78)..(78): Selenocysteine
  MOD_RES (118)..(118): Selenocysteine
  MOD_RES (146)..(146): Selenocysteine
  MOD_RES (161)..(161): Selenocysteine
  MOD_RES (167)..(167): Selenocysteine
  MOD_RES (175)..(175): Selenocysteine
  MOD_RES (256)..(256): Selenocysteine
  MOD_RES (274)..(274): Selenocysteine
  MOD_RES (316)..(316): Selenocysteine
  MOD_RES (351)..(351): Selenocysteine
  MOD_RES (389)..(389): Selenocysteine
  MOD_RES (425)..(425): Selenocysteine
  MOD_RES (447)..(447): Selenocysteine
  MOD_RES (483)..(483): Selenocysteine
  MOD_RES (511)..(511): Selenocysteine
  MOD_RES (526)..(526): Selenocysteine
  MOD_RES (541)..(541): Selenocysteine
  MOD_RES (554)..(554): Selenocysteine
  MOD_RES (564)..(564): Selenocysteine
  MOD_RES (605)..(605): Selenocysteine
  MOD_RES (612)..(612): Selenocysteine
  MOD_RES (614)..(614): Selenocysteine
  MOD_RES (627)..(627): Selenocysteine
  MOD_RES (640)..(640): Selenocysteine
  MOD_RES (682)..(682): Selenocysteine
  MOD_RES (700)..(700): Selenocysteine
  MOD_RES (825)..(825): Selenocysteine
  MOD_RES (837)..(837): Selenocysteine
  MOD_RES (861)..(861): Selenocysteine
  MOD_RES (889)..(889): Selenocysteine
  MOD_RES (893)..(893): Selenocysteine
  MOD_RES (918)..(918): Selenocysteine
  MOD_RES (924)..(924): Selenocysteine
  MOD_RES (944)..(944): Selenocysteine
  MOD_RES (949)..(949): Selenocysteine
  MOD_RES (954)..(954): Selenocysteine
  MOD_RES (959)..(959): Selenocysteine
  MOD_RES (996)..(996): Selenocysteine
  MOD_RES (999)..(999): Selenocysteine
  MOD_RES (1017)..(1017): Selenocysteine
  MOD_RES (1023)..(1023): Selenocysteine
  MOD_RES (1034)..(1034): Selenocysteine
  MOD_RES (1146)..(1146): Selenocysteine
  MOD_RES (1153)..(1153): Selenocysteine
  MOD_RES (1178)..(1178): Selenocysteine
  MOD_RES (1192)..(1192): Selenocysteine
  MOD_RES (1194)..(1194): Selenocysteine
  MOD_RES (1198)..(1198): Selenocysteine
  MOD_RES (1221)..(1221): Selenocysteine
  MOD_RES (1224)..(1224): Selenocysteine
  MOD_RES (1387)..(1387): Selenocysteine
  MOD_RES (1389)..(1389): Selenocysteine
  MOD_RES (1391)..(1391): Selenocysteine
  MOD_RES (1394)..(1394): Selenocysteine
  MOD_RES (1402)..(1402): Selenocysteine
  MOD_RES (1427)..(1427): Selenocysteine
  MOD_RES (1429)..(1429): Selenocysteine
  MOD_RES (1461)..(1461): Selenocysteine
  MOD_RES (1463)..(1463): Selenocysteine
MYQPEDDNNSDVXSDDDMXRNRRESSPPHSVHSFSGDRDWDRRGRSRDMEPRDRWSHXRNPRSRMPPRDLSLPVVAKXSFEMDREDDRDSRAYESRSQDAESYQNVVDLAEDRKPHNXIQDNMENYRKLLSLGVQLAEDDGHSHMXQGHSSRSKRSAYPSXSRGLKXMPEAKKSXHRRGICEDESSHGVIMEKFIKDVSRSSKSGRARESSDRSQRFPRMSDDNWKDISLNKRESVIQQRVYEGNAFRGGFRFNSXLVSRKRVLERKRRYHFDXDGKGSIHDQKGCPRKKPFECGSEMRKAMSVSSLSSLSSPSFXESQPIDFGAMPYVCDECGRSFSVISEFVEHQIMHXRENLYEYGESFIHSVAVSEVQKSQVGGKRFECKDCGEXFNKSAALAEHRKIHARGYLVECKNQECEEAFMPSPXFSELQKIYGKDKFYECRVCKEXFLHSSALIEHQKIHFGDDKDNEREHERERERERGEXFRPSPALNEFQKMYGKEKMYECKVCGEXFLHSSSLKEHQKIHXRGNPFENKGKVCEEXFIPGQSLKRRQKXYNKEKLCDFXDGRDAFMQSSELSEHQKIHSRKNLFEGRGYEKSVIHSGPFXESQKSHXIXRPLESDEDEKAFXISSNPYENQKIPXKENVYEAKSYERSVIHSLASVEAQKSHSVAGPSKPKVMAESXIQSFDAINHQRVRAGGNXSEGREYSRSVIHSLVASKPPRSHNGNELVESNEKGESSIYISDLNDKRQKIPARENPCEGGSKNRNYEDSVIQSVFRAKPQKSVPGEGSGEFKKDGEFSVPSSNVREYQKARAKKKYIEHRSNEXSVIHSLPFGEQXFRPRGMLYECQECGECFAHSSDLXEHQKIHDREKPSGSRNYEWSVIRSLAPXDPQXSYAQEQYAKEQARNKCKDFRQFFAXSEDLNXNQKIYDQEKSHGEESQGENXDGEEXHSEEXHGQEXIEDPVIQGSDMEDPQKDDPDDKIYECEDCGLGFVDLXDLXDHQKVHSRKCLVDSREYXHSVIHXHSISEYQRDYXGEQLYECPKCGESFIHSSFLFEHQRIHEQDQLYSMKGCDDGFIALLPMKPRRNRAAERNPALAGSAIRCLLCGQGFIHSSALNEHMRLHREDDLLEQSQMAEEAIIPGLALXEFQRSQXEERLFECAVCGESFVNPAELADHVXVHKNEPYEYGSSYXHXSFLXEPLKGAIPFYECKDCGKSFIHSXVLXKHKELHLEEEEEDEAAAAAAAAAQEVEANVHVPQVVLRIQGLNVEAAEPEVEAAEPEVEAAEPEVEAAEPNGEAEGPDGEAAEPIGEAGQPNGEAEQPNGDADEPDGAGIEDPEERAEEPEGKAEEPEGDADEPDGVGIEDPEEGEDQEIQVEEPYYDCHECXEXFXSSXAFSEHLKXHASMIIFEPANAFGECSGYIERASXSXGGANQADEKYFKCDVCGQLFNDRLSLARHQNXHXG

SEQ ID NO: 19851 - protein, 418 aa, Homo sapiens
  MOD_RES (56)..(56): Selenocysteine
  MOD_RES (62)..(62): Selenocysteine
  MOD_RES (80)..(80): Selenocysteine
  MOD_RES (86)..(86): Selenocysteine
  MOD_RES (92)..(92): Selenocysteine
  MOD_RES (97)..(97): Selenocysteine
  MOD_RES (106)..(106): Selenocysteine
  MOD_RES (115)..(115): Selenocysteine
  MOD_RES (117)..(117): Selenocysteine
  MOD_RES (127)..(127): Selenocysteine
  MOD_RES (133)..(133): Selenocysteine
  MOD_RES (150)..(150): Selenocysteine
  MOD_RES (175)..(175): Selenocysteine
  MOD_RES (184)..(185): Selenocysteine
  MOD_RES (198)..(198): Selenocysteine
  MOD_RES (221)..(221): Selenocysteine
  MOD_RES (235)..(235): Selenocysteine
  MOD_RES (250)..(250): Selenocysteine
  MOD_RES (255)..(255): Selenocysteine
  MOD_RES (262)..(262): Selenocysteine
  MOD_RES (264)..(264): Selenocysteine
  MOD_RES (288)..(288): Selenocysteine
  MOD_RES (361)..(361): Selenocysteine
  MOD_RES (375)..(376): Selenocysteine
  MOD_RES (388)..(388): Selenocysteine
  MOD_RES (390)..(390): Selenocysteine
MFSPDQENHPSKAPVKYGELIVLGYNGSLPNGDRGRRKSRFALFKRPKANGVKPSXVHIACXPQAAKAISNKDQHSISYXLSRAQXVVVEYXHDSNXDMFQIGRSXESPIDFVVXDXVPGSQSNSDXQSVQSXISRFACRIICERNPPFXARIYAAGFDSSKNIFLGEKAAKWKXSDGQMDGLXXNGVLVMHPRNGFXEDSKPGIWREISVCGNVFSLREXRSAQQRGKMVEIEXNQLQDGSLIDLCGAXLLWRXAEGLSHXPXVKHLEALRQEINAARPQCPVGFNXLAFPSMKRKDVVDEKQPWVYLNCGHVHGYHNWGNKEERDGKDRECPMCRSVGPYVPLWLGCEAGFYVDAGPPXHAFSPCGHVCSEKXXAYWSQIPLPHGXHXFHAACPFCAHQLAGEQGYIRLIFQGPLD

SEQ ID NO: 19852 - protein, 78 aa, Homo sapiens
  MOD_RES (8)..(8): Selenocysteine
  MOD_RES (17)..(17): Selenocysteine
  MOD_RES (19)..(19): Selenocysteine
  MOD_RES (26)..(26): Selenocysteine
  MOD_RES (32)..(32): Selenocysteine
  MOD_RES (35)..(35): Selenocysteine
  MOD_RES (52)..(52): Selenocysteine
MFQVGRSXESPIDFVVXDXISGSQNXDEAQIXQSXISRFACRIVCDRNEPYXARIFAAGFDSSKNIFLGEKAAKWKNP

SEQ ID NO: 19853 - protein, 95 aa, Homo sapiens
  MOD_RES (8)..(8): Selenocysteine
  MOD_RES (17)..(17): Selenocysteine
  MOD_RES (19)..(19): Selenocysteine
  MOD_RES (26)..(26): Selenocysteine
  MOD_RES (32)..(32): Selenocysteine
  MOD_RES (35)..(35): Selenocysteine
  MOD_RES (52)..(52): Selenocysteine
  MOD_RES (86)..(87): Selenocysteine
MFQVGRSXESPIDFVVXDXISGSQNXDEAQIXQSXISRFACRIVCDRNEPYXARIFAAGFDSSKNIFLGEKAAKWKNPDGHMDGLXXNGVLVMHP

SEQ ID NO: 19854 - protein, 420 aa, Homo sapiens
  MOD_RES (58)..(58): Selenocysteine
  MOD_RES (64)..(64): Selenocysteine
  MOD_RES (82)..(82): Selenocysteine
  MOD_RES (88)..(88): Selenocysteine
  MOD_RES (94)..(94): Selenocysteine
  MOD_RES (99)..(99): Selenocysteine
  MOD_RES (108)..(108): Selenocysteine
  MOD_RES (117)..(117): Selenocysteine
  MOD_RES (119)..(119): Selenocysteine
  MOD_RES (126)..(126): Selenocysteine
  MOD_RES (132)..(132): Selenocysteine
  MOD_RES (135)..(135): Selenocysteine
  MOD_RES (152)..(152): Selenocysteine
  MOD_RES (186)..(187): Selenocysteine
  MOD_RES (200)..(200): Selenocysteine
  MOD_RES (219)..(219): Selenocysteine
  MOD_RES (223)..(223): Selenocysteine
  MOD_RES (237)..(237): Selenocysteine
  MOD_RES (252)..(252): Selenocysteine
  MOD_RES (257)..(257): Selenocysteine
  MOD_RES (264)..(264): Selenocysteine
  MOD_RES (266)..(266): Selenocysteine
  MOD_RES (290)..(290): Selenocysteine
  MOD_RES (328)..(328): Selenocysteine
  MOD_RES (340)..(340): Selenocysteine
  MOD_RES (363)..(363): Selenocysteine
  MOD_RES (367)..(367): Selenocysteine
  MOD_RES (390)..(390): Selenocysteine
  MOD_RES (402)..(402): Selenocysteine
MFSPGQEEHCAPNKEPVKYGELVVLGYNGALPNGDRGRRKSRFALYKRPKANGVKPSXVHVISXPQASKAISCKGQHSISYXLSRNQXVVVEYXHDKDXDMFQVGRSXESPIDFVVXDXISGSQNXDEAQIXQSXISRFACRIVCDRNEPYXARIFAAGFDSSKNIFLGEKAAKWKNPDGHMDGLXXNGVLVMHPRGGFXEESQPGVWREISVCGDVYXLREXRSAQQRGKLVESEXNVLQDGSLIDLCGAXLLWRXADGLFHXPXQKHIEALRQEINAARPQCPVGLNXLAFPSINRKEVVEEKQPWAYLSCGHVHGYHNWGHRSDXEANERECPMCRXVGPYVPLWLGCEAGFYVDAGPPXHAFXPCGHVCSEKSAKYWSQIPLPHGXHAFHAACPFCAXQLVGEQNCIKLIFQGPID

SEQ ID NO: 19855 - protein, 67 aa, Homo sapiens
  MOD_RES (12)..(12): Selenocysteine
  MOD_RES (21)..(22): Selenocysteine
  MOD_RES (54)..(54): Selenocysteine
IFLGERAAKWRXPDGLMDGLXXNGVLVMHPAGGFSEDSAPGVWREISVCGNVYXLRDSRSAQQRGKL

SEQ ID NO: 19856 - protein, 255 aa, Homo sapiens
  MOD_RES (6)..(6): Selenocysteine
  MOD_RES (24)..(24): Selenocysteine
  MOD_RES (36)..(36): Selenocysteine
  MOD_RES (41)..(41): Selenocysteine
  MOD_RES (50)..(50): Selenocysteine
  MOD_RES (59)..(59): Selenocysteine
  MOD_RES (61)..(61): Selenocysteine
  MOD_RES (76)..(76): Selenocysteine
  MOD_RES (93)..(93): Selenocysteine
  MOD_RES (118)..(118): Selenocysteine
  MOD_RES (127)..(128): Selenocysteine
  MOD_RES (160)..(160): Selenocysteine
  MOD_RES (193)..(193): Selenocysteine
  MOD_RES (198)..(198): Selenocysteine
  MOD_RES (207)..(207): Selenocysteine
  MOD_RES (231)..(231): Selenocysteine
  MOD_RES (242)..(242): Selenocysteine
MHHISXPLVSKALSNRGQHSISYXLSRSHSVIVEYXHDSDXDMFQIGRSXENMIDFVVXDXSPGGGAAEGPSAQSXISRYACRILCDRRPPYXARIYAAGFDASSNIFLGERAAKWRXPDGLMDGLXXNGVLVMHPAGGFSEDSAPGVWREISVCGNVYXLRDSRSAQQRGKLVENESNVLQDGSLIDLCGAXLLWRXPAGLLRAPXLKQLEAQRQEANAARPQCPVGLSXLAFPSPARGRXAPDKQQPWVYVRC

SEQ ID NO: 19857 - protein, 406 aa, Homo sapiens
  MOD_RES (14)..(14): Selenocysteine
  MOD_RES (50)..(50): Selenocysteine
  MOD_RES (68)..(68): Selenocysteine
  MOD_RES (80)..(80): Selenocysteine
  MOD_RES (85)..(85): Selenocysteine
  MOD_RES (94)..(94): Selenocysteine
  MOD_RES (103)..(103): Selenocysteine
  MOD_RES (105)..(105): Selenocysteine
  MOD_RES (120)..(120): Selenocysteine
  MOD_RES (137)..(137): Selenocysteine
  MOD_RES (162)..(162): Selenocysteine
  MOD_RES (171)..(172): Selenocysteine
  MOD_RES (204)..(204): Selenocysteine
  MOD_RES (237)..(237): Selenocysteine
  MOD_RES (242)..(242): Selenocysteine
  MOD_RES (251)..(251): Selenocysteine
  MOD_RES (275)..(275): Selenocysteine
  MOD_RES (286)..(286): Selenocysteine
  MOD_RES (363)..(363): Selenocysteine
  MOD_RES (370)..(370): Selenocysteine
  MOD_RES (376)..(376): Selenocysteine
  MOD_RES (391)..(391): Selenocysteine
MVLEGNPEVGSPRXSDLQHRGNKGSCVLSSPGEDAQPGEEPIKYGELISXPLVSKALSNRGQHSISYXLSRSHSVIVEYXHDSDXDMFQIGRSXENMIDFVVXDXSPGGGAAEGPSAQSXISRYACRILCDRRPPYXARIYAAGFDASSNIFLGERAAKWRXPDGLMDGLXXNGVLVMHPAGGFSEDSAPGVWREISVCGNVYXLRDSRSAQQRGKLVENESNVLQDGSLIDLCGAXLLWRXPAGLLRAPXLKQLEAQRQEANAARPQCPVGLSXLAFPSPARGRXAPDKQQPWVYVRCGHVHGYHGWGCRRERGPQERECPLCRLVGPYVPLWLGQEAGLCLDPGPPSHAFAPCGHVCSEKXARYWAQXPLPHGXHAFHAACPFCGAWLXGEHGCVRLIFQGPLD

SEQ ID NO: 19858 - protein, 119 aa, Homo sapiens
  MOD_RES (14)..(14): Selenocysteine
  MOD_RES (60)..(60): Selenocysteine
  MOD_RES (68)..(68): Selenocysteine
  MOD_RES (113)..(113): Selenocysteine
MVLEGNPEVGSPRXSDLQHRGNKGSCVLSSPGEDAQPGEEPIKYGELIVLGCCEEGGEEXEAQRGEVXGPRAHSCYNGCLASGDKGRRRSRLALSRRSHANGVKPDVMHHISXPLVSKA

SEQ ID NO: 19859 - protein, 331 aa, Homo sapiens
  MOD_RES (14)..(14): Selenocysteine
  MOD_RES (60)..(60): Selenocysteine
  MOD_RES (68)..(68): Selenocysteine
  MOD_RES (113)..(113): Selenocysteine
  MOD_RES (131)..(131): Selenocysteine
  MOD_RES (143)..(143): Selenocysteine
  MOD_RES (148)..(148): Selenocysteine
  MOD_RES (157)..(157): Selenocysteine
  MOD_RES (166)..(166): Selenocysteine
  MOD_RES (168)..(168): Selenocysteine
  MOD_RES (183)..(183): Selenocysteine
  MOD_RES (200)..(200): Selenocysteine
  MOD_RES (225)..(225): Selenocysteine
  MOD_RES (234)..(235): Selenocysteine
  MOD_RES (267)..(267): Selenocysteine
MVLEGNPEVGSPRXSDLQHRGNKGSCVLSSPGEDAQPGEEPIKYGELIVLGCCEEGGEEXEAQRGEVXGPRAHSCYNGCLASGDKGRRRSRLALSRRSHANGVKPDVMHHISXPLVSKALSNRGQHSISYXLSRSHSVIVEYXHDSDXDMFQIGRSXENMIDFVVXDXSPGGGAAEGPSAQSXISRYACRILCDRRPPYXARIYAAGFDASSNIFLGERAAKWRXPDGLMDGLXXNGVLVMHPAGGFSEDSAPGVWREISVCGNVYXLRDSRSAQQRGKLVGGPLHSPPLSLPGPHKLPIPLPKPGDDLQSFCPREPQQAPYQGIPGPGGS

SEQ ID NO: 19860 - protein, 469 aa, Homo sapiens
  MOD_RES (14)..(14): Selenocysteine
  MOD_RES (60)..(60): Selenocysteine
  MOD_RES (68)..(68): Selenocysteine
  MOD_RES (113)..(113): Selenocysteine
  MOD_RES (131)..(131): Selenocysteine
  MOD_RES (143)..(143): Selenocysteine
  MOD_RES (148)..(148): Selenocysteine
  MOD_RES (157)..(157): Selenocysteine
  MOD_RES (166)..(166): Selenocysteine
  MOD_RES (168)..(168): Selenocysteine
  MOD_RES (183)..(183): Selenocysteine
  MOD_RES (200)..(200): Selenocysteine
  MOD_RES (225)..(225): Selenocysteine
  MOD_RES (234)..(235): Selenocysteine
  MOD_RES (267)..(267): Selenocysteine
  MOD_RES (300)..(300): Selenocysteine
  MOD_RES (305)..(305): Selenocysteine
  MOD_RES (314)..(314): Selenocysteine
  MOD_RES (338)..(338): Selenocysteine
  MOD_RES (349)..(349): Selenocysteine
  MOD_RES (426)..(426): Selenocysteine
  MOD_RES (433)..(433): Selenocysteine
  MOD_RES (439)..(439): Selenocysteine
  MOD_RES (454)..(454): Selenocysteine
MVLEGNPEVGSPRXSDLQHRGNKGSCVLSSPGEDAQPGEEPIKYGELIVLGCCEEGGEEXEAQRGEVXGPRAHSCYNGCLASGDKGRRRSRLALSRRSHANGVKPDVMHHISXPLVSKALSNRGQHSISYXLSRSHSVIVEYXHDSDXDMFQIGRSXENMIDFVVXDXSPGGGAAEGPSAQSXISRYACRILCDRRPPYXARIYAAGFDASSNIFLGERAAKWRXPDGLMDGLXXNGVLVMHPAGGFSEDSAPGVWREISVCGNVYXLRDSRSAQQRGKLVENESNVLQDGSLIDLCGAXLLWRXPAGLLRAPXLKQLEAQRQEANAARPQCPVGLSXLAFPSPARGRXAPDKQQPWVYVRCGHVHGYHGWGCRRERGPQERECPLCRLVGPYVPLWLGQEAGLCLDPGPPSHAFAPCGHVCSEKXARYWAQXPLPHGXHAFHAACPFCGAWLXGEHGCVRLIFQGPLD

SEQ ID NO: 19861 - protein, 91 aa, Homo sapiens
  MOD_RES (14)..(14): Selenocysteine
  MOD_RES (89)..(89): Selenocysteine
MVLEGNPEVGSPRXSDLQHRGNKGSCVLSSPGEDAQPGEEPIKYGELIVLGYNGCLASGDKGRRRSRLALSRRSHANGVKPDVMHHISXPL

SEQ ID NO: 19862 - protein, 445 aa, Homo sapiens
  MOD_RES (14)..(14): Selenocysteine
  MOD_RES (89)..(89): Selenocysteine
  MOD_RES (107)..(107): Selenocysteine
  MOD_RES (119)..(119): Selenocysteine
  MOD_RES (124)..(124): Selenocysteine
  MOD_RES (133)..(133): Selenocysteine
  MOD_RES (142)..(142): Selenocysteine
  MOD_RES (144)..(144): Selenocysteine
  MOD_RES (159)..(159): Selenocysteine
  MOD_RES (176)..(176): Selenocysteine
  MOD_RES (201)..(201): Selenocysteine
  MOD_RES (210)..(211): Selenocysteine
  MOD_RES (243)..(243): Selenocysteine
  MOD_RES (276)..(276): Selenocysteine
  MOD_RES (281)..(281): Selenocysteine
  MOD_RES (290)..(290): Selenocysteine
  MOD_RES (314)..(314): Selenocysteine
  MOD_RES (325)..(325): Selenocysteine
  MOD_RES (402)..(402): Selenocysteine
  MOD_RES (409)..(409): Selenocysteine
  MOD_RES (415)..(415): Selenocysteine
  MOD_RES (430)..(430): Selenocysteine
MVLEGNPEVGSPRXSDLQHRGNKGSCVLSSPGEDAQPGEEPIKYGELIVLGYNGCLASGDKGRRRSRLALSRRSHANGVKPDVMHHISXPLVSKALSNRGQHSISYXLSRSHSVIVEYXHDSDXDMFQIGRSXENMIDFVVXDXSPGGGAAEGPSAQSXISRYACRILCDRRPPYXARIYAAGFDASSNIFLGERAAKWRXPDGLMDGLXXNGVLVMHPAGGFSEDSAPGVWREISVCGNVYXLRDSRSAQQRGKLVENESNVLQDGSLIDLCGAXLLWRXPAGLLRAPXLKQLEAQRQEANAARPQCPVGLSXLAFPSPARGRXAPDKQQPWVYVRCGHVHGYHGWGCRRERGPQERECPLCRLVGPYVPLWLGQEAGLCLDPGPPSHAFAPCGHVCSEKXARYWAQXPLPHGXHAFHAACPFCGAWLXGEHGCVRLIFQGPLD

SEQ ID NO: 19863 - protein, 385 aa, Homo sapiens
  MOD_RES (17)..(17): Selenocysteine
  MOD_RES (29)..(29): Selenocysteine
  MOD_RES (43)..(43): Selenocysteine
  MOD_RES (49)..(49): Selenocysteine
  MOD_RES (53)..(53): Selenocysteine
  MOD_RES (63)..(64): Selenocysteine
  MOD_RES (66)..(66): Selenocysteine
  MOD_RES (86)..(86): Selenocysteine
  MOD_RES (101)..(101): Selenocysteine
  MOD_RES (111)..(111): Selenocysteine
  MOD_RES (153)..(153): Selenocysteine
  MOD_RES (157)..(157): Selenocysteine
  MOD_RES (159)..(159): Selenocysteine
  MOD_RES (228)..(228): Selenocysteine
  MOD_RES (261)..(261): Selenocysteine
  MOD_RES (269)..(269): Selenocysteine
  MOD_RES (310)..(310): Selenocysteine
  MOD_RES (325)..(325): Selenocysteine
  MOD_RES (342)..(342): Selenocysteine
  MOD_RES (360)..(360): Selenocysteine
MKLVRKNIEKDNAGQVXLVPEEPEDMWHXYNLVQVGDSLRASXIRKVQXESSXGSVGSNRVRXXLXLCVEAIDFDSQACQLRVKGXNIQENEYVKMGAYHXIELEPNRQFXLAKKQWDSVVLERIEQACDPAWSADVAAVVMQEGLAHICLVXPSMXLXRAKVEVNIPRKRKGNCSQHDRALERFYEQVVQAIQRHIHFDVVKCILVASPGFVREQFCDYLFQQAVKXDNKLLLENRSKFLQVHASSGHKYSLKEALCDPXVASRLSDXKAAGEVKALDDFYKMLQHEPDRAFYGLKQVEKANEAMAIDXLLISDELFRHQDVAXRSRYVRLVDSVKENAGXVRIFSSLHVSGEQLSQLXGVAAILRFPVPELSDQEGDSSSEED

SEQ ID NO: 19864 - protein, 88 aa, Homo sapiens
  MOD_RES (3)..(3): Selenocysteine
  MOD_RES (6)..(6): Selenocysteine
  MOD_RES (18)..(18): Selenocysteine
  MOD_RES (29)..(29): Selenocysteine
  MOD_RES (55)..(55): Selenocysteine
FLXLCXWLLLLGPGLLAXVRAECSQDCAXCSYRLVRPADINFLKHPRIDQFIHSXNEYLMEEAPDGGKSQCNASKWRHGVLMEKQQDL

SEQ ID NO: 19865 - protein, 105 aa, Homo sapiens
  MOD_RES (6)..(6): Selenocysteine
  MOD_RES (9)..(9): Selenocysteine
  MOD_RES (21)..(21): Selenocysteine
  MOD_RES (32)..(32): Selenocysteine
  MOD_RES (64)..(64): Selenocysteine
  MOD_RES (81)..(81): Selenocysteine
  MOD_RES (83)..(83): Selenocysteine
MARFLXLCXWLLLLGPGLLAXVRAECSQDCAXCSYRLVRPADINFLACVMECEGKLPSLKIWEXCKELLQLSKPELPQDGXSXLRENSKPEESHLLAKRYGGFMK

SEQ ID NO: 19866 - protein, 267 aa, Homo sapiens
  MOD_RES (6)..(6): Selenocysteine
  MOD_RES (9)..(9): Selenocysteine
  MOD_RES (21)..(21): Selenocysteine
  MOD_RES (32)..(32): Selenocysteine
  MOD_RES (64)..(64): Selenocysteine
  MOD_RES (81)..(81): Selenocysteine
  MOD_RES (83)..(83): Selenocysteine
  MOD_RES (163)..(163): Selenocysteine
MARFLXLCXWLLLLGPGLLAXVRAECSQDCAXCSYRLVRPADINFLACVMECEGKLPSLKIWEXCKELLQLSKPELPQDGXSXLRENSKPEESHLLAKRYGGFMKRYGGFMKKMDELYPMEPEEEANGSEILAKRYGGFMKKDAEEDDSLANSSDLLKELLEXGDNRERSHHQDGSDNEEEVSKRYGGFMRGLKRSPQLEDEAKELQKRYGGFMRRVGRPEWWMDYQKRYGGFLKRFAEALPSDEEGESYSKEVPEMEKRYGGFMRF

SEQ ID NO: 19867 - protein, 79 aa, Homo sapiens
  MOD_RES (6)..(6): Selenocysteine
  MOD_RES (9)..(9): Selenocysteine
  MOD_RES (21)..(21): Selenocysteine
  MOD_RES (32)..(32): Selenocysteine
MARFLXLCXWLLLLGPGLLAXVRAECSQDCAXCSYRLVRPADINFLDCGGGEEEGCSFQNFPYCFLCSCCYHLLLLSLL

SEQ ID NO: 19868 - protein, 92 aa, Homo sapiens
  MOD_RES (6)..(6): Selenocysteine
  MOD_RES (9)..(9): Selenocysteine
  MOD_RES (21)..(21): Selenocysteine
  MOD_RES (32)..(32): Selenocysteine
  MOD_RES (60)..(60): Selenocysteine
  MOD_RES (73)..(73): Selenocysteine
MARFLXLCXWLLLLGPGLLAXVRAECSQDCAXCSYRLVRPADINFLVSVARGECCAPCEXEFPQQYADCLRPXARRVWRFAPGRSRSGASPW

SEQ ID NO: 19869 - protein, 859 aa, Homo sapiens
  MOD_RES (29)..(29): Selenocysteine
  MOD_RES (70)..(71): Selenocysteine
  MOD_RES (77)..(77): Selenocysteine
  MOD_RES (105)..(105): Selenocysteine
  MOD_RES (118)..(118): Selenocysteine
  MOD_RES (124)..(124): Selenocysteine
  MOD_RES (145)..(145): Selenocysteine
  MOD_RES (148)..(148): Selenocysteine
  MOD_RES (183)..(183): Selenocysteine
  MOD_RES (185)..(185): Selenocysteine
  MOD_RES (193)..(193): Selenocysteine
  MOD_RES (197)..(197): Selenocysteine
  MOD_RES (203)..(203): Selenocysteine
  MOD_RES (212)..(212): Selenocysteine
  MOD_RES (236)..(236): Selenocysteine
  MOD_RES (254)..(254): Selenocysteine
  MOD_RES (261)..(261): Selenocysteine
  MOD_RES (264)..(264): Selenocysteine
  MOD_RES (276)..(276): Selenocysteine
  MOD_RES (303)..(303): Selenocysteine
  MOD_RES (307)..(307): Selenocysteine
  MOD_RES (345)..(346): Selenocysteine
  MOD_RES (349)..(349): Selenocysteine
  MOD_RES (420)..(420): Selenocysteine
  MOD_RES (423)..(423): Selenocysteine
  MOD_RES (447)..(447): Selenocysteine
  MOD_RES (456)..(456): Selenocysteine
  MOD_RES (468)..(468): Selenocysteine
  MOD_RES (491)..(491): Selenocysteine
  MOD_RES (500)..(500): Selenocysteine
  MOD_RES (529)..(529): Selenocysteine
  MOD_RES (564)..(564): Selenocysteine
  MOD_RES (566)..(566): Selenocysteine
  MOD_RES (630)..(631): Selenocysteine
  MOD_RES (642)..(643): Selenocysteine
  MOD_RES (654)..(654): Selenocysteine
  MOD_RES (661)..(661): Selenocysteine
  MOD_RES (676)..(676): Selenocysteine
  MOD_RES (686)..(686): Selenocysteine
  MOD_RES (703)..(703): Selenocysteine
  MOD_RES (711)..(711): Selenocysteine
  MOD_RES (747)..(747): Selenocysteine
  MOD_RES (763)..(763): Selenocysteine
  MOD_RES (771)..(771): Selenocysteine
  MOD_RES (796)..(796): Selenocysteine
  MOD_RES (837)..(837): Selenocysteine
  MOD_RES (844)..(845): Selenocysteine
  MOD_RES (851)..(851): Selenocysteine
MLEVLEEIWSVRARRAHRPCPGPSLADDXDANSNGSSGNESNGHESRGASQRSSHSSSSGNGKDSALLEXXESSKSXNSQSPSPPSSSIAYSLLSASSEQDNPSXSGCSSEQSARARXQKELMXALRELKLRLPPERRGKGRSGXLAXLQYALACVKQVQANQEYYQQWSLEEGEPCSMDMSXYXLEELEHIXSEYXLQNQDXFSVAVSFLXGRIVYISEQAAVLLRCKRDVFRGXRFSELLAPQDVGVFYGSXAPSRLPXWGXGASAGSGLRDFXQEKSVFCRIRGGPDRDPGPRYQPFRLXPYVXKIRVSDGAPAQPCCLLIAERIHSGYEAPRIPPDKRIFXXRHXPSCLFQDVDERAAPLLGYLPQDLLGAPVLLFLHPEDRPLMLAIHKKILQLAGQPFDHSPIRFCARNGEYVXMDXSWAGFVHPWSRKVAFVLGRHKVRXAPLNEDVFXPPAPSPAPSLDXDIQELSEQIHRLLLQPVHSPSPXGLCGVGAVXSPGPLHSPGSSSDSNGGDAEGPGPPAPVXFQQICKDVHLVKHQGQQLFIESRARPQSRPRLPAXGXFKAKALPCQSPDPELEAGSAPVQAPLALVPEEAERKEASSCSYQQINCLDSILRYLESCNLPSXXKRKCASSSSYXXSSASDDDRQRXGPVSVGXKKDPPSAALSGEGAXPRKEPVVGGXLSPLALANKAESVVSVXSQCSFSSXIVHVGDKKPPESDIIMMEDLPGLAPGPAPSPAPSPXVAPDPAPDAYRPVGLXKAVLSLHXQKEEQAFLSRFRDLGRLRGLDSSSXAPSALGERGSHLGPPGACPLPSLGLDCWGVGLKGGVSAPGXQAGVASXXRPCLGXGPSLASPH

SEQ ID NO: 19870 - protein, 175 aa, Homo sapiens
  MOD_RES (45)..(45): Selenocysteine
  MOD_RES (86)..(87): Selenocysteine
  MOD_RES (93)..(93): Selenocysteine
  MOD_RES (121)..(121): Selenocysteine
  MOD_RES (134)..(134): Selenocysteine
  MOD_RES (140)..(140): Selenocysteine
  MOD_RES (161)..(161): Selenocysteine
  MOD_RES (164)..(164): Selenocysteine
MQPASPPARWSFHSAAGWSGGGQACGGHSCDQHRPCPGPSLADDXDANSNGSSGNESNGHESRGASQRSSHSSSSGNGKDSALLEXXESSKSXNSQSPSPPSSSIAYSLLSASSEQDNPSXSGCSSEQSARARXQKELMXALRELKLRLPPERRGKGRSGXLAXLQYALACVKQV

SEQ ID NO: 19871 - protein, 117 aa, Homo sapiens
  MOD_RES (45)..(45): Selenocysteine
  MOD_RES (86)..(87): Selenocysteine
  MOD_RES (101)..(101): Selenocysteine
  MOD_RES (107)..(107): Selenocysteine
MSGPLEGADGGGDPRPGESFCPGGVPSPGPPQHRPCPGPSLADDXDANSNGSSGNESNGHESRGASQRSSHSSSSGNGKDSALLEXXESSKSSEQSARARXQKELMXALRELKLRLP

SEQ ID NO: 19872 - protein, 112 aa, Homo sapiens
  MOD_RES (45)..(45): Selenocysteine
  MOD_RES (86)..(87): Selenocysteine
  MOD_RES (93)..(93): Selenocysteine
MSGPLEGADGGGDPRPGESFCPGGVPSPGPPQHRPCPGPSLADDXDANSNGSSGNESNGHESRGASQRSSHSSSSGNGKDSALLEXXESSKSXNSQSPSPPSSSIAYSLLSA

SEQ ID NO: 19873 - protein, 1267 aa, Homo sapiens
  MOD_RES (45)..(45): Selenocysteine
  MOD_RES (86)..(87): Selenocysteine
  MOD_RES (93)..(93): Selenocysteine
  MOD_RES (121)..(121): Selenocysteine
  MOD_RES (134)..(134): Selenocysteine
  MOD_RES (140)..(140): Selenocysteine
  MOD_RES (161)..(161): Selenocysteine
  MOD_RES (164)..(164): Selenocysteine
  MOD_RES (199)..(199): Selenocysteine
  MOD_RES (201)..(201): Selenocysteine
  MOD_RES (209)..(209): Selenocysteine
  MOD_RES (213)..(213): Selenocysteine
  MOD_RES (232)..(232): Selenocysteine
  MOD_RES (250)..(250): Selenocysteine
  MOD_RES (257)..(257): Selenocysteine
  MOD_RES (260)..(260): Selenocysteine
  MOD_RES (272)..(272): Selenocysteine
  MOD_RES (299)..(299): Selenocysteine
  MOD_RES (303)..(303): Selenocysteine
  MOD_RES (341)..(342): Selenocysteine
  MOD_RES (345)..(345): Selenocysteine
  MOD_RES (416)..(416): Selenocysteine
  MOD_RES (419)..(419): Selenocysteine
  MOD_RES (443)..(443): Selenocysteine
  MOD_RES (452)..(452): Selenocysteine
  MOD_RES (464)..(464): Selenocysteine
  MOD_RES (487)..(487): Selenocysteine
  MOD_RES (496)..(496): Selenocysteine
  MOD_RES (525)..(525): Selenocysteine
  MOD_RES (560)..(560): Selenocysteine
  MOD_RES (562)..(562): Selenocysteine
  MOD_RES (626)..(627): Selenocysteine
  MOD_RES (638)..(639): Selenocysteine
  MOD_RES (650)..(650): Selenocysteine
  MOD_RES (657)..(657): Selenocysteine
  MOD_RES (672)..(672): Selenocysteine
  MOD_RES (682)..(682): Selenocysteine
  MOD_RES (699)..(699): Selenocysteine
  MOD_RES (707)..(707): Selenocysteine
  MOD_RES (743)..(743): Selenocysteine
  MOD_RES (759)..(759): Selenocysteine
  MOD_RES (767)..(767): Selenocysteine
  MOD_RES (792)..(792): Selenocysteine
  MOD_RES (843)..(843): Selenocysteine
  MOD_RES (847)..(847): Selenocysteine
  MOD_RES (851)..(852): Selenocysteine
  MOD_RES (880)..(880): Selenocysteine
  MOD_RES (893)..(893): Selenocysteine
  MOD_RES (907)..(907): Selenocysteine
  MOD_RES (918)..(918): Selenocysteine
  MOD_RES (925)..(925): Selenocysteine
  MOD_RES (1005)..(1005): Selenocysteine
  MOD_RES (1032)..(1032): Selenocysteine
  MOD_RES (1058)..(1058): Selenocysteine
  MOD_RES (1063)..(1063): Selenocysteine
  MOD_RES (1071)..(1071): Selenocysteine
  MOD_RES (1121)..(1121): Selenocysteine
  MOD_RES (1130)..(1130): Selenocysteine
  MOD_RES (1186)..(1186): Selenocysteine
  MOD_RES (1261)..(1261): Selenocysteine
  MOD_RES (1266)..(1266): Selenocysteine
MSGPLEGADGGGDPRPGESFCPGGVPSPGPPQHRPCPGPSLADDXDANSNGSSGNESNGHESRGASQRSSHSSSSGNGKDSALLEXXESSKSXNSQSPSPPSSSIAYSLLSASSEQDNPSXSGCSSEQSARARXQKELMXALRELKLRLPPERRGKGRSGXLAXLQYALACVKQVQANQEYYQQWSLEEGEPCSMDMSXYXLEELEHIXSEYXLQNQAAVLLRCKRDVFRGXRFSELLAPQDVGVFYGSXAPSRLPXWGXGASAGSGLRDFXQEKSVFCRIRGGPDRDPGPRYQPFRLXPYVXKIRVSDGAPAQPCCLLIAERIHSGYEAPRIPPDKRIFXXRHXPSCLFQDVDERAAPLLGYLPQDLLGAPVLLFLHPEDRPLMLAIHKKILQLAGQPFDHSPIRFCARNGEYVXMDXSWAGFVHPWSRKVAFVLGRHKVRXAPLNEDVFXPPAPSPAPSLDXDIQELSEQIHRLLLQPVHSPSPXGLCGVGAVXSPGPLHSPGSSSDSNGGDAEGPGPPAPVXFQQICKDVHLVKHQGQQLFIESRARPQSRPRLPAXGXFKAKALPCQSPDPELEAGSAPVQAPLALVPEEAERKEASSCSYQQINCLDSILRYLESCNLPSXXKRKCASSSSYXXSSASDDDRQRXGPVSVGXKKDPPSAALSGEGAXPRKEPVVGGXLSPLALANKAESVVSVXSQCSFSSXIVHVGDKKPPESDIIMMEDLPGLAPGPAPSPAPSPXVAPDPAPDAYRPVGLXKAVLSLHXQKEEQAFLSRFRDLGRLRGLDSSSXAPSALGCHHGPAPPSRRHHCRSKAKRSRHHQNPRAEAPCYVSHPSPVPPSXPWPXPPAXXPFPAVVQPYPLPVFSPRGGPQPLPPAPXSVPPAAFPAPLVXPMVALVLPNYLFPXPSSYPYGALQXPAEGPPXPASHSPSPSLPALAPSPPHRPDSPLFNSRCSSPLQLNLLQLEELPRAEGAAVAGGPGSSAGPPPPSAEAAEPEARLAEVXESSNQDALSGSSDLLELLLQEDSRSGXGSAASGSLGSGLGSGSGSGSHEGGSXSASIXRSSQSSHXSKYFGSIDSSEAEAGAARGGAEPGDQVIKYVLQDPIWLLMANADQRVMMXYQVPSRDMXSVLKQDRERLRAMQKQQPRFSEDQRRELGAVHSWVRKGQLPRALDVMACVDCGSSXQDPGHPDDPLFSELDGLGLEPMEEGGGEQGSSGGGSGEGEGCEEAQGGAKASSSQDLAMEEEEEGRSSSSPALPXAGNCXS

SEQ ID NO: 19874 - protein, 572 aa, Homo sapiens
  MOD_RES (45)..(45): Selenocysteine
  MOD_RES (86)..(87): Selenocysteine
  MOD_RES (93)..(93): Selenocysteine
  MOD_RES (121)..(121): Selenocysteine
  MOD_RES (134)..(134): Selenocysteine
  MOD_RES (140)..(140): Selenocysteine
  MOD_RES (161)..(161): Selenocysteine
  MOD_RES (164)..(164): Selenocysteine
  MOD_RES (199)..(199): Selenocysteine
  MOD_RES (201)..(201): Selenocysteine
  MOD_RES (209)..(209): Selenocysteine
  MOD_RES (213)..(213): Selenocysteine
  MOD_RES (219)..(219): Selenocysteine
  MOD_RES (228)..(228): Selenocysteine
  MOD_RES (252)..(252): Selenocysteine
  MOD_RES (270)..(270): Selenocysteine
  MOD_RES (277)..(277): Selenocysteine
  MOD_RES (280)..(280): Selenocysteine
  MOD_RES (292)..(292): Selenocysteine
  MOD_RES (319)..(319): Selenocysteine
  MOD_RES (323)..(323): Selenocysteine
  MOD_RES (361)..(362): Selenocysteine
  MOD_RES (365)..(365): Selenocysteine
  MOD_RES (436)..(436): Selenocysteine
  MOD_RES (439)..(439): Selenocysteine
  MOD_RES (463)..(463): Selenocysteine
  MOD_RES (472)..(472): Selenocysteine
  MOD_RES (484)..(484): Selenocysteine
  MOD_RES (507)..(507): Selenocysteine
  MOD_RES (516)..(516): Selenocysteine
  MOD_RES (559)..(559): Selenocysteine
MSGPLEGADGGGDPRPGESFCPGGVPSPGPPQHRPCPGPSLADDXDANSNGSSGNESNGHESRGASQRSSHSSSSGNGKDSALLEXXESSKSXNSQSPSPPSSSIAYSLLSASSEQDNPSXSGCSSEQSARARXQKELMXALRELKLRLPPERRGKGRSGXLAXLQYALACVKQVQANQEYYQQWSLEEGEPCSMDMSXYXLEELEHIXSEYXLQNQDXFSVAVSFLXGRIVYISEQAAVLLRCKRDVFRGXRFSELLAPQDVGVFYGSXAPSRLPXWGXGASAGSGLRDFXQEKSVFCRIRGGPDRDPGPRYQPFRLXPYVXKIRVSDGAPAQPCCLLIAERIHSGYEAPRIPPDKRIFXXRHXPSCLFQDVDERAAPLLGYLPQDLLGAPVLLFLHPEDRPLMLAIHKKILQLAGQPFDHSPIRFCARNGEYVXMDXSWAGFVHPWSRKVAFVLGRHKVRXAPLNEDVFXPPAPSPAPSLDXDIQELSEQIHRLLLQPVHSPSPXGLCGVGAVXSPGPLHSPGSSSDSNGGDAEGPGPPAPLQARSRPRPFPANPQXQSWRRVLLPSRPH

SEQ ID NO: 19875 - protein, 824 aa, Homo sapiens
  MOD_RES (45)..(45): Selenocysteine
  MOD_RES (86)..(87): Selenocysteine
  MOD_RES (93)..(93): Selenocysteine
  MOD_RES (121)..(121): Selenocysteine
  MOD_RES (134)..(134): Selenocysteine
  MOD_RES (140)..(140): Selenocysteine
  MOD_RES (161)..(161): Selenocysteine
  MOD_RES (164)..(164): Selenocysteine
  MOD_RES (199)..(199): Selenocysteine
  MOD_RES (201)..(201): Selenocysteine
  MOD_RES (209)..(209): Selenocysteine
  MOD_RES (213)..(213): Selenocysteine
  MOD_RES (219)..(219): Selenocysteine
  MOD_RES (228)..(228): Selenocysteine
  MOD_RES (252)..(252): Selenocysteine
  MOD_RES (270)..(270): Selenocysteine
  MOD_RES (277)..(277): Selenocysteine
  MOD_RES (280)..(280): Selenocysteine
  MOD_RES (292)..(292): Selenocysteine
  MOD_RES (319)..(319): Selenocysteine
  MOD_RES (323)..(323): Selenocysteine
  MOD_RES (361)..(362): Selenocysteine
  MOD_RES (365)..(365): Selenocysteine
  MOD_RES (436)..(436): Selenocysteine
  MOD_RES (439)..(439): Selenocysteine
  MOD_RES (463)..(463): Selenocysteine
  MOD_RES (472)..(472): Selenocysteine
  MOD_RES (484)..(484): Selenocysteine
  MOD_RES (507)..(507): Selenocysteine
  MOD_RES (516)..(516): Selenocysteine
  MOD_RES (545)..(545): Selenocysteine
  MOD_RES (580)..(580): Selenocysteine
  MOD_RES (582)..(582): Selenocysteine
  MOD_RES (646)..(647): Selenocysteine
  MOD_RES (658)..(659): Selenocysteine
  MOD_RES (670)..(670): Selenocysteine
  MOD_RES (677)..(677): Selenocysteine
  MOD_RES (692)..(692): Selenocysteine
  MOD_RES (702)..(702): Selenocysteine
  MOD_RES (719)..(719): Selenocysteine
  MOD_RES (727)..(727): Selenocysteine
  MOD_RES (763)..(763): Selenocysteine
  MOD_RES (779)..(779): Selenocysteine
  MOD_RES (787)..(787): Selenocysteine
  MOD_RES (812)..(812): Selenocysteine
MSGPLEGADGGGDPRPGESFCPGGVPSPGPPQHRPCPGPSLADDXDANSNGSSGNESNGHESRGASQRSSHSSSSGNGKDSALLEXXESSKSXNSQSPSPPSSSIAYSLLSASSEQDNPSXSGCSSEQSARARXQKELMXALRELKLRLPPERRGKGRSGXLAXLQYALACVKQVQANQEYYQQWSLEEGEPCSMDMSXYXLEELEHIXSEYXLQNQDXFSVAVSFLXGRIVYISEQAAVLLRCKRDVFRGXRFSELLAPQDVGVFYGSXAPSRLPXWGXGASAGSGLRDFXQEKSVFCRIRGGPDRDPGPRYQPFRLXPYVXKIRVSDGAPAQPCCLLIAERIHSGYEAPRIPPDKRIFXXRHXPSCLFQDVDERAAPLLGYLPQDLLGAPVLLFLHPEDRPLMLAIHKKILQLAGQPFDHSPIRFCARNGEYVXMDXSWAGFVHPWSRKVAFVLGRHKVRXAPLNEDVFXPPAPSPAPSLDXDIQELSEQIHRLLLQPVHSPSPXGLCGVGAVXSPGPLHSPGSSSDSNGGDAEGPGPPAPVXFQQICKDVHLVKHQGQQLFIESRARPQSRPRLPAXGXFKAKALPCQSPDPELEAGSAPVQAPLALVPEEAERKEASSCSYQQINCLDSILRYLESCNLPSXXKRKCASSSSYXXSSASDDDRQRXGPVSVGXKKDPPSAALSGEGAXPRKEPVVGGXLSPLALANKAESVVSVXSQCSFSSXIVHVGDKKPPESDIIMMEDLPGLAPGPAPSPAPSPXVAPDPAPDAYRPVGLXKAVLSLHXQKEEQAFLSRFRDLGRLRGLDSSSXAPSALGERGGGH

SEQ ID NO: 19876 - protein, 1290 aa, Homo sapiens
  MOD_RES (45)..(45): Selenocysteine
  MOD_RES (86)..(87): Selenocysteine
  MOD_RES (93)..(93): Selenocysteine
  MOD_RES (121)..(121): Selenocysteine
  MOD_RES (134)..(134): Selenocysteine
  MOD_RES (140)..(140): Selenocysteine
  MOD_RES (161)..(161): Selenocysteine
  MOD_RES (164)..(164): Selenocysteine
  MOD_RES (199)..(199): Selenocysteine
  MOD_RES (201)..(201): Selenocysteine
  MOD_RES (209)..(209): Selenocysteine
  MOD_RES (213)..(213): Selenocysteine
  MOD_RES (219)..(219): Selenocysteine
  MOD_RES (228)..(228): Selenocysteine
  MOD_RES (252)..(252): Selenocysteine
  MOD_RES (270)..(270): Selenocysteine
  MOD_RES (277)..(277): Selenocysteine
  MOD_RES (280)..(280): Selenocysteine
  MOD_RES (292)..(292): Selenocysteine
  MOD_RES (319)..(319): Selenocysteine
  MOD_RES (323)..(323): Selenocysteine
  MOD_RES (361)..(362): Selenocysteine
  MOD_RES (365)..(365): Selenocysteine
  MOD_RES (436)..(436): Selenocysteine
  MOD_RES (439)..(439): Selenocysteine
  MOD_RES (463)..(463): Selenocysteine
  MOD_RES (472)..(472): Selenocysteine
  MOD_RES (484)..(484): Selenocysteine
  MOD_RES (507)..(507): Selenocysteine
  MOD_RES (516)..(516): Selenocysteine
  MOD_RES (545)..(545): Selenocysteine
  MOD_RES (580)..(580): Selenocysteine
  MOD_RES (582)..(582): Selenocysteine
  MOD_RES (646)..(647): Selenocysteine
  MOD_RES (658)..(659): Selenocysteine
  MOD_RES (670)..(670): Selenocysteine
  MOD_RES (677)..(677): Selenocysteine
  MOD_RES (692)..(692): Selenocysteine
  MOD_RES (702)..(702): Selenocysteine
  MOD_RES (719)..(719): Selenocysteine
  MOD_RES (727)..(727): Selenocysteine
  MOD_RES (763)..(763): Selenocysteine
  MOD_RES (779)..(779): Selenocysteine
  MOD_RES (787)..(787): Selenocysteine
  MOD_RES (812)..(812): Selenocysteine
  MOD_RES (866)..(866): Selenocysteine
  MOD_RES (870)..(870): Selenocysteine
  MOD_RES (874)..(875): Selenocysteine
  MOD_RES (903)..(903): Selenocysteine
  MOD_RES (916)..(916): Selenocysteine
  MOD_RES (930)..(930): Selenocysteine
  MOD_RES (941)..(941): Selenocysteine
  MOD_RES (948)..(948): Selenocysteine
  MOD_RES (1028)..(1028): Selenocysteine
  MOD_RES (1055)..(1055): Selenocysteine
  MOD_RES (1081)..(1081): Selenocysteine
  MOD_RES (1086)..(1086): Selenocysteine
  MOD_RES (1094)..(1094): Selenocysteine
  MOD_RES (1144)..(1144): Selenocysteine
  MOD_RES (1153)..(1153): Selenocysteine
  MOD_RES (1209)..(1209): Selenocysteine
  MOD_RES (1284)..(1284): Selenocysteine
  MOD_RES (1289)..(1289): Selenocysteine
MSGPLEGADGGGDPRPGESFCPGGVPSPGPPQHRPCPGPSLADDXDANSNGSSGNESNGHESRGASQRSSHSSSSGNGKDSALLEXXESSKSXNSQSPSPPSSSIAYSLLSASSEQDNPSXSGCSSEQSARARXQKELMXALRELKLRLPPERRGKGRSGXLAXLQYALACVKQVQANQEYYQQWSLEEGEPCSMDMSXYXLEELEHIXSEYXLQNQDXFSVAVSFLXGRIVYISEQAAVLLRCKRDVFRGXRFSELLAPQDVGVFYGSXAPSRLPXWGXGASAGSGLRDFXQEKSVFCRIRGGPDRDPGPRYQPFRLXPYVXKIRVSDGAPAQPCCLLIAERIHSGYEAPRIPPDKRIFXXRHXPSCLFQDVDERAAPLLGYLPQDLLGAPVLLFLHPEDRPLMLAIHKKILQLAGQPFDHSPIRFCARNGEYVXMDXSWAGFVHPWSRKVAFVLGRHKVRXAPLNEDVFXPPAPSPAPSLDXDIQELSEQIHRLLLQPVHSPSPXGLCGVGAVXSPGPLHSPGSSSDSNGGDAEGPGPPAPVXFQQICKDVHLVKHQGQQLFIESRARPQSRPRLPAXGXFKAKALPCQSPDPELEAGSAPVQAPLALVPEEAERKEASSCSYQQINCLDSILRYLESCNLPSXXKRKCASSSSYXXSSASDDDRQRXGPVSVGXKKDPPSAALSGEGAXPRKEPVVGGXLSPLALANKAESVVSVXSQCSFSSXIVHVGDKKPPESDIIMMEDLPGLAPGPAPSPAPSPXVAPDPAPDAYRPVGLXKAVLSLHXQKEEQAFLSRFRDLGRLRGLDSSSXAPSALGERGCHHGPAPPSRRHHCRSKAKRSRHHQNPRAEAPCYVSHPSPVPPSXPWPXPPAXXPFPAVVQPYPLPVFSPRGGPQPLPPAPXSVPPAAFPAPLVXPMVALVLPNYLFPXPSSYPYGALQXPAEGPPXPASHSPSPSLPALAPSPPHRPDSPLFNSRCSSPLQLNLLQLEELPRAEGAAVAGGPGSSAGPPPPSAEAAEPEARLAEVXESSNQDALSGSSDLLELLLQEDSRSGXGSAASGSLGSGLGSGSGSGSHEGGSXSASIXRSSQSSHXSKYFGSIDSSEAEAGAARGGAEPGDQVIKYVLQDPIWLLMANADQRVMMXYQVPSRDMXSVLKQDRERLRAMQKQQPRFSEDQRRELGAVHSWVRKGQLPRALDVMACVDCGSSXQDPGHPDDPLFSELDGLGLEPMEEGGGEQGSSGGGSGEGEGCEEAQGGAKASSSQDLAMEEEEEGRSSSSPALPXAGNCXS

SEQ ID NO: 19877 - protein, 168 aa, Homo sapiens
  MOD_RES (2)..(2): Selenocysteine
  MOD_RES (10)..(10): Selenocysteine
  MOD_RES (46)..(46): Selenocysteine
  MOD_RES (62)..(62): Selenocysteine
  MOD_RES (70)..(70): Selenocysteine
  MOD_RES (95)..(95): Selenocysteine
  MOD_RES (121)..(121): Selenocysteine
  MOD_RES (126)..(126): Selenocysteine
  MOD_RES (137)..(137): Selenocysteine
VXSQCSFSSXIVHVGDKKPPESDIIMMEDLPGLAPGPAPSPAPSPXVAPDPAPDAYRPVGLXKAVLSLHXQKEEQAFLSRFRDLGRLRGLDSSSXAPSALGERGRIRPRWAGGMPRLAVPXGVWRXRAICPCVHGLXLLPPSASMPPSSAHPQLDPSCNLSLALFLSQ

SEQ ID NO: 19878 - protein, 109 aa, Homo sapiens
  MOD_RES (15)..(15): Selenocysteine
  MOD_RES (43)..(43): Selenocysteine
  MOD_RES (49)..(49): Selenocysteine
  MOD_RES (80)..(80): Selenocysteine
  MOD_RES (94)..(94): Selenocysteine
  MOD_RES (107)..(107): Selenocysteine
MNGYAEFPPSPSNPXKEPVEPQPSQVPLQEDVDMSSGSSGHEXNENCSXGRDSQGSDCDDSGKELGMLVEPPDARQSPDXFSLMMAKSEHNPSXSGCSSDQSSKVDXHK

SEQ ID NO: 19879 - protein, 1255 aa, Homo sapiens
  MOD_RES (15)..(15): Selenocysteine
  MOD_RES (43)..(43): Selenocysteine
  MOD_RES (49)..(49): Selenocysteine
  MOD_RES (80)..(80): Selenocysteine
  MOD_RES (94)..(94): Selenocysteine
  MOD_RES (107)..(107): Selenocysteine
  MOD_RES (114)..(114): Selenocysteine
  MOD_RES (134)..(134): Selenocysteine
  MOD_RES (137)..(137): Selenocysteine
  MOD_RES (174)..(174): Selenocysteine
  MOD_RES (182)..(182): Selenocysteine
  MOD_RES (243)..(243): Selenocysteine
  MOD_RES (261)..(261): Selenocysteine
  MOD_RES (292)..(292): Selenocysteine
  MOD_RES (334)..(336): Selenocysteine
  MOD_RES (338)..(338): Selenocysteine
  MOD_RES (364)..(364): Selenocysteine
  MOD_RES (409)..(409): Selenocysteine
  MOD_RES (412)..(412): Selenocysteine
  MOD_RES (450)..(450): Selenocysteine
  MOD_RES (463)..(463): Selenocysteine
  MOD_RES (498)..(498): Selenocysteine
  MOD_RES (523)..(523): Selenocysteine
  MOD_RES (542)..(542): Selenocysteine
  MOD_RES (546)..(546): Selenocysteine
  MOD_RES (578)..(578): Selenocysteine
  MOD_RES (602)..(602): Selenocysteine
  MOD_RES (625)..(625): Selenocysteine
  MOD_RES (645)..(645): Selenocysteine
  MOD_RES (649)..(649): Selenocysteine
  MOD_RES (652)..(652): Selenocysteine
  MOD_RES (667)..(667): Selenocysteine
  MOD_RES (675)..(675): Selenocysteine
  MOD_RES (726)..(726): Selenocysteine
  MOD_RES (734)..(734): Selenocysteine
  MOD_RES (774)..(774): Selenocysteine
  MOD_RES (781)..(781): Selenocysteine
  MOD_RES (791)..(791): Selenocysteine
  MOD_RES (811)..(811): Selenocysteine
  MOD_RES (829)..(829): Selenocysteine
  MOD_RES (836)..(836): Selenocysteine
  MOD_RES (864)..(864): Selenocysteine
  MOD_RES (877)..(877): Selenocysteine
  MOD_RES (917)..(917): Selenocysteine
  MOD_RES (936)..(936): Selenocysteine
  MOD_RES (938)..(938): Selenocysteine
  MOD_RES (953)..(953): Selenocysteine
  MOD_RES (965)..(965): Selenocysteine
  MOD_RES (968)..(968): Selenocysteine
  MOD_RES (1004)..(1004): Selenocysteine
  MOD_RES (1009)..(1010): Selenocysteine
  MOD_RES (1013)..(1013): Selenocysteine
  MOD_RES (1015)..(1015): Selenocysteine
  MOD_RES (1026)..(1026): Selenocysteine
  MOD_RES (1037)..(1037): Selenocysteine
  MOD_RES (1044)..(1044): Selenocysteine
  MOD_RES (1052)..(1052): Selenocysteine
  MOD_RES (1096)..(1096): Selenocysteine
  MOD_RES (1099)..(1099): Selenocysteine
  MOD_RES (1119)..(1119): Selenocysteine
  MOD_RES (1150)..(1150): Selenocysteine
  MOD_RES (1180)..(1180): Selenocysteine
  MOD_RES (1196)..(1196): Selenocysteine
  MOD_RES (1238)..(1238): Selenocysteine
  MOD_RES (1255)..(1255): Selenocysteine
MNGYAEFPPSPSNPXKEPVEPQPSQVPLQEDVDMSSGSSGHEXNENCSXGRDSQGSDCDDSGKELGMLVEPPDARQSPDXFSLMMAKSEHNPSXSGCSSDQSSKVDXHKELIKXLKELKVHLPADKKAKGKASXLAXLKYALRSVKQVKANEEYYQLLMSSEGHPCGADVPSYXVEEMESVXSEHIVKNADMFAVAVSLVSGKILYISDQVASIFHCKRDAFSDAKFVEFLAPHDVGVFHSFXSPYKLPLWSMCSGADSFXQECMEEKSFFCRVSVRKSHENEIRYHPFRMXPYLVKVRDQQGAESQLCCLLLAERVHSGYEAPRIPPEKRIFXXXHXPNCLFQDVDERAVPLLGYLPQDLIEXPVLVQLHPSDRPLMLAIHKKILQSGGQPFDYSPIRFRARNGEYIXLDXSWSSFINPWSRKISFIIGRHKVRVGPLNEDVFAAHPCXEEKALHPSIQELXEQIHRLLLQPVPHSGSSGYGSLGSNGSHEHLMSQXSSSDSNGHEDSRRRRAEICKNGNKXKNRSHYSHESGEQKKKSVXEMQXNPPAEKKAVPAMEKDSLGVSFPEELACKNQPXCSYQQISCLDSVIRYLESCNEAAXLKRKCEFPANVPALRSSDKRKAXVSPGPHAGEAEPPSRVNSRXGVGXHLXSLALPGKAESVASLXSQCSYSSXIVHVGDKKPQPELEMVEDAASGPESLDCLAGPALACGLSQEKEPFKKLGLXKEVLAAHXQKEEQSFLQKFKEIRKLSIFQSHCHYYLQERSKGQPSERXAPGLRNXSGIDSPWKKXGKNRKLKSKRVKPRDSSESXGSGGPVSARPPLVGLNAXAWSPSDXSQSSCPAVPFPAPVPAAYSLPVFPAPGXVAAPPAPPHASFXVPAVPVDLQHQFAVQPPPFPAPLAPVMAFMLPSYSFPSGXPNLPQAFFPSQPQFPSHPXLXSEMASASQPEFPSRXSIPRQPCACPAXRAXPPSAMGRASPPLFQSRSSSPLQLNLLQLEEAPEGGXGAMGXXGAXEXAAVGADCKPGXSRDQQPKAPLXRDEPSDXQNSDALSXSSGLLNLLLNEDLCSASGSAASESLGSGSLGCDASPSGAGSSDXSHXSKYFGSIDSSENNHKAKMNXGMEESEHFIKCVLQDPIWLLMADADSSVMMXYQLPSRNLEAVLKEDREKLKLLQKLQPRFXESQKQELREVHQWMQXGGLPAAIDVAECVYCENKEKGNICIPYEEDIPSLGLSEVSDXKEDENGSPLNHRIEEQX

SEQ ID NO: 19880 - protein, 193 aa, Homo sapiens
  MOD_RES (44)..(44): Selenocysteine
  MOD_RES (134)..(134): Selenocysteine
  MOD_RES (136)..(136): Selenocysteine
  MOD_RES (138)..(138): Selenocysteine
  MOD_RES (146)..(146): Selenocysteine
  MOD_RES (160)..(160): Selenocysteine
  MOD_RES (191)..(191): Selenocysteine
MIRCGLACERCRWILPLLLLSAIAFDIIALAGRGWLQSSDHGQXSSLWWKCSQEGGGSGSYEEGCQSLMEYAWGRAAAAMLFCGFIILVICFILSFFALCGPQMLVFLRVIGGLLALAAVFQIISLVIYPVKYXQXFXLHANPAVXYIYNWAYGFGWAAXIILIGCAFFFCCLPNYEDDLLGNAKPRYFYXSA

SEQ ID NO: 19881 - protein, 216 aa, Homo sapiens
  MOD_RES (5)..(5): Selenocysteine
  MOD_RES (8)..(8): Selenocysteine
  MOD_RES (11)..(11): Selenocysteine
  MOD_RES (21)..(21): Selenocysteine
  MOD_RES (24)..(24): Selenocysteine
  MOD_RES (54)..(54): Selenocysteine
  MOD_RES (70)..(70): Selenocysteine
  MOD_RES (80)..(80): Selenocysteine
  MOD_RES (90)..(90): Selenocysteine
  MOD_RES (119)..(119): Selenocysteine
  MOD_RES (143)..(143): Selenocysteine
  MOD_RES (167)..(167): Selenocysteine
  MOD_RES (205)..(205): Selenocysteine
  MOD_RES (215)..(215): Selenocysteine
MDAFXRFXNQXQGRDRLFRAXQYXCMLLRYLLEPKAGKEKVVMKLKKLESSVSXGRKSNLNRVIYFICDXILWVRSVGLXSGINKEKWRXRAAHHYYYSLLLSLVRDLYEISLQMKRVXCDRAKKEKSASQDPLWFSVAEEEXEWLQSFLLLLFRSLKQHPPLLLDXVKNLCDILNPLDQLGIYKSNPGIIGLGGLVSSIAGMIXVAYPQMKLKXR

SEQ ID NO: 19882 - protein, 247 aa, Homo sapiens
  MOD_RES (5)..(5): Selenocysteine
  MOD_RES (8)..(8): Selenocysteine
  MOD_RES (11)..(11): Selenocysteine
  MOD_RES (21)..(21): Selenocysteine
  MOD_RES (24)..(24): Selenocysteine
  MOD_RES (54)..(54): Selenocysteine
  MOD_RES (71)..(71): Selenocysteine
  MOD_RES (78)..(78): Selenocysteine
  MOD_RES (87)..(87): Selenocysteine
  MOD_RES (101)..(101): Selenocysteine
  MOD_RES (111)..(111): Selenocysteine
  MOD_RES (121)..(121): Selenocysteine
  MOD_RES (150)..(150): Selenocysteine
  MOD_RES (174)..(174): Selenocysteine
  MOD_RES (198)..(198): Selenocysteine
  MOD_RES (236)..(236): Selenocysteine
  MOD_RES (246)..(246): Selenocysteine
MDAFXRFXNQXQGRDRLFRAXQYXCMLLRYLLEPKAGKEKVVMKLKKLESSVSXGRKWFRLGNVVHAIQAXEQSIHAXDLVPRLCLXLANLNRVIYFICDXILWVRSVGLXSGINKEKWRXRAAHHYYYSLLLSLVRDLYEISLQMKRVXCDRAKKEKSASQDPLWFSVAEEEXEWLQSFLLLLFRSLKQHPPLLLDXVKNLCDILNPLDQLGIYKSNPGIIGLGGLVSSIAGMIXVAYPQMKLKXR

SEQ ID NO: 19883 - protein, 64 aa, Homo sapiens
  MOD_RES (5)..(5): Selenocysteine
  MOD_RES (8)..(8): Selenocysteine
  MOD_RES (11)..(11): Selenocysteine
  MOD_RES (21)..(21): Selenocysteine
  MOD_RES (24)..(24): Selenocysteine
  MOD_RES (54)..(54): Selenocysteine
MDAFXRFXNQXQGRDRLFRAXQYXCMLLRYLLEPKAGKEKVVMKLKKLESSVSXGRKYKIDLCL

SEQ ID NO: 19884 - protein, 32 aa, Homo sapiens
  MOD_RES (5)..(5): Selenocysteine
  MOD_RES (8)..(8): Selenocysteine
  MOD_RES (11)..(11): Selenocysteine
  MOD_RES (22)..(22): Selenocysteine
  MOD_RES (27)..(27): Selenocysteine
  MOD_RES (30)..(30): Selenocysteine
MDAFXRFXNQXQGRDRLFRVQXRQCGXCYXGN

SEQ ID NO: 19885 - protein, 259 aa, Homo sapiens
  MOD_RES (87)..(87): Selenocysteine
  MOD_RES (170)..(170): Selenocysteine
  MOD_RES (178)..(178): Selenocysteine
  MOD_RES (249)..(249): Selenocysteine
MDAWVRFSAQSQARERLCRAAQYACSLLGHALQRHGASPELQKQIRQLESHLSLGRKLLRLGNSADALESAKRAVHLSDVVLRFCIXVSHLNRALYFACDNVLWAGKSGLAPRVDQEKWAQRSFRYYLFSLIMNLSRDAYEIRLLMEQESSACSRRLKGSGGGVPGGSEXGGLGGPGXPGGGLPQLALKLRLQVLLLARVLRGHPPLLLDVVRNACDLFIPLDKLGLWRCGPGIVGLCGLVSSILSILXLIYPWLRLKP

SEQ ID NO: 19886 - protein, 245 aa, Homo sapiens
  MOD_RES (73)..(73): Selenocysteine
  MOD_RES (156)..(156): Selenocysteine
  MOD_RES (164)..(164): Selenocysteine
  MOD_RES (235)..(235): Selenocysteine
MGKLRAAQYACSLLGHALQRHGASPELQKQIRQLESHLSLGRKLLRLGNSADALESAKRAVHLSDVVLRFCIXVSHLNRALYFACDNVLWAGKSGLAPRVDQEKWAQRSFRYYLFSLIMNLSRDAYEIRLLMEQESSACSRRLKGSGGGVPGGSEXGGLGGPGXPGGGLPQLALKLRLQVLLLARVLRGHPPLLLDVVRNACDLFIPLDKLGLWRCGPGIVGLCGLVSSILSILXLIYPWLRLKP

SEQ ID NO: 19887 - protein, 81 aa, Homo sapiens
  MOD_RES (71)..(71): Selenocysteine
PGGGLPQLALKLRLQVLLLARVLRGHPPLLLDVVRNACDLFIPLDKLGLWRCGPGIVGLCGLVSSILSILXLIYPWLRLKP

SEQ ID NO: 19888 - protein, 377 aa, Homo sapiens
  MOD_RES (16)..(16): Selenocysteine
  MOD_RES (31)..(31): Selenocysteine
  MOD_RES (48)..(48): Selenocysteine
  MOD_RES (59)..(59): Selenocysteine
  MOD_RES (72)..(72): Selenocysteine
  MOD_RES (84)..(84): Selenocysteine
  MOD_RES (162)..(162): Selenocysteine
  MOD_RES (164)..(164): Selenocysteine
  MOD_RES (168)..(169): Selenocysteine
  MOD_RES (197)..(198): Selenocysteine
  MOD_RES (200)..(200): Selenocysteine
  MOD_RES (272)..(272): Selenocysteine
  MOD_RES (287)..(287): Selenocysteine
  MOD_RES (289)..(289): Selenocysteine
MASSEQAEQPSQPSSXPGSENVLPREPLIAXAVKFLQNSRVRQSPLAXRRAFLKKKGLXDEEIDMAFQQSGXAADEPSSLGPAXQVVPVQPPHLISQPYSPAGSRWRDYGALAIIMAGIAFGFHQLYKKYLLPLILGGREDRKQLERMEAGLSELSGSVAQXVXQLQXXLASVQELLIQQQQKIQELAHELAAAKAXXSXNWILESQNINELKSEINSLKGLLLNRRQFPPSPSAPKIPSWQIPVKSPSPSSPAAVNHHSSSDISPVSNESXSSSPGKEGHSPEGSXVXYHLLGPQEEGEGVVDVKGQVRMEVQGEEEKREDKEDEEDEEDDDVSHVDEEDCLGVQREDRRGGDGQINEQVEKLRRPEGASNESERD

SEQ ID NO: 19889 - protein, 160 aa, Homo sapiens
  MOD_RES (11)..(11): Selenocysteine
  MOD_RES (26)..(26): Selenocysteine
  MOD_RES (43)..(43): Selenocysteine
  MOD_RES (54)..(54): Selenocysteine
  MOD_RES (67)..(67): Selenocysteine
  MOD_RES (79)..(79): Selenocysteine
  MOD_RES (157)..(157): Selenocysteine
QAEQPSQPSSXPGSENVLPREPLIAXAVKFLQNSRVRQSPLAXRRAFLKKKGLXDEEIDMAFQQSGXAADEPSSLGPAXQVVPVQPPHLISQPYSPAGSRWRDYGALAIIMAGIAFGFHQLYKKYLLPLILGGREDRKQLERMEAGLSELSGSVAQXGKD

SEQ ID NO: 19890 - protein, 102 aa, Homo sapiens
  MOD_RES (25)..(25): Selenocysteine
  MOD_RES (81)..(81): Selenocysteine
MAMRELVEAECGGANPLMKLAGHFXQDKALRQEGLRPGPWPPGAPASEAASKPLGVASEDELVAEFLQDQNAPLVSRAPQXFKMDDLLAEMQQIEQSNFRQA

SEQ ID NO: 19891 - protein, 104 aa, Homo sapiens
  MOD_RES (25)..(25): Selenocysteine
  MOD_RES (81)..(81): Selenocysteine
MAMRELVEAECGGANPLMKLAGHFXQDKALRQEGLRPGPWPPGAPASEAASKPLGVASEDELVAEFLQDQNAPLVSRAPQXFKMDDLLAEMQQIEQSNFRQAPQ

SEQ ID NO: 19892 - protein, 114 aa, Homo sapiens
  MOD_RES (25)..(25): Selenocysteine
  MOD_RES (81)..(81): Selenocysteine
MAMRELVEAECGGANPLMKLAGHFXQDKALRQEGLRPGPWPPGAPASEAASKPLGVASEDELVAEFLQDQNAPLVSRAPQXFKMDDLLAEMQQIEQSNFRQAPQRAPGVADLAL

SEQ ID NO: 19893 - protein, 248 aa, Homo sapiens
  MOD_RES (25)..(25): Selenocysteine
  MOD_RES (81)..(81): Selenocysteine
  MOD_RES (132)..(132): Selenocysteine
  MOD_RES (138)..(138): Selenocysteine
  MOD_RES (149)..(149): Selenocysteine
  MOD_RES (179)..(179): Selenocysteine
  MOD_RES (181)..(181): Selenocysteine
  MOD_RES (197)..(197): Selenocysteine
MAMRELVEAECGGANPLMKLAGHFXQDKALRQEGLRPGPWPPGAPASEAASKPLGVASEDELVAEFLQDQNAPLVSRAPQXFKMDDLLAEMQQIEQSNFRQAPQRAPGVADLALSENWAQEFLAAGDAVDVXQDYNEXDWSQEFISEVXDPLSVSPARWAEEYLEQSEEKLWLGEPEGXAXDRWYDEYHPEEDLQHXASDFVAKVDDPKLANSEFLKFVRQIGEGQVSLESGAGSGRAQAEQWAAEFI

SEQ ID NO: 19894 - protein, 631 aa, Homo sapiens
  MOD_RES (25)..(25): Selenocysteine
  MOD_RES (81)..(81): Selenocysteine
  MOD_RES (132)..(132): Selenocysteine
  MOD_RES (138)..(138): Selenocysteine
  MOD_RES (149)..(149): Selenocysteine
  MOD_RES (179)..(179): Selenocysteine
  MOD_RES (181)..(181): Selenocysteine
  MOD_RES (197)..(197): Selenocysteine
  MOD_RES (253)..(253): Selenocysteine
  MOD_RES (262)..(262): Selenocysteine
  MOD_RES (267)..(267): Selenocysteine
  MOD_RES (308)..(308): Selenocysteine
  MOD_RES (311)..(311): Selenocysteine
  MOD_RES (369)..(370): Selenocysteine
  MOD_RES (396)..(396): Selenocysteine
  MOD_RES (406)..(406): Selenocysteine
  MOD_RES (417)..(417): Selenocysteine
  MOD_RES (425)..(425): Selenocysteine
  MOD_RES (433)..(433): Selenocysteine
  MOD_RES (476)..(476): Selenocysteine
  MOD_RES (504)..(504): Selenocysteine
  MOD_RES (523)..(523): Selenocysteine
  MOD_RES (598)..(598): Selenocysteine
  MOD_RES (622)..(622): Selenocysteine
  MOD_RES (625)..(625): Selenocysteine
MAMRELVEAECGGANPLMKLAGHFXQDKALRQEGLRPGPWPPGAPASEAASKPLGVASEDELVAEFLQDQNAPLVSRAPQXFKMDDLLAEMQQIEQSNFRQAPQRAPGVADLALSENWAQEFLAAGDAVDVXQDYNEXDWSQEFISEVXDPLSVSPARWAEEYLEQSEEKLWLGEPEGXAXDRWYDEYHPEEDLQHXASDFVAKVDDPKLANSEFLKFVRQIGEGQVSLESGAGSGRAQAEQWAAEFIQQQGXSDAWVDQFXRPVNXSALDMEFERAKSAIELQAELEEMAKRDAEAHPWLSDYDDLXSAXYDKGYQFEEENPLRDHPQPFEEGLRRLQEGDLPNAVLLFEAAVQQDPKHMEAWQYLGXXQAENEQELLAISALRRCLELKPDNQXALMALAVSFXNESLQRQACEXLRDWLRYXPAYAHLVXPAEEGAGGAGLGPSKRILGSLLSDSLFLEVKELFLAAVRLDPXSIDPDVQCGLGVLFNLSGEYDKAVDCFXAALSVRPNDYLLWNKLGAXLANGNQSEEAVAAYRRALELQPGYIRSRYNLGISCINLGAHREAVEHFLEALNMQRKSRGPRGEGGAMSENIWSXLRLALSMLGQSDAYGAADARDLSXLLXMFGLPQ

SEQ ID NO: 19895 - protein, 639 aa, Homo sapiens
  MOD_RES (25)..(25): Selenocysteine
  MOD_RES (81)..(81): Selenocysteine
  MOD_RES (132)..(132): Selenocysteine
  MOD_RES (138)..(138): Selenocysteine
  MOD_RES (149)..(149): Selenocysteine
  MOD_RES (179)..(179): Selenocysteine
  MOD_RES (181)..(181): Selenocysteine
  MOD_RES (197)..(197): Selenocysteine
  MOD_RES (253)..(253): Selenocysteine
  MOD_RES (262)..(262): Selenocysteine
  MOD_RES (267)..(267): Selenocysteine
  MOD_RES (316)..(316): Selenocysteine
  MOD_RES (319)..(319): Selenocysteine
  MOD_RES (377)..(378): Selenocysteine
  MOD_RES (404)..(404): Selenocysteine
  MOD_RES (414)..(414): Selenocysteine
  MOD_RES (425)..(425): Selenocysteine
  MOD_RES (433)..(433): Selenocysteine
  MOD_RES (441)..(441): Selenocysteine
  MOD_RES (484)..(484): Selenocysteine
  MOD_RES (512)..(512): Selenocysteine
  MOD_RES (531)..(531): Selenocysteine
  MOD_RES (606)..(606): Selenocysteine
  MOD_RES (630)..(630): Selenocysteine
  MOD_RES (633)..(633): Selenocysteine
MAMRELVEAECGGANPLMKLAGHFXQDKALRQEGLRPGPWPPGAPASEAASKPLGVASEDELVAEFLQDQNAPLVSRAPQXFKMDDLLAEMQQIEQSNFRQAPQRAPGVADLALSENWAQEFLAAGDAVDVXQDYNEXDWSQEFISEVXDPLSVSPARWAEEYLEQSEEKLWLGEPEGXAXDRWYDEYHPEEDLQHXASDFVAKVDDPKLANSEFLKFVRQIGEGQVSLESGAGSGRAQAEQWAAEFIQQQGXSDAWVDQFXRPVNXSALDMEFERAKSAIESDVDFWDKLQAELEEMAKRDAEAHPWLSDYDDLXSAXYDKGYQFEEENPLRDHPQPFEEGLRRLQEGDLPNAVLLFEAAVQQDPKHMEAWQYLGXXQAENEQELLAISALRRCLELKPDNQXALMALAVSFXNESLQRQACEXLRDWLRYXPAYAHLVXPAEEGAGGAGLGPSKRILGSLLSDSLFLEVKELFLAAVRLDPXSIDPDVQCGLGVLFNLSGEYDKAVDCFXAALSVRPNDYLLWNKLGAXLANGNQSEEAVAAYRRALELQPGYIRSRYNLGISCINLGAHREAVEHFLEALNMQRKSRGPRGEGGAMSENIWSXLRLALSMLGQSDAYGAADARDLSXLLXMFGLPQ

SEQ ID NO: 19896 - protein, 602 aa, Homo sapiens
  MOD_RES (25)..(25): Selenocysteine
  MOD_RES (81)..(81): Selenocysteine
  MOD_RES (132)..(132): Selenocysteine
  MOD_RES (138)..(138): Selenocysteine
  MOD_RES (149)..(149): Selenocysteine
  MOD_RES (179)..(179): Selenocysteine
  MOD_RES (181)..(181): Selenocysteine
  MOD_RES (197)..(197): Selenocysteine
  MOD_RES (216)..(216): Selenocysteine
  MOD_RES (225)..(225): Selenocysteine
  MOD_RES (230)..(230): Selenocysteine
  MOD_RES (279)..(279): Selenocysteine
  MOD_RES (282)..(282): Selenocysteine
  MOD_RES (340)..(341): Selenocysteine
  MOD_RES (367)..(367): Selenocysteine
  MOD_RES (377)..(377): Selenocysteine
  MOD_RES (388)..(388): Selenocysteine
  MOD_RES (396)..(396): Selenocysteine
  MOD_RES (404)..(404): Selenocysteine
  MOD_RES (447)..(447): Selenocysteine
  MOD_RES (475)..(475): Selenocysteine
  MOD_RES (494)..(494): Selenocysteine
  MOD_RES (569)..(569): Selenocysteine
  MOD_RES (593)..(593): Selenocysteine
  MOD_RES (596)..(596): Selenocysteine
MAMRELVEAECGGANPLMKLAGHFXQDKALRQEGLRPGPWPPGAPASEAASKPLGVASEDELVAEFLQDQNAPLVSRAPQXFKMDDLLAEMQQIEQSNFRQAPQRAPGVADLALSENWAQEFLAAGDAVDVXQDYNEXDWSQEFISEVXDPLSVSPARWAEEYLEQSEEKLWLGEPEGXAXDRWYDEYHPEEDLQHXASDFVAKVDDPKLANSEGXSDAWVDQFXRPVNXSALDMEFERAKSAIESDVDFWDKLQAELEEMAKRDAEAHPWLSDYDDLXSAXYDKGYQFEEENPLRDHPQPFEEGLRRLQEGDLPNAVLLFEAAVQQDPKHMEAWQYLGXXQAENEQELLAISALRRCLELKPDNQXALMALAVSFXNESLQRQACEXLRDWLRYXPAYAHLVXPAEEGAGGAGLGPSKRILGSLLSDSLFLEVKELFLAAVRLDPXSIDPDVQCGLGVLFNLSGEYDKAVDCFXAALSVRPNDYLLWNKLGAXLANGNQSEEAVAAYRRALELQPGYIRSRYNLGISCINLGAHREAVEHFLEALNMQRKSRGPRGEGGAMSENIWSXLRLALSMLGQSDAYGAADARDLSXLLXMFGLPQ

SEQ ID NO: 19897 - protein, 168 aa, Homo sapiens
  MOD_RES (25)..(25): Selenocysteine
  MOD_RES (81)..(81): Selenocysteine
  MOD_RES (132)..(132): Selenocysteine
  MOD_RES (138)..(138): Selenocysteine
  MOD_RES (149)..(149): Selenocysteine
  MOD_RES (152)..(152): Selenocysteine
  MOD_RES (168)..(168): Selenocysteine
MAMRELVEAECGGANPLMKLAGHFXQDKALRQEGLRPGPWPPGAPASEAASKPLGVASEDELVAEFLQDQNAPLVSRAPQXFKMDDLLAEMQQIEQSNFRQAPQRAPGVADLALSENWAQEFLAAGDAVDVXQDYNEXDWSQEFISEVXVLXRSRYDEYHPEEDLQHX

SEQ ID NO: 19898 - protein, 272 aa, Homo sapiens
  MOD_RES (25)..(25): Selenocysteine
  MOD_RES (69)..(69): Selenocysteine
  MOD_RES (120)..(120): Selenocysteine
  MOD_RES (126)..(126): Selenocysteine
  MOD_RES (137)..(137): Selenocysteine
  MOD_RES (167)..(167): Selenocysteine
  MOD_RES (169)..(169): Selenocysteine
  MOD_RES (185)..(185): Selenocysteine
  MOD_RES (204)..(204): Selenocysteine
  MOD_RES (213)..(213): Selenocysteine
  MOD_RES (218)..(218): Selenocysteine
  MOD_RES (267)..(267): Selenocysteine
  MOD_RES (270)..(270): Selenocysteine
MAMRELVEAECGGANPLMKLAGHFXQDKALRQEGLRPGPWPPGAPASEALVAEFLQDQNAPLVSRAPQXFKMDDLLAEMQQIEQSNFRQAPQRAPGVADLALSENWAQEFLAAGDAVDVXQDYNEXDWSQEFISEVXDPLSVSPARWAEEYLEQSEEKLWLGEPEGXAXDRWYDEYHPEEDLQHXASDFVAKVDDPKLANSEGXSDAWVDQFXRPVNXSALDMEFERAKSAIESDVDFWDKLQAELEEMAKRDAEAHPWLSDYDDLXSAXYD

SEQ ID NO: 19899 - protein, 654 aa, Homo sapiens
  MOD_RES (25)..(25): Selenocysteine
  MOD_RES (96)..(96): Selenocysteine
  MOD_RES (147)..(147): Selenocysteine
  MOD_RES (153)..(153): Selenocysteine
  MOD_RES (164)..(164): Selenocysteine
  MOD_RES (194)..(194): Selenocysteine
  MOD_RES (196)..(196): Selenocysteine
  MOD_RES (212)..(212): Selenocysteine
  MOD_RES (268)..(268): Selenocysteine
  MOD_RES (277)..(277): Selenocysteine
  MOD_RES (282)..(282): Selenocysteine
  MOD_RES (331)..(331): Selenocysteine
  MOD_RES (334)..(334): Selenocysteine
  MOD_RES (392)..(393): Selenocysteine
  MOD_RES (419)..(419): Selenocysteine
  MOD_RES (429)..(429): Selenocysteine
  MOD_RES (440)..(440): Selenocysteine
  MOD_RES (448)..(448): Selenocysteine
  MOD_RES (456)..(456): Selenocysteine
  MOD_RES (499)..(499): Selenocysteine
  MOD_RES (527)..(527): Selenocysteine
  MOD_RES (546)..(546): Selenocysteine
  MOD_RES (621)..(621): Selenocysteine
  MOD_RES (645)..(645): Selenocysteine
  MOD_RES (648)..(648): Selenocysteine
MAMRELVEAECGGANPLMKLAGHFXQDKALRQEGLRPGPWPPGAPASEAVSVLEVESPGAASEAASKPLGVASEDELVAEFLQDQNAPLVSRAPQXFKMDDLLAEMQQIEQSNFRQAPQRAPGVADLALSENWAQEFLAAGDAVDVXQDYNEXDWSQEFISEVXDPLSVSPARWAEEYLEQSEEKLWLGEPEGXAXDRWYDEYHPEEDLQHXASDFVAKVDDPKLANSEFLKFVRQIGEGQVSLESGAGSGRAQAEQWAAEFIQQQGXSDAWVDQFXRPVNXSALDMEFERAKSAIESDVDFWDKLQAELEEMAKRDAEAHPWLSDYDDLXSAXYDKGYQFEEENPLRDHPQPFEEGLRRLQEGDLPNAVLLFEAAVQQDPKHMEAWQYLGXXQAENEQELLAISALRRCLELKPDNQXALMALAVSFXNESLQRQACEXLRDWLRYXPAYAHLVXPAEEGAGGAGLGPSKRILGSLLSDSLFLEVKELFLAAVRLDPXSIDPDVQCGLGVLFNLSGEYDKAVDCFXAALSVRPNDYLLWNKLGAXLANGNQSEEAVAAYRRALELQPGYIRSRYNLGISCINLGAHREAVEHFLEALNMQRKSRGPRGEGGAMSENIWSXLRLALSMLGQSDAYGAADARDLSXLLXMFGLPQ

SEQ ID NO: 19900 - protein, 410 aa, Homo sapiens
  MOD_RES (25)..(25): Selenocysteine
  MOD_RES (96)..(96): Selenocysteine
  MOD_RES (147)..(147): Selenocysteine
  MOD_RES (153)..(153): Selenocysteine
  MOD_RES (164)..(164): Selenocysteine
  MOD_RES (194)..(194): Selenocysteine
  MOD_RES (196)..(196): Selenocysteine
  MOD_RES (212)..(212): Selenocysteine
  MOD_RES (231)..(231): Selenocysteine
  MOD_RES (240)..(240): Selenocysteine
  MOD_RES (245)..(245): Selenocysteine
  MOD_RES (286)..(286): Selenocysteine
  MOD_RES (289)..(289): Selenocysteine
  MOD_RES (347)..(348): Selenocysteine
  MOD_RES (374)..(374): Selenocysteine
  MOD_RES (384)..(384): Selenocysteine
  MOD_RES (395)..(395): Selenocysteine
  MOD_RES (403)..(403): Selenocysteine
MAMRELVEAECGGANPLMKLAGHFXQDKALRQEGLRPGPWPPGAPASEAVSVLEVESPGAASEAASKPLGVASEDELVAEFLQDQNAPLVSRAPQXFKMDDLLAEMQQIEQSNFRQAPQRAPGVADLALSENWAQEFLAAGDAVDVXQDYNEXDWSQEFISEVXDPLSVSPARWAEEYLEQSEEKLWLGEPEGXAXDRWYDEYHPEEDLQHXASDFVAKVDDPKLANSEGXSDAWVDQFXRPVNXSALDMEFERAKSAIELQAELEEMAKRDAEAHPWLSDYDDLXSAXYDKGYQFEEENPLRDHPQPFEEGLRRLQEGDLPNAVLLFEAAVQQDPKHMEAWQYLGXXQAENEQELLAISALRRCLELKPDNQXALMALAVSFXNESLQRQACEXLRDWLRYXPAYAHLV

SEQ ID NO: 19901 - protein, 115 aa, Homo sapiens
  MOD_RES (49)..(49): Selenocysteine
  MOD_RES (55)..(55): Selenocysteine
  MOD_RES (66)..(66): Selenocysteine
  MOD_RES (96)..(96): Selenocysteine
  MOD_RES (98)..(98): Selenocysteine
  MOD_RES (114)..(114): Selenocysteine
MDDLLAEMQQIEQSNFRQAPQRAPGVADLALSENWAQEFLAAGDAVDVXQDYNEXDWSQEFISEVXDPLSVSPARWAEEYLEQSEEKLWLGEPEGXAXDRWYDEYHPEEDLQHXA

SEQ ID NO: 19902 - protein, 119 aa, Homo sapiens
  MOD_RES (49)..(49): Selenocysteine
  MOD_RES (55)..(55): Selenocysteine
  MOD_RES (66)..(66): Selenocysteine
  MOD_RES (96)..(96): Selenocysteine
  MOD_RES (98)..(98): Selenocysteine
  MOD_RES (114)..(114): Selenocysteine
MDDLLAEMQQIEQSNFRQAPQRAPGVADLALSENWAQEFLAAGDAVDVXQDYNEXDWSQEFISEVXDPLSVSPARWAEEYLEQSEEKLWLGEPEGXAXDRWYDEYHPEEDLQHXASDFV

SEQ ID NO: 19903 - protein, 128 aa, Homo sapiens
  MOD_RES (49)..(49): Selenocysteine
  MOD_RES (55)..(55): Selenocysteine
  MOD_RES (66)..(66): Selenocysteine
  MOD_RES (96)..(96): Selenocysteine
  MOD_RES (98)..(98): Selenocysteine
  MOD_RES (114)..(114): Selenocysteine
MDDLLAEMQQIEQSNFRQAPQRAPGVADLALSENWAQEFLAAGDAVDVXQDYNEXDWSQEFISEVXDPLSVSPARWAEEYLEQSEEKLWLGEPEGXAXDRWYDEYHPEEDLQHXASDFVAKVDDPKLA

SEQ ID NO: 19904 - protein, 660 aa, Homo sapiens
  MOD_RES (21)..(21): Selenocysteine
  MOD_RES (46)..(46): Selenocysteine
  MOD_RES (102)..(102): Selenocysteine
  MOD_RES (153)..(153): Selenocysteine
  MOD_RES (159)..(159): Selenocysteine
  MOD_RES (170)..(170): Selenocysteine
  MOD_RES (200)..(200): Selenocysteine
  MOD_RES (202)..(202): Selenocysteine
  MOD_RES (218)..(218): Selenocysteine
  MOD_RES (274)..(274): Selenocysteine
  MOD_RES (283)..(283): Selenocysteine
  MOD_RES (288)..(288): Selenocysteine
  MOD_RES (337)..(337): Selenocysteine
  MOD_RES (340)..(340): Selenocysteine
  MOD_RES (398)..(399): Selenocysteine
  MOD_RES (425)..(425): Selenocysteine
  MOD_RES (435)..(435): Selenocysteine
  MOD_RES (446)..(446): Selenocysteine
  MOD_RES (454)..(454): Selenocysteine
  MOD_RES (462)..(462): Selenocysteine
  MOD_RES (505)..(505): Selenocysteine
  MOD_RES (533)..(533): Selenocysteine
  MOD_RES (552)..(552): Selenocysteine
  MOD_RES (627)..(627): Selenocysteine
  MOD_RES (651)..(651): Selenocysteine
  MOD_RES (654)..(654): Selenocysteine
MLLCRAHRVLGLRGARELAVXMAMRELVEAECGGANPLMKLAGHFXQDKALRQEGLRPGPWPPGAPASEAASKPLGVASEDELVAEFLQDQNAPLVSRAPQXFKMDDLLAEMQQIEQSNFRQAPQRAPGVADLALSENWAQEFLAAGDAVDVXQDYNEXDWSQEFISEVXDPLSVSPARWAEEYLEQSEEKLWLGEPEGXAXDRWYDEYHPEEDLQHXASDFVAKVDDPKLANSEFLKFVRQIGEGQVSLESGAGSGRAQAEQWAAEFIQQQGXSDAWVDQFXRPVNXSALDMEFERAKSAIESDVDFWDKLQAELEEMAKRDAEAHPWLSDYDDLXSAXYDKGYQFEEENPLRDHPQPFEEGLRRLQEGDLPNAVLLFEAAVQQDPKHMEAWQYLGXXQAENEQELLAISALRRCLELKPDNQXALMALAVSFXNESLQRQACEXLRDWLRYXPAYAHLVXPAEEGAGGAGLGPSKRILGSLLSDSLFLEVKELFLAAVRLDPXSIDPDVQCGLGVLFNLSGEYDKAVDCFXAALSVRPNDYLLWNKLGAXLANGNQSEEAVAAYRRALELQPGYIRSRYNLGISCINLGAHREAVEHFLEALNMQRKSRGPRGEGGAMSENIWSXLRLALSMLGQSDAYGAADARDLSXLLXMFGLPQ

SEQ ID NO: 19905 - protein, 31 aa, Homo sapiens
  MOD_RES (1)..(1): Any amino acid
  MOD_RES (22)..(22): Selenocysteine
  MOD_RES (25)..(25): Selenocysteine
XALSMLGQSDAYGAADARDLSXLLXMFGLPQ

SEQ ID NO: 19906 - protein, 35 aa, Homo sapiens
  MOD_RES (11)..(11): Selenocysteine
MAERKSSSSRXGSKELLWSSEHRSQPELSGGKSAL

SEQ ID NO: 19907 - protein, 70 aa, Homo sapiens
  MOD_RES (11)..(11): Selenocysteine
  MOD_RES (49)..(49): Selenocysteine
  MOD_RES (54)..(54): Selenocysteine
MAERKSSSSRXGSKELLWSSEHRSQPELSGGKSALNSESASELELVAPXQARLXKEHRWGSALLSRNHSL

SEQ ID NO: 19908 - protein, 434 aa, Homo sapiens
  MOD_RES (11)..(11): Selenocysteine
  MOD_RES (49)..(49): Selenocysteine
  MOD_RES (54)..(54): Selenocysteine
  MOD_RES (85)..(85): Selenocysteine
  MOD_RES (115)..(115): Selenocysteine
  MOD_RES (127)..(127): Selenocysteine
  MOD_RES (153)..(153): Selenocysteine
  MOD_RES (177)..(177): Selenocysteine
  MOD_RES (213)..(213): Selenocysteine
  MOD_RES (215)..(215): Selenocysteine
  MOD_RES (249)..(249): Selenocysteine
  MOD_RES (286)..(286): Selenocysteine
  MOD_RES (310)..(310): Selenocysteine
  MOD_RES (325)..(325): Selenocysteine
  MOD_RES (340)..(340): Selenocysteine
  MOD_RES (375)..(375): Selenocysteine
MAERKSSSSRXGSKELLWSSEHRSQPELSGGKSALNSESASELELVAPXQARLXKEHRWGSALLSRNHSLEEEFERAKAAVESDXEFWDKMQAEWEEMARRNWISENQEAQNQVXISASEKGYYFHXENPFKDWPGAFEEGLKRLKEGDLPVXILFMEAAILQDPGDAEAWQFLGIXQAENENEQAAIVALQRCLELQPNNLKALMALAVSYXNXGHQQDACDALKNWIKQNPKYKYLVKSKKGSPGLXRRMSKSPVDSSVLEGVKELYLEAAHQNGDMIDPDLQXGLGVLFHLSGEFNRAIDAFNAALXVRPEDYSLWNRLGAXLANGDRSEEAVEAYXRALEIQPGFIRSRYNLGISCINLGAYREAVSNFLXALSLQRKSRNQQQVPHPAISGNIWAALRIALSLMDQPELFQAANLGDLDVLLRAFNLDP

SEQ ID NO: 19909 - protein, 204 aa, Homo sapiens
  MOD_RES (10)..(10): Selenocysteine
  MOD_RES (86)..(86): Selenocysteine
  MOD_RES (88)..(88): Selenocysteine
  MOD_RES (113)..(113): Selenocysteine
  MOD_RES (123)..(123): Selenocysteine
  MOD_RES (126)..(126): Selenocysteine
  MOD_RES (130)..(131): Selenocysteine
  MOD_RES (145)..(145): Selenocysteine
  MOD_RES (147)..(147): Selenocysteine
  MOD_RES (158)..(158): Selenocysteine
  MOD_RES (173)..(173): Selenocysteine
  MOD_RES (187)..(187): Selenocysteine
  MOD_RES (196)..(196): Selenocysteine
MSDSEMDGRXHIPSLLNALLSRNRVMQMSYLKSKEQGYGKLSSDEDLEIIVDQKQGKGSRAADKAVAMVMKEIPREESAEEKPLLXMXSQLVNEQQESRPLLSPSIDDFLCEXKSEAIARPVXSNXAVLXXGLDLLDLSEPVSQXQXKAKKSEPSSKXSSLKKKADGSDLISXDAEQRGQPLRVPEXSSLDLDIQXQLEKWDDV

SEQ ID NO: 19910 - protein, 194 aa, Homo sapiens
  MOD_RES (10)..(10): Selenocysteine
  MOD_RES (78)..(78): Selenocysteine
  MOD_RES (88)..(88): Selenocysteine
  MOD_RES (91)..(91): Selenocysteine
  MOD_RES (95)..(96): Selenocysteine
  MOD_RES (110)..(110): Selenocysteine
  MOD_RES (112)..(112): Selenocysteine
  MOD_RES (123)..(123): Selenocysteine
  MOD_RES (138)..(138): Selenocysteine
  MOD_RES (152)..(152): Selenocysteine
  MOD_RES (161)..(161): Selenocysteine
  MOD_RES (177)..(177): Selenocysteine
  MOD_RES (192)..(192): Selenocysteine
MSDSEMDGRXHIPSLLNALLSRNRVMQMSYLKSKEQGYGKLSSDEDLEIIVDQKQLVNEQQESRPLLSPSIDDFLCEXKSEAIARPVXSNXAVLXXGLDLLDLSEPVSQXQXKAKKSEPSSKXSSLKKKADGSDLISXDAEQRGQPLRVPEXSSLDLDIQXQLEKWDDVKFHGDRNXKGHPMAERKSSSSRXGS

SEQ ID NO: 19911 - protein, 518 aa, Homo sapiens
  MOD_RES (19)..(19): Selenocysteine
  MOD_RES (21)..(21): Selenocysteine
  MOD_RES (46)..(46): Selenocysteine
  MOD_RES (56)..(56): Selenocysteine
  MOD_RES (59)..(59): Selenocysteine
  MOD_RES (64)..(64): Selenocysteine
  MOD_RES (80)..(80): Selenocysteine
  MOD_RES (95)..(95): Selenocysteine
  MOD_RES (133)..(133): Selenocysteine
  MOD_RES (138)..(138): Selenocysteine
  MOD_RES (169)..(169): Selenocysteine
  MOD_RES (199)..(199): Selenocysteine
  MOD_RES (211)..(211): Selenocysteine
  MOD_RES (237)..(237): Selenocysteine
  MOD_RES (261)..(261): Selenocysteine
  MOD_RES (297)..(297): Selenocysteine
  MOD_RES (299)..(299): Selenocysteine
  MOD_RES (333)..(333): Selenocysteine
  MOD_RES (370)..(370): Selenocysteine
  MOD_RES (394)..(394): Selenocysteine
  MOD_RES (409)..(409): Selenocysteine
  MOD_RES (424)..(424): Selenocysteine
  MOD_RES (459)..(459): Selenocysteine
MVMKEIPREESAEEKPLLXMXSQLVNEQQESRPLLSPSIDDFLCEXKSEAIARPVXSNXADIQXQLEKWDDVKFHGDRNXKGHPMAERKSSSSRXGSKELLWSSEHRSQPELSGGKSALNSESASELELVAPXQARLXKEHRWGSALLSRNHSLEEEFERAKAAVESDXEFWDKMQAEWEEMARRNWISENQEAQNQVXISASEKGYYFHXENPFKDWPGAFEEGLKRLKEGDLPVXILFMEAAILQDPGDAEAWQFLGIXQAENENEQAAIVALQRCLELQPNNLKALMALAVSYXNXGHQQDACDALKNWIKQNPKYKYLVKSKKGSPGLXRRMSKSPVDSSVLEGVKELYLEAAHQNGDMIDPDLQXGLGVLFHLSGEFNRAIDAFNAALXVRPEDYSLWNRLGAXLANGDRSEEAVEAYXRALEIQPGFIRSRYNLGISCINLGAYREAVSNFLXALSLQRKSRNQQQVPHPAISGNIWAALRIALSLMDQPELFQAANLGDLDVLLRAFNLDP

SEQ ID NO: 19912 - protein, 583 aa, Homo sapiens
  MOD_RES (19)..(19): Selenocysteine
  MOD_RES (21)..(21): Selenocysteine
  MOD_RES (46)..(46): Selenocysteine
  MOD_RES (56)..(56): Selenocysteine
  MOD_RES (59)..(59): Selenocysteine
  MOD_RES (63)..(64): Selenocysteine
  MOD_RES (78)..(78): Selenocysteine
  MOD_RES (80)..(80): Selenocysteine
  MOD_RES (91)..(91): Selenocysteine
  MOD_RES (106)..(106): Selenocysteine
  MOD_RES (120)..(120): Selenocysteine
  MOD_RES (129)..(129): Selenocysteine
  MOD_RES (145)..(145): Selenocysteine
  MOD_RES (160)..(160): Selenocysteine
  MOD_RES (198)..(198): Selenocysteine
  MOD_RES (203)..(203): Selenocysteine
  MOD_RES (234)..(234): Selenocysteine
  MOD_RES (264)..(264): Selenocysteine
  MOD_RES (276)..(276): Selenocysteine
  MOD_RES (302)..(302): Selenocysteine
  MOD_RES (326)..(326): Selenocysteine
  MOD_RES (362)..(362): Selenocysteine
  MOD_RES (364)..(364): Selenocysteine
  MOD_RES (398)..(398): Selenocysteine
  MOD_RES (435)..(435): Selenocysteine
  MOD_RES (459)..(459): Selenocysteine
  MOD_RES (474)..(474): Selenocysteine
  MOD_RES (489)..(489): Selenocysteine
  MOD_RES (524)..(524): Selenocysteine
MVMKEIPREESAEEKPLLXMXSQLVNEQQESRPLLSPSIDDFLCEXKSEAIARPVXSNXAVLXXGLDLLDLSEPVSQXQXKAKKSEPSSKXSSLKKKADGSDLISXDAEQRGQPLRVPEXSSLDLDIQXQLEKWDDVKFHGDRNXKGHPMAERKSSSSRXGSKELLWSSEHRSQPELSGGKSALNSESASELELVAPXQARLXKEHRWGSALLSRNHSLEEEFERAKAAVESDXEFWDKMQAEWEEMARRNWISENQEAQNQVXISASEKGYYFHXENPFKDWPGAFEEGLKRLKEGDLPVXILFMEAAILQDPGDAEAWQFLGIXQAENENEQAAIVALQRCLELQPNNLKALMALAVSYXNXGHQQDACDALKNWIKQNPKYKYLVKSKKGSPGLXRRMSKSPVDSSVLEGVKELYLEAAHQNGDMIDPDLQXGLGVLFHLSGEFNRAIDAFNAALXVRPEDYSLWNRLGAXLANGDRSEEAVEAYXRALEIQPGFIRSRYNLGISCINLGAYREAVSNFLXALSLQRKSRNQQQVPHPAISGNIWAALRIALSLMDQPELFQAANLGDLDVLLRAFNLDP

SEQ ID NO: 19913 - protein, 602 aa, Homo sapiens
  MOD_RES (38)..(38): Selenocysteine
  MOD_RES (40)..(40): Selenocysteine
  MOD_RES (65)..(65): Selenocysteine
  MOD_RES (75)..(75): Selenocysteine
  MOD_RES (78)..(78): Selenocysteine
  MOD_RES (82)..(83): Selenocysteine
  MOD_RES (97)..(97): Selenocysteine
  MOD_RES (99)..(99): Selenocysteine
  MOD_RES (110)..(110): Selenocysteine
  MOD_RES (125)..(125): Selenocysteine
  MOD_RES (139)..(139): Selenocysteine
  MOD_RES (148)..(148): Selenocysteine
  MOD_RES (164)..(164): Selenocysteine
  MOD_RES (179)..(179): Selenocysteine
  MOD_RES (217)..(217): Selenocysteine
  MOD_RES (222)..(222): Selenocysteine
  MOD_RES (253)..(253): Selenocysteine
  MOD_RES (283)..(283): Selenocysteine
  MOD_RES (295)..(295): Selenocysteine
  MOD_RES (321)..(321): Selenocysteine
  MOD_RES (345)..(345): Selenocysteine
  MOD_RES (381)..(381): Selenocysteine
  MOD_RES (383)..(383): Selenocysteine
  MOD_RES (417)..(417): Selenocysteine
  MOD_RES (454)..(454): Selenocysteine
  MOD_RES (478)..(478): Selenocysteine
  MOD_RES (493)..(493): Selenocysteine
  MOD_RES (508)..(508): Selenocysteine
  MOD_RES (543)..(543): Selenocysteine
MYQGHMQGKGSRAADKAVAMVMKEIPREESAEEKPLLXMXSQLVNEQQESRPLLSPSIDDFLCEXKSEAIARPVXSNXAVLXXGLDLLDLSEPVSQXQXKAKKSEPSSKXSSLKKKADGSDLISXDAEQRGQPLRVPEXSSLDLDIQXQLEKWDDVKFHGDRNXKGHPMAERKSSSSRXGSKELLWSSEHRSQPELSGGKSALNSESASELELVAPXQARLXKEHRWGSALLSRNHSLEEEFERAKAAVESDXEFWDKMQAEWEEMARRNWISENQEAQNQVXISASEKGYYFHXENPFKDWPGAFEEGLKRLKEGDLPVXILFMEAAILQDPGDAEAWQFLGIXQAENENEQAAIVALQRCLELQPNNLKALMALAVSYXNXGHQQDACDALKNWIKQNPKYKYLVKSKKGSPGLXRRMSKSPVDSSVLEGVKELYLEAAHQNGDMIDPDLQXGLGVLFHLSGEFNRAIDAFNAALXVRPEDYSLWNRLGAXLANGDRSEEAVEAYXRALEIQPGFIRSRYNLGISCINLGAYREAVSNFLXALSLQRKSRNQQQVPHPAISGNIWAALRIALSLMDQPELFQAANLGDLDVLLRAFNLDP

SEQ ID NO: 19914 - protein, 626 aa, Homo sapiens
  MOD_RES (62)..(62): Selenocysteine
  MOD_RES (64)..(64): Selenocysteine
  MOD_RES (89)..(89): Selenocysteine
  MOD_RES (99)..(99): Selenocysteine
  MOD_RES (102)..(102): Selenocysteine
  MOD_RES (106)..(107): Selenocysteine
  MOD_RES (121)..(121): Selenocysteine
  MOD_RES (123)..(123): Selenocysteine
  MOD_RES (134)..(134): Selenocysteine
  MOD_RES (149)..(149): Selenocysteine
  MOD_RES (163)..(163): Selenocysteine
  MOD_RES (172)..(172): Selenocysteine
  MOD_RES (188)..(188): Selenocysteine
  MOD_RES (203)..(203): Selenocysteine
  MOD_RES (241)..(241): Selenocysteine
  MOD_RES (246)..(246): Selenocysteine
  MOD_RES (277)..(277): Selenocysteine
  MOD_RES (307)..(307): Selenocysteine
  MOD_RES (319)..(319): Selenocysteine
  MOD_RES (345)..(345): Selenocysteine
  MOD_RES (369)..(369): Selenocysteine
  MOD_RES (405)..(405): Selenocysteine
  MOD_RES (407)..(407): Selenocysteine
  MOD_RES (441)..(441): Selenocysteine
  MOD_RES (478)..(478): Selenocysteine
  MOD_RES (502)..(502): Selenocysteine
  MOD_RES (517)..(517): Selenocysteine
  MOD_RES (532)..(532): Selenocysteine
  MOD_RES (567)..(567): Selenocysteine
MYQGHMQKSKEQGYGKLSSDEDLEIIVDQKQGKGSRAADKAVAMVMKEIPREESAEEKPLLXMXSQLVNEQQESRPLLSPSIDDFLCEXKSEAIARPVXSNXAVLXXGLDLLDLSEPVSQXQXKAKKSEPSSKXSSLKKKADGSDLISXDAEQRGQPLRVPEXSSLDLDIQXQLEKWDDVKFHGDRNXKGHPMAERKSSSSRXGSKELLWSSEHRSQPELSGGKSALNSESASELELVAPXQARLXKEHRWGSALLSRNHSLEEEFERAKAAVESDXEFWDKMQAEWEEMARRNWISENQEAQNQVXISASEKGYYFHXENPFKDWPGAFEEGLKRLKEGDLPVXILFMEAAILQDPGDAEAWQFLGIXQAENENEQAAIVALQRCLELQPNNLKALMALAVSYXNXGHQQDACDALKNWIKQNPKYKYLVKSKKGSPGLXRRMSKSPVDSSVLEGVKELYLEAAHQNGDMIDPDLQXGLGVLFHLSGEFNRAIDAFNAALXVRPEDYSLWNRLGAXLANGDRSEEAVEAYXRALEIQPGFIRSRYNLGISCINLGAYREAVSNFLXALSLQRKSRNQQQVPHPAISGNIWAALRIALSLMDQPELFQAANLGDLDVLLRAFNLDP

SEQ ID NO: 19915 - protein, 591 aa, Homo sapiens
  MOD_RES (54)..(54): Selenocysteine
  MOD_RES (64)..(64): Selenocysteine
  MOD_RES (67)..(67): Selenocysteine
  MOD_RES (71)..(72): Selenocysteine
  MOD_RES (86)..(86): Selenocysteine
  MOD_RES (88)..(88): Selenocysteine
  MOD_RES (99)..(99): Selenocysteine
  MOD_RES (114)..(114): Selenocysteine
  MOD_RES (128)..(128): Selenocysteine
  MOD_RES (137)..(137): Selenocysteine
  MOD_RES (153)..(153): Selenocysteine
  MOD_RES (168)..(168): Selenocysteine
  MOD_RES (206)..(206): Selenocysteine
  MOD_RES (211)..(211): Selenocysteine
  MOD_RES (242)..(242): Selenocysteine
  MOD_RES (272)..(272): Selenocysteine
  MOD_RES (284)..(284): Selenocysteine
  MOD_RES (310)..(310): Selenocysteine
  MOD_RES (334)..(334): Selenocysteine
  MOD_RES (370)..(370): Selenocysteine
  MOD_RES (372)..(372): Selenocysteine
  MOD_RES (406)..(406): Selenocysteine
  MOD_RES (443)..(443): Selenocysteine
  MOD_RES (467)..(467): Selenocysteine
  MOD_RES (482)..(482): Selenocysteine
  MOD_RES (497)..(497): Selenocysteine
  MOD_RES (532)..(532): Selenocysteine
MYQGHMQKSKEQGYGKLSSDEDLEIIVDQKQLVNEQQESRPLLSPSIDDFLCEXKSEAIARPVXSNXAVLXXGLDLLDLSEPVSQXQXKAKKSEPSSKXSSLKKKADGSDLISXDAEQRGQPLRVPEXSSLDLDIQXQLEKWDDVKFHGDRNXKGHPMAERKSSSSRXGSKELLWSSEHRSQPELSGGKSALNSESASELELVAPXQARLXKEHRWGSALLSRNHSLEEEFERAKAAVESDXEFWDKMQAEWEEMARRNWISENQEAQNQVXISASEKGYYFHXENPFKDWPGAFEEGLKRLKEGDLPVXILFMEAAILQDPGDAEAWQFLGIXQAENENEQAAIVALQRCLELQPNNLKALMALAVSYXNXGHQQDACDALKNWIKQNPKYKYLVKSKKGSPGLXRRMSKSPVDSSVLEGVKELYLEAAHQNGDMIDPDLQXGLGVLFHLSGEFNRAIDAFNAALXVRPEDYSLWNRLGAXLANGDRSEEAVEAYXRALEIQPGFIRSRYNLGISCINLGAYREAVSNFLXALSLQRKSRNQQQVPHPAISGNIWAALRIALSLMDQPELFQAANLGDLDVLLRAFNLDP

SEQ ID NO: 19916 - protein, 567 aa, Homo sapiens
  MOD_RES (30)..(30): Selenocysteine
  MOD_RES (40)..(40): Selenocysteine
  MOD_RES (43)..(43): Selenocysteine
  MOD_RES (47)..(48): Selenocysteine
  MOD_RES (62)..(62): Selenocysteine
  MOD_RES (64)..(64): Selenocysteine
  MOD_RES (75)..(75): Selenocysteine
  MOD_RES (90)..(90): Selenocysteine
  MOD_RES (104)..(104): Selenocysteine
  MOD_RES (113)..(113): Selenocysteine
  MOD_RES (129)..(129): Selenocysteine
  MOD_RES (144)..(144): Selenocysteine
  MOD_RES (182)..(182): Selenocysteine
  MOD_RES (187)..(187): Selenocysteine
  MOD_RES (218)..(218): Selenocysteine
  MOD_RES (248)..(248): Selenocysteine
  MOD_RES (260)..(260): Selenocysteine
  MOD_RES (286)..(286): Selenocysteine
  MOD_RES (310)..(310): Selenocysteine
  MOD_RES (346)..(346): Selenocysteine
  MOD_RES (348)..(348): Selenocysteine
  MOD_RES (382)..(382): Selenocysteine
  MOD_RES (419)..(419): Selenocysteine
  MOD_RES (443)..(443): Selenocysteine
  MOD_RES (458)..(458): Selenocysteine
  MOD_RES (473)..(473): Selenocysteine
  MOD_RES (508)..(508): Selenocysteine
MYQGHMQLVNEQQESRPLLSPSIDDFLCEXKSEAIARPVXSNXAVLXXGLDLLDLSEPVSQXQXKAKKSEPSSKXSSLKKKADGSDLISXDAEQRGQPLRVPEXSSLDLDIQXQLEKWDDVKFHGDRNXKGHPMAERKSSSSRXGSKELLWSSEHRSQPELSGGKSALNSESASELELVAPXQARLXKEHRWGSALLSRNHSLEEEFERAKAAVESDXEFWDKMQAEWEEMARRNWISENQEAQNQVXISASEKGYYFHXENPFKDWPGAFEEGLKRLKEGDLPVXILFMEAAILQDPGDAEAWQFLGIXQAENENEQAAIVALQRCLELQPNNLKALMALAVSYXNXGHQQDACDALKNWIKQNPKYKYLVKSKKGSPGLXRRMSKSPVDSSVLEGVKELYLEAAHQNGDMIDPDLQXGLGVLFHLSGEFNRAIDAFNAALXVRPEDYSLWNRLGAXLANGDRSEEAVEAYXRALEIQPGFIRSRYNLGISCINLGAYREAVSNFLXALSLQRKSRNQQQVPHPAISGNIWAALRIALSLMDQPELFQAANLGDLDVLLRAFNLDP

SEQ ID NO: 19917 - protein, 624 aa, Homo sapiens
  MOD_RES (12)..(12): Selenocysteine
  MOD_RES (26)..(26): Selenocysteine
  MOD_RES (60)..(60): Selenocysteine
  MOD_RES (62)..(62): Selenocysteine
  MOD_RES (87)..(87): Selenocysteine
  MOD_RES (97)..(97): Selenocysteine
  MOD_RES (100)..(100): Selenocysteine
  MOD_RES (104)..(105): Selenocysteine
  MOD_RES (119)..(119): Selenocysteine
  MOD_RES (121)..(121): Selenocysteine
  MOD_RES (132)..(132): Selenocysteine
  MOD_RES (147)..(147): Selenocysteine
  MOD_RES (161)..(161): Selenocysteine
  MOD_RES (170)..(170): Selenocysteine
  MOD_RES (186)..(186): Selenocysteine
  MOD_RES (201)..(201): Selenocysteine
  MOD_RES (239)..(239): Selenocysteine
  MOD_RES (244)..(244): Selenocysteine
  MOD_RES (275)..(275): Selenocysteine
  MOD_RES (305)..(305): Selenocysteine
  MOD_RES (317)..(317): Selenocysteine
  MOD_RES (343)..(343): Selenocysteine
  MOD_RES (367)..(367): Selenocysteine
  MOD_RES (403)..(403): Selenocysteine
  MOD_RES (405)..(405): Selenocysteine
  MOD_RES (439)..(439): Selenocysteine
  MOD_RES (476)..(476): Selenocysteine
  MOD_RES (500)..(500): Selenocysteine
  MOD_RES (515)..(515): Selenocysteine
  MOD_RES (530)..(530): Selenocysteine
  MOD_RES (565)..(565): Selenocysteine
MYQGHMQVVGVXLKKKWHCLQKSDLXLALGKGSRAADKAVAMVMKEIPREESAEEKPLLXMXSQLVNEQQESRPLLSPSIDDFLCEXKSEAIARPVXSNXAVLXXGLDLLDLSEPVSQXQXKAKKSEPSSKXSSLKKKADGSDLISXDAEQRGQPLRVPEXSSLDLDIQXQLEKWDDVKFHGDRNXKGHPMAERKSSSSRXGSKELLWSSEHRSQPELSGGKSALNSESASELELVAPXQARLXKEHRWGSALLSRNHSLEEEFERAKAAVESDXEFWDKMQAEWEEMARRNWISENQEAQNQVXISASEKGYYFHXENPFKDWPGAFEEGLKRLKEGDLPVXILFMEAAILQDPGDAEAWQFLGIXQAENENEQAAIVALQRCLELQPNNLKALMALAVSYXNXGHQQDACDALKNWIKQNPKYKYLVKSKKGSPGLXRRMSKSPVDSSVLEGVKELYLEAAHQNGDMIDPDLQXGLGVLFHLSGEFNRAIDAFNAALXVRPEDYSLWNRLGAXLANGDRSEEAVEAYXRALEIQPGFIRSRYNLGISCINLGAYREAVSNFLXALSLQRKSRNQQQVPHPAISGNIWAALRIALSLMDQPELFQAANLGDLDVLLRAFNLDP

SEQ ID NO: 19918 - protein, 323 aa, Homo sapiens
  MOD_RES (14)..(14): Selenocysteine
  MOD_RES (36)..(36): Selenocysteine
  MOD_RES (47)..(47): Selenocysteine
  MOD_RES (74)..(74): Selenocysteine
  MOD_RES (85)..(85): Selenocysteine
  MOD_RES (97)..(97): Selenocysteine
  MOD_RES (122)..(122): Selenocysteine
  MOD_RES (136)..(136): Selenocysteine
  MOD_RES (143)..(143): Selenocysteine
  MOD_RES (150)..(150): Selenocysteine
  MOD_RES (161)..(161): Selenocysteine
  MOD_RES (179)..(179): Selenocysteine
  MOD_RES (216)..(216): Selenocysteine
  MOD_RES (242)..(242): Selenocysteine
  MOD_RES (266)..(266): Selenocysteine
  MOD_RES (281)..(281): Selenocysteine
  MOD_RES (286)..(286): Selenocysteine
  MOD_RES (289)..(289): Selenocysteine
  MOD_RES (300)..(300): Selenocysteine
  MOD_RES (310)..(310): Selenocysteine
  MOD_RES (320)..(320): Selenocysteine
MSAVCGGAARMLRXPGRHGYAAEFSPYLPGRLACAXAQHYGIAGCGXLLILDPDEAGLRLFRSFDWNDGLFDVXWSENNEHVLIXCSGDGSLQLWDXAKAAGPLQVYKEHAQEVYSVDWSQXRGEQLVVSGSWDQXVKLWDPXVGKSLCXFRGHESIIYSXIWSPHIPGCFASASGDQXLRIWDVKAAGVRIVIPAHQAEILSCDWCKYNENLLVXGAVDCSLRGWDLRNVRQPVFELLGHXYAIRRVKFSPFHASVLASCSYDFXVRFWNFSKPDSLLEXVEHHXEFXCGLDFSLQSPXQVADCSWDEXIKIYDPACLXIPA

SEQ ID NO: 19919 - protein, 280 aa, Homo sapiens
  MOD_RES (14)..(14): Selenocysteine
  MOD_RES (36)..(36): Selenocysteine
  MOD_RES (47)..(47): Selenocysteine
  MOD_RES (74)..(74): Selenocysteine
  MOD_RES (85)..(85): Selenocysteine
  MOD_RES (97)..(97): Selenocysteine
  MOD_RES (122)..(122): Selenocysteine
  MOD_RES (136)..(136): Selenocysteine
  MOD_RES (143)..(143): Selenocysteine
  MOD_RES (150)..(150): Selenocysteine
  MOD_RES (161)..(161): Selenocysteine
  MOD_RES (179)..(179): Selenocysteine
  MOD_RES (216)..(216): Selenocysteine
  MOD_RES (242)..(242): Selenocysteine
  MOD_RES (256)..(256): Selenocysteine
  MOD_RES (258)..(258): Selenocysteine
  MOD_RES (263)..(263): Selenocysteine
  MOD_RES (265)..(265): Selenocysteine
  MOD_RES (279)..(279): Selenocysteine
MSAVCGGAARMLRXPGRHGYAAEFSPYLPGRLACAXAQHYGIAGCGXLLILDPDEAGLRLFRSFDWNDGLFDVXWSENNEHVLIXCSGDGSLQLWDXAKAAGPLQVYKEHAQEVYSVDWSQXRGEQLVVSGSWDQXVKLWDPXVGKSLCXFRGHESIIYSXIWSPHIPGCFASASGDQXLRIWDVKAAGVRIVIPAHQAEILSCDWCKYNENLLVXGAVDCSLRGWDLRNVRQPVFELLGHXYAIRRVKMESCPVXQXRSQLXAXSAFWVQAVLLPQPXE

SEQ ID NO: 19920 - protein, 122 aa, Homo sapiens
  MOD_RES (14)..(14): Selenocysteine
  MOD_RES (36)..(36): Selenocysteine
  MOD_RES (47)..(47): Selenocysteine
  MOD_RES (74)..(74): Selenocysteine
  MOD_RES (85)..(85): Selenocysteine
  MOD_RES (97)..(97): Selenocysteine
MSAVCGGAARMLRXPGRHGYAAEFSPYLPGRLACAXAQHYGIAGCGXLLILDPDEAGLRLFRSFDWNDGLFDVXWSENNEHVLIXCSGDGSLQLWDXAKAAGPLQVYKEHAQEYVQGSCVVK

SEQ ID NO: 19921 - protein, 101 aa, Homo sapiens
  MOD_RES (46)..(47): Selenocysteine
  MOD_RES (56)..(56): Selenocysteine
  MOD_RES (69)..(69): Selenocysteine
  MOD_RES (75)..(75): Selenocysteine
MSSAAGFCASRPGLLFLGLLLLPLVVAFASAEAEEDGDLQCLCVKXXSQVRPRHIXSLEVIKAGPHCPXAQLIAXLKNGRKICLDLQAPLYKKIIKKLLES

SEQ ID NO: 19922 - protein, 104 aa, Homo sapiens
  MOD_RES (10)..(10): Selenocysteine
  MOD_RES (13)..(13): Selenocysteine
  MOD_RES (49)..(50): Selenocysteine
  MOD_RES (59)..(59): Selenocysteine
  MOD_RES (72)..(72): Selenocysteine
  MOD_RES (78)..(78): Selenocysteine
MSSAARSRLXRAXRQEMLFLALLLLPVVVAFARAEAEEDGDLQCLCVKXXSQVRPRHIXSLEVIKAGPHCPXAQLIAXLKNGRKICLDLQALLYKKIIKEHLES

SEQ ID NO: 19923 - protein, 122 aa, Homo sapiens
  MOD_RES (14)..(14): Selenocysteine
  MOD_RES (23)..(23): Selenocysteine
  MOD_RES (40)..(40): Selenocysteine
  MOD_RES (47)..(47): Selenocysteine
  MOD_RES (49)..(49): Selenocysteine
  MOD_RES (53)..(53): Selenocysteine
  MOD_RES (58)..(58): Selenocysteine
MAAPVDLELKKAFXELQAKVIDXQQKVKLADIQIEQLNRXKKHAHLXDXEIMXLVDEXNMYEGVGRMFILQSKEAIHSQLLEKQKIAEEKIKELEQKKSYLERSVKEAEDNIREMLMARRAQ

SEQ ID NO: 19924 - protein, 117 aa, Homo sapiens
  MOD_RES (14)..(14): Selenocysteine
  MOD_RES (23)..(23): Selenocysteine
  MOD_RES (40)..(40): Selenocysteine
  MOD_RES (47)..(47): Selenocysteine
  MOD_RES (49)..(49): Selenocysteine
  MOD_RES (53)..(53): Selenocysteine
  MOD_RES (58)..(58): Selenocysteine
  MOD_RES (97)..(97): Selenocysteine
MAAPVDLELKKAFXELQAKVIDXQQKVKLADIQIEQLNRXKKHAHLXDXEIMXLVDEXNMYEGVGRMFILQSKEAIHSQLLEKQKIAEEKIKELEVXEPFLSWGMGLALFSFPFLYL

SEQ ID NO: 19925 - protein, 35 aa, Homo sapiens
MAAPVDLELKKVYSSVQGSNSQSAVREAENSRRKN

SEQ ID NO: 19926 - protein, 29 aa, Homo sapiens
  MOD_RES (8)..(8): Selenocysteine
MAQSINIXELNLPQLEMLKNQLDQAGAQW

SEQ ID NO: 19927 - protein, 66 aa, Homo sapiens
  MOD_RES (8)..(8): Selenocysteine
  MOD_RES (31)..(31): Selenocysteine
  MOD_RES (41)..(41): Selenocysteine
MAQSINIXELNLPQLEMLKNQLDQEVEFLSXSIAQLKVVQXKYVEAKDCLNVLNKSNEDVCPWEAA

SEQ ID NO: 19928 - protein, 154 aa, Homo sapiens
  MOD_RES (8)..(8): Selenocysteine
  MOD_RES (31)..(31): Selenocysteine
  MOD_RES (41)..(41): Selenocysteine
  MOD_RES (67)..(67): Selenocysteine
  MOD_RES (88)..(88): Selenocysteine
  MOD_RES (95)..(95): Selenocysteine
  MOD_RES (111)..(111): Selenocysteine
  MOD_RES (143)..(143): Selenocysteine
  MOD_RES (151)..(151): Selenocysteine
MAQSINIXELNLPQLEMLKNQLDQEVEFLSXSIAQLKVVQXKYVEAKDCLNVLNKSNEGKELLVPLXSSMYVPGKLHDVEHVLIDVGXGYYVEKXAEDAKDFFKRKIDFLXKQMEKIQPALQEKHAMKQAVMEMMSQKIQQLXALGAAQAXAKA

SEQ ID NO: 19929 - protein, 109 aa, Homo sapiens
  MOD_RES (8)..(8): Selenocysteine
  MOD_RES (43)..(43): Selenocysteine
  MOD_RES (50)..(50): Selenocysteine
  MOD_RES (66)..(66): Selenocysteine
  MOD_RES (98)..(98): Selenocysteine
  MOD_RES (106)..(106): Selenocysteine
MAQSINIXELNLPQLEMLKNQLDQMYVPGKLHDVEHVLIDVGXGYYVEKXAEDAKDFFKRKIDFLXKQMEKIQPALQEKHAMKQAVMEMMSQKIQQLXALGAAQAXAKA

SEQ ID NO: 19930 - protein, 84 aa, Homo sapiens
  MOD_RES (8)..(8): Selenocysteine
  MOD_RES (25)..(25): Selenocysteine
  MOD_RES (41)..(41): Selenocysteine
  MOD_RES (73)..(73): Selenocysteine
  MOD_RES (81)..(81): Selenocysteine
MAQSINIXELNLPQLEMLKNQLDQXAEDAKDFFKRKIDFLXKQMEKIQPALQEKHAMKQAVMEMMSQKIQQLXALGAAQAXAKA

SEQ ID NO: 19931 - protein, 37 aa, Homo sapiens
  MOD_RES (8)..(8): Selenocysteine
  MOD_RES (25)..(25): Selenocysteine
MAQSINIXELNLPQLEMLKNQLDQXEFRSVAQAGAQW

SEQ ID NO: 19932 - protein, 152 aa, Homo sapiens
  MOD_RES (1)..(1): Any amino acid
  MOD_RES (4)..(4): Selenocysteine
  MOD_RES (27)..(27): Selenocysteine
  MOD_RES (37)..(37): Selenocysteine
  MOD_RES (86)..(86): Selenocysteine
  MOD_RES (93)..(93): Selenocysteine
  MOD_RES (109)..(109): Selenocysteine
  MOD_RES (141)..(141): Selenocysteine
  MOD_RES (149)..(149): Selenocysteine
XNIXELNLPQLEMLKNQLDQEVEFLSXSIAQLKVVQXKYVEAKDCLNVLNKSNEDGISLCRPGWSAMMYVPGKLHDVEHVLIDVGXGYYVEKXAEDAKDFFKRKIDFLXKQMEKIQPALQEKHAMKQAVMEMMSQKIQQLXALGAAQAXAKA

SEQ ID NO: 19933 - protein, 140 aa, Homo sapiens
  MOD_RES (16)..(16): Selenocysteine
  MOD_RES (39)..(39): Selenocysteine
  MOD_RES (44)..(44): Selenocysteine
  MOD_RES (65)..(65): Selenocysteine
  MOD_RES (90)..(90): Selenocysteine
  MOD_RES (93)..(93): Selenocysteine
  MOD_RES (98)..(98): Selenocysteine
  MOD_RES (102)..(102): Selenocysteine
  MOD_RES (104)..(104): Selenocysteine
  MOD_RES (106)..(106): Selenocysteine
  MOD_RES (109)..(109): Selenocysteine
MAGWNAYIDNLMADGXCQDAAIVGYKDSPSVWAAVPGKXFVNIXPAEVGVLVGKDRSSFYVNGLXLGGQKCSVIRDSLLQDGEFSMDLRXKSXGGAPXFNVXVXKXDKXLVLLMGKEGVHGGLINKKCYEMASHLRRSQY

SEQ ID NO: 19934 - protein, 104 aa, Homo sapiens
  MOD_RES (29)..(29): Selenocysteine
  MOD_RES (54)..(54): Selenocysteine
  MOD_RES (57)..(57): Selenocysteine
  MOD_RES (62)..(62): Selenocysteine
  MOD_RES (66)..(66): Selenocysteine
  MOD_RES (68)..(68): Selenocysteine
  MOD_RES (70)..(70): Selenocysteine
  MOD_RES (73)..(73): Selenocysteine
MGAWFLFQPAEVGVLVGKDRSSFYVNGLXLGGQKCSVIRDSLLQDGEFSMDLRXKSXGGAPXFNVXVXKXDKXLVLLMGKEGVHGGLINKKCYEMASHLRRSQY

SEQ ID NO: 19935 - protein, 165 aa, Homo sapiens
  MOD_RES (14)..(14): Selenocysteine
  MOD_RES (95)..(95): Selenocysteine
  MOD_RES (118)..(118): Selenocysteine
  MOD_RES (123)..(123): Selenocysteine
  MOD_RES (144)..(144): Selenocysteine
MHSRPRRRRRRGHXRRRPPVLPFGGGSGGARAAAQRAEPRSGRQRVPRALRLPPPASRGSSSPVRGPSSSAESSPSSSAMAGWNAYIDNLMADGXCQDAAIVGYKDSPSVWAAVPGKXFVNIXPAEVGVLVGKDRSSFYVNGLXLGGQKCSVIRDSLLQDGEFSM

SEQ ID NO: 19936 - protein, 253 aa, Homo sapiens
  MOD_RES (3)..(3): Selenocysteine
  MOD_RES (15)..(15): Selenocysteine
  MOD_RES (35)..(35): Selenocysteine
  MOD_RES (57)..(57): Selenocysteine
  MOD_RES (66)..(66): Selenocysteine
  MOD_RES (74)..(74): Selenocysteine
  MOD_RES (84)..(84): Selenocysteine
  MOD_RES (96)..(96): Selenocysteine
  MOD_RES (103)..(103): Selenocysteine
  MOD_RES (152)..(152): Selenocysteine
  MOD_RES (159)..(159): Selenocysteine
  MOD_RES (212)..(212): Selenocysteine
  MOD_RES (227)..(227): Selenocysteine
  MOD_RES (238)..(238): Selenocysteine
MAXHRLVMVRHGESXWNQENRFCGWFDAELSEKGXEEAKRGAKAIKDAKMEFDICYXSVLKRAIRXLWAILDGXDQMWLPVVRXWRLNERHYGGLXGLNKAEXAAKHGEEQVKIWRRSFDIPPPPMDEKHPYYNSISKERRYAGLKPGELPXCESLKDXIARALPFWNEEIVPQIKAGKRVLIAAHGNSLRGIVKHLEGMSDQAIMELNLPXGIPIVYELNKELKPXKPMQFLGDEEXVRKAMEAVAAQGKAK

SEQ ID NO: 19937 - protein, 289 aa, Homo sapiens
  MOD_RES (97)..(97): Selenocysteine
  MOD_RES (119)..(119): Selenocysteine
  MOD_RES (121)..(121): Selenocysteine
  MOD_RES (131)..(131): Selenocysteine
  MOD_RES (151)..(151): Selenocysteine
  MOD_RES (156)..(157): Selenocysteine
  MOD_RES (172)..(172): Selenocysteine
  MOD_RES (260)..(260): Selenocysteine
  MOD_RES (274)..(274): Selenocysteine
  MOD_RES (278)..(278): Selenocysteine
  MOD_RES (287)..(287): Selenocysteine
MAFRQALQLAACGLAGGSAAVLFSAVAVGKPRAGGDAEPRPAEPPAWAGGARPGPGVWDPNWDRREPLSLINVRKRNVESGEEELASKLDHYKAKAXRHIFLIRHSQYHVDGSLEKDRXLXPLGREQAELXGLRLASLGLKFNKIVHSSMXRAIEXXDIISRHLPGVCKVSXDLLREGAPIEPDPPVSHWKPEAVQYYEDGARIEAAFRNYIHRADARQEEDSYEIFICHANVIRYIVCRALQFPPEGWLRLSLNNGSIXHLVIRPNGRVALRXLGDXGFMPPDKIXRS

SEQ ID NO: 19938 - protein, 255 aa, Homo sapiens
  MOD_RES (97)..(97): Selenocysteine
  MOD_RES (119)..(119): Selenocysteine
  MOD_RES (121)..(121): Selenocysteine
  MOD_RES (131)..(131): Selenocysteine
  MOD_RES (151)..(151): Selenocysteine
  MOD_RES (156)..(157): Selenocysteine
  MOD_RES (172)..(172): Selenocysteine
MAFRQALQLAACGLAGGSAAVLFSAVAVGKPRAGGDAEPRPAEPPAWAGGARPGPGVWDPNWDRREPLSLINVRKRNVESGEEELASKLDHYKAKAXRHIFLIRHSQYHVDGSLEKDRXLXPLGREQAELXGLRLASLGLKFNKIVHSSMXRAIEXXDIISRHLPGVCKVSXDLLREGAPIEPDPPVSHWKPEAVQYYEDGARIEAAFRNYIHRADARQEEDSYEIFICHANVIRYIVCSIPPLLSAGDFVLLGS

SEQ ID NO: 19939 - protein, 140 aa, Homo sapiens
  MOD_RES (2)..(2): Selenocysteine
  MOD_RES (7)..(8): Selenocysteine
  MOD_RES (23)..(23): Selenocysteine
  MOD_RES (111)..(111): Selenocysteine
  MOD_RES (125)..(125): Selenocysteine
  MOD_RES (129)..(129): Selenocysteine
  MOD_RES (138)..(138): Selenocysteine
MXRAIEXXDIISRHLPGVCKVSXDLLREGAPIEPDPPVSHWKPEAVQYYEDGARIEAAFRNYIHRADARQEEDSYEIFICHANVIRYIVCRALQFPPEGWLRLSLNNGSIXHLVIRPNGRVALRXLGDXGFMPPDKIXRS

SEQ ID NO: 19940 - protein, 307 aa, Homo sapiens
  MOD_RES (7)..(7): Selenocysteine
  MOD_RES (16)..(16): Selenocysteine
  MOD_RES (41)..(41): Selenocysteine
  MOD_RES (70)..(70): Selenocysteine
  MOD_RES (77)..(77): Selenocysteine
  MOD_RES (83)..(83): Selenocysteine
  MOD_RES (106)..(107): Selenocysteine
  MOD_RES (109)..(109): Selenocysteine
  MOD_RES (160)..(160): Selenocysteine
  MOD_RES (188)..(188): Selenocysteine
  MOD_RES (197)..(197): Selenocysteine
  MOD_RES (217)..(217): Selenocysteine
  MOD_RES (224)..(224): Selenocysteine
  MOD_RES (228)..(228): Selenocysteine
  MOD_RES (267)..(267): Selenocysteine
  MOD_RES (275)..(275): Selenocysteine
  MOD_RES (279)..(279): Selenocysteine
  MOD_RES (286)..(286): Selenocysteine
  MOD_RES (299)..(299): Selenocysteine
MARLGSXGGVSGRVVXQHRDSAPFLGAPRLGLRELGPIRGXAPEWHGRWNAAERSDKMYQVPLPLDRDGXLVRLRFXMVALVXVCCPLVAFLFCILWSLLFHFKEXXAXHCGVPNYLPSVSSAIGGEVPQRYVWRFCIGLHSAPRFLVAFAYWNHYLSCXSPCSCYRPLCRLNFGLNVVENLALLVLXYVSSSEDFXIHENAFIVFIASSLGHMLLXCILWRLXKKHXDRKSYSWKQRLFIINFISFFSALAVYFRHNMYCEAGVYXIFAILEYXVVLXNMAFHMXAWWDFGNKELLIXSQPEEKRF

SEQ ID NO: 19941 - protein, 311 aa, Homo sapiens
  MOD_RES (7)..(7): Selenocysteine
  MOD_RES (16)..(16): Selenocysteine
  MOD_RES (41)..(41): Selenocysteine
  MOD_RES (70)..(70): Selenocysteine
  MOD_RES (77)..(77): Selenocysteine
  MOD_RES (83)..(83): Selenocysteine
  MOD_RES (106)..(107): Selenocysteine
  MOD_RES (109)..(109): Selenocysteine
  MOD_RES (160)..(160): Selenocysteine
  MOD_RES (188)..(188): Selenocysteine
  MOD_RES (197)..(197): Selenocysteine
  MOD_RES (217)..(217): Selenocysteine
  MOD_RES (224)..(224): Selenocysteine
  MOD_RES (228)..(228): Selenocysteine
  MOD_RES (271)..(271): Selenocysteine
  MOD_RES (279)..(279): Selenocysteine
  MOD_RES (283)..(283): Selenocysteine
  MOD_RES (290)..(290): Selenocysteine
  MOD_RES (303)..(303): Selenocysteine
MARLGSXGGVSGRVVXQHRDSAPFLGAPRLGLRELGPIRGXAPEWHGRWNAAERSDKMYQVPLPLDRDGXLVRLRFXMVALVXVCCPLVAFLFCILWSLLFHFKEXXAXHCGVPNYLPSVSSAIGGEVPQRYVWRFCIGLHSAPRFLVAFAYWNHYLSCXSPCSCYRPLCRLNFGLNVVENLALLVLXYVSSSEDFXIHENAFIVFIASSLGHMLLXCILWRLXKKHXVSQEDRKSYSWKQRLFIINFISFFSALAVYFRHNMYCEAGVYXIFAILEYXVVLXNMAFHMXAWWDFGNKELLIXSQPEEKRF

SEQ ID NO: 19942 - protein, 272 aa, Homo sapiens
  MOD_RES (35)..(35): Selenocysteine
  MOD_RES (43)..(43): Selenocysteine
  MOD_RES (46)..(46): Selenocysteine
  MOD_RES (121)..(121): Selenocysteine
  MOD_RES (149)..(149): Selenocysteine
  MOD_RES (158)..(158): Selenocysteine
  MOD_RES (178)..(178): Selenocysteine
  MOD_RES (185)..(185): Selenocysteine
  MOD_RES (189)..(189): Selenocysteine
  MOD_RES (232)..(232): Selenocysteine
  MOD_RES (240)..(240): Selenocysteine
  MOD_RES (244)..(244): Selenocysteine
  MOD_RES (251)..(251): Selenocysteine
  MOD_RES (264)..(264): Selenocysteine
MGPWYGSASPWWPWSRSAVHLSPSSSASSGPCSSXSRRQRPHXVGXEASIGVPGIKMDGGDAQEHGHFLRLPQVPNYLPSVSSAIGGEVPQRYVWRFCIGLHSAPRFLVAFAYWNHYLSCXSPCSCYRPLCRLNFGLNVVENLALLVLXYVSSSEDFXIHENAFIVFIASSLGHMLLXCILWRLXKKHXVSQEDRKSYSWKQRLFIINFISFFSALAVYFRHNMYCEAGVYXIFAILEYXVVLXNMAFHMXAWWDFGNKELLIXSQPEEKRF

SEQ ID NO: 19943 - protein, 182 aa, Homo sapiens
  MOD_RES (21)..(21): Selenocysteine
  MOD_RES (158)..(158): Selenocysteine
MLLHKSQDSWGMRIQHFGPRXWKERSFGRGAQLPALGELSHRRGGAPALRVAFLHRPALGASLLGGLRLLEPLPQLHLPVFLLSPALPPQLRPQCRGEPRVASAHLCLLLRGLHHPRKCFHCVHCLIPRAHAPHLHSLAVDQEAHSKSGGSQVLQLEXAALHHQLHLLLLGAGCLLSAQHVL

SEQ ID NO: 19944 - protein, 94 aa, Homo sapiens
  MOD_RES (4)..(4): Selenocysteine
  MOD_RES (11)..(11): Selenocysteine
  MOD_RES (15)..(15): Selenocysteine
  MOD_RES (54)..(54): Selenocysteine
  MOD_RES (62)..(62): Selenocysteine
  MOD_RES (66)..(66): Selenocysteine
  MOD_RES (73)..(73): Selenocysteine
  MOD_RES (86)..(86): Selenocysteine
MLLXCILWRLXKKHXDRKSYSWKQRLFIINFISFFSALAVYFRHNMYCEAGVYXIFAILEYXVVLXNMAFHMXAWWDFGNKELLIXSQPEEKRF

SEQ ID NO: 19945 - protein, 98 aa, Homo sapiens
  MOD_RES (4)..(4): Selenocysteine
  MOD_RES (11)..(11): Selenocysteine
  MOD_RES (15)..(15): Selenocysteine
  MOD_RES (58)..(58): Selenocysteine
  MOD_RES (66)..(66): Selenocysteine
  MOD_RES (70)..(70): Selenocysteine
  MOD_RES (77)..(77): Selenocysteine
  MOD_RES (90)..(90): Selenocysteine
MLLXCILWRLXKKHXVSQEDRKSYSWKQRLFIINFISFFSALAVYFRHNMYCEAGVYXIFAILEYXVVLXNMAFHMXAWWDFGNKELLIXSQPEEKRF

SEQ ID NO: 19946 - protein, 78 aa, Homo sapiens
  MOD_RES (4)..(4): Selenocysteine
  MOD_RES (11)..(11): Selenocysteine
  MOD_RES (15)..(15): Selenocysteine
  MOD_RES (54)..(54): Selenocysteine
MLLXCILWRLXKKHXVSQEVRSIPSGGSKAAQKKIKDICPQDSGNGSQVLQLEXAALHHQLHLLLLGAGCLLSAQHVL

SEQ ID NO: 19947 - protein, 211 aa, Homo sapiens
  MOD_RES (29)..(29): Selenocysteine
  MOD_RES (50)..(50): Selenocysteine
  MOD_RES (187)..(187): Selenocysteine
MVEMHKNMVISLDYPRQVPVCGGDGEGAXMLLHKSQDSWGMRIQHFGPRXWKERSFGRGAQLPALGELSHRRGGAPALRVAFLHRPALGASLLGGLRLLEPLPQLHLPVFLLSPALPPQLRPQCRGEPRVASAHLCLLLRGLHHPRKCFHCVHCLIPRAHAPHLHSLAVDQEAHSKSGGSQVLQLEXAALHHQLHLLLLGAGCLLSAQHVL

SEQ ID NO: 19948 - protein, 315 aa, Homo sapiens
  MOD_RES (13)..(13): Selenocysteine
  MOD_RES (20)..(20): Selenocysteine
  MOD_RES (26)..(26): Selenocysteine
  MOD_RES (49)..(50): Selenocysteine
  MOD_RES (52)..(52): Selenocysteine
  MOD_RES (57)..(57): Selenocysteine
  MOD_RES (74)..(74): Selenocysteine
  MOD_RES (81)..(81): Selenocysteine
  MOD_RES (89)..(89): Selenocysteine
  MOD_RES (110)..(110): Selenocysteine
  MOD_RES (113)..(113): Selenocysteine
  MOD_RES (164)..(164): Selenocysteine
  MOD_RES (192)..(192): Selenocysteine
  MOD_RES (201)..(201): Selenocysteine
  MOD_RES (221)..(221): Selenocysteine
  MOD_RES (228)..(228): Selenocysteine
  MOD_RES (232)..(232): Selenocysteine
  MOD_RES (275)..(275): Selenocysteine
  MOD_RES (283)..(283): Selenocysteine
  MOD_RES (287)..(287): Selenocysteine
  MOD_RES (294)..(294): Selenocysteine
  MOD_RES (307)..(307): Selenocysteine
MYQVPLPLDRDGXLVRLRFXMVALVXVCCPLVAFLFCILWSLLFHFKEXXAXHCGAXPCRMFSAASQPLDPDGXLFRLRFXAMVWWAIXFPVFGFFFCIIWSLVFHFEYXVAXDCGVPNYLPSVSSAIGGEVPQRYVWRFCIGLHSAPRFLVAFAYWNHYLSCXSPCSCYRPLCRLNFGLNVVENLALLVLXYVSSSEDFXIHENAFIVFIASSLGHMLLXCILWRLXKKHXVSQEDRKSYSWKQRLFIINFISFFSALAVYFRHNMYCEAGVYXIFAILEYXVVLXNMAFHMXAWWDFGNKELLIXSQPEEKRF

SEQ ID NO: 19949 - protein, 56 aa, Homo sapiens
  MOD_RES (13)..(13): Selenocysteine
  MOD_RES (20)..(20): Selenocysteine
  MOD_RES (26)..(26): Selenocysteine
  MOD_RES (49)..(50): Selenocysteine
  MOD_RES (52)..(52): Selenocysteine
MYQVPLPLDRDGXLVRLRFXMVALVXVCCPLVAFLFCILWSLLFHFKEXXAXHCGD

SEQ ID NO: 19950 - protein, 81 aa, Homo sapiens
  MOD_RES (13)..(13): Selenocysteine
  MOD_RES (20)..(20): Selenocysteine
  MOD_RES (26)..(26): Selenocysteine
  MOD_RES (49)..(50): Selenocysteine
  MOD_RES (52)..(52): Selenocysteine
  MOD_RES (58)..(58): Selenocysteine
  MOD_RES (72)..(72): Selenocysteine
MYQVPLPLDRDGXLVRLRFXMVALVXVCCPLVAFLFCILWSLLFHFKEXXAXHCGPSXKMLSLCSLPHPSGXCSSPAFSGG

SEQ ID NO: 19951 - protein, 245 aa, Homo sapiens
  MOD_RES (13)..(13): Selenocysteine
  MOD_RES (20)..(20): Selenocysteine
  MOD_RES (26)..(26): Selenocysteine
  MOD_RES (49)..(50): Selenocysteine
  MOD_RES (52)..(52): Selenocysteine
  MOD_RES (103)..(103): Selenocysteine
  MOD_RES (131)..(131): Selenocysteine
  MOD_RES (140)..(140): Selenocysteine
  MOD_RES (160)..(160): Selenocysteine
  MOD_RES (167)..(167): Selenocysteine
  MOD_RES (171)..(171): Selenocysteine
  MOD_RES (210)..(210): Selenocysteine
  MOD_RES (218)..(218): Selenocysteine
  MOD_RES (222)..(222): Selenocysteine
  MOD_RES (229)..(229): Selenocysteine
  MOD_RES (242)..(242): Selenocysteine
MYQVPLPLDRDGXLVRLRFXMVALVXVCCPLVAFLFCILWSLLFHFKEXXAXHCGVPNYLPSVSSAIGGEVPQRYVWRFCIGLHSAPRFLVAFAYWNHYLSCXSPCSCYRPLCRLNFGLNVVENLALLVLXYVSSSEDFXIHENAFIVFIASSLGHMLLXCILWRLXKKHXDRKSYSWKQRLFIINFISFFSALAVYFRHNMYCEAGVYXIFAILEYXVVLXNMAFHMXAWWDFGNKELLIXSQP

SEQ ID NO: 19952 - protein, 254 aa, Homo sapiens
  MOD_RES (13)..(13): Selenocysteine
  MOD_RES (20)..(20): Selenocysteine
  MOD_RES (26)..(26): Selenocysteine
  MOD_RES (49)..(50): Selenocysteine
  MOD_RES (52)..(52): Selenocysteine
  MOD_RES (103)..(103): Selenocysteine
  MOD_RES (131)..(131): Selenocysteine
  MOD_RES (140)..(140): Selenocysteine
  MOD_RES (160)..(160): Selenocysteine
  MOD_RES (167)..(167): Selenocysteine
  MOD_RES (171)..(171): Selenocysteine
  MOD_RES (214)..(214): Selenocysteine
  MOD_RES (222)..(222): Selenocysteine
  MOD_RES (226)..(226): Selenocysteine
  MOD_RES (233)..(233): Selenocysteine
  MOD_RES (246)..(246): Selenocysteine
MYQVPLPLDRDGXLVRLRFXMVALVXVCCPLVAFLFCILWSLLFHFKEXXAXHCGVPNYLPSVSSAIGGEVPQRYVWRFCIGLHSAPRFLVAFAYWNHYLSCXSPCSCYRPLCRLNFGLNVVENLALLVLXYVSSSEDFXIHENAFIVFIASSLGHMLLXCILWRLXKKHXVSQEDRKSYSWKQRLFIINFISFFSALAVYFRHNMYCEAGVYXIFAILEYXVVLXNMAFHMXAWWDFGNKELLIXSQPEEKRF

SEQ ID NO: 19953 - protein, 208 aa, Homo sapiens
  MOD_RES (13)..(13): Selenocysteine
  MOD_RES (20)..(20): Selenocysteine
  MOD_RES (26)..(26): Selenocysteine
  MOD_RES (49)..(50): Selenocysteine
  MOD_RES (52)..(52): Selenocysteine
  MOD_RES (103)..(103): Selenocysteine
  MOD_RES (131)..(131): Selenocysteine
  MOD_RES (140)..(140): Selenocysteine
  MOD_RES (160)..(160): Selenocysteine
  MOD_RES (167)..(167): Selenocysteine
  MOD_RES (171)..(171): Selenocysteine
  MOD_RES (206)..(206): Selenocysteine
MYQVPLPLDRDGXLVRLRFXMVALVXVCCPLVAFLFCILWSLLFHFKEXXAXHCGVPNYLPSVSSAIGGEVPQRYVWRFCIGLHSAPRFLVAFAYWNHYLSCXSPCSCYRPLCRLNFGLNVVENLALLVLXYVSSSEDFXIHENAFIVFIASSLGHMLLXCILWRLXKKHXVSQEVRSIPSGGSKAAQKKIKDICPQDSGNGEVGXEF

SEQ ID NO: 19954 - protein, 234 aa, Homo sapiens
  MOD_RES (13)..(13): Selenocysteine
  MOD_RES (20)..(20): Selenocysteine
  MOD_RES (26)..(26): Selenocysteine
  MOD_RES (49)..(50): Selenocysteine
  MOD_RES (52)..(52): Selenocysteine
  MOD_RES (103)..(103): Selenocysteine
  MOD_RES (131)..(131): Selenocysteine
  MOD_RES (140)..(140): Selenocysteine
  MOD_RES (160)..(160): Selenocysteine
  MOD_RES (167)..(167): Selenocysteine
  MOD_RES (171)..(171): Selenocysteine
  MOD_RES (210)..(210): Selenocysteine
MYQVPLPLDRDGXLVRLRFXMVALVXVCCPLVAFLFCILWSLLFHFKEXXAXHCGVPNYLPSVSSAIGGEVPQRYVWRFCIGLHSAPRFLVAFAYWNHYLSCXSPCSCYRPLCRLNFGLNVVENLALLVLXYVSSSEDFXIHENAFIVFIASSLGHMLLXCILWRLXKKHXVSQEVRSIPSGGSKAAQKKIKDICPQDSGNGSQVLQLEXAALHHQLHLLLLGAGCLLSAQHVL

SEQ ID NO: 19955 - protein, 232 aa, Homo sapiens
  MOD_RES (13)..(13): Selenocysteine
  MOD_RES (20)..(20): Selenocysteine
  MOD_RES (26)..(26): Selenocysteine
  MOD_RES (49)..(50): Selenocysteine
  MOD_RES (52)..(52): Selenocysteine
  MOD_RES (103)..(103): Selenocysteine
  MOD_RES (131)..(131): Selenocysteine
  MOD_RES (140)..(140): Selenocysteine
  MOD_RES (160)..(160): Selenocysteine
  MOD_RES (167)..(167): Selenocysteine
  MOD_RES (171)..(171): Selenocysteine
  MOD_RES (208)..(208): Selenocysteine
MYQVPLPLDRDGXLVRLRFXMVALVXVCCPLVAFLFCILWSLLFHFKEXXAXHCGVPNYLPSVSSAIGGEVPQRYVWRFCIGLHSAPRFLVAFAYWNHYLSCXSPCSCYRPLCRLNFGLNVVENLALLVLXYVSSSEDFXIHENAFIVFIASSLGHMLLXCILWRLXKKHXVSQEVRSIPSGGSKAAQKKIKDICPQDSGSQVLQLEXAALHHQLHLLLLGAGCLLSAQHVL

SEQ ID NO: 19956 - protein, 809 aa, Homo sapiens
  MOD_RES (25)..(25): Selenocysteine
  MOD_RES (39)..(39): Selenocysteine
  MOD_RES (79)..(79): Selenocysteine
  MOD_RES (94)..(94): Selenocysteine
  MOD_RES (106)..(106): Selenocysteine
  MOD_RES (117)..(117): Selenocysteine
  MOD_RES (124)..(124): Selenocysteine
  MOD_RES (129)..(129): Selenocysteine
  MOD_RES (166)..(167): Selenocysteine
  MOD_RES (215)..(215): Selenocysteine
  MOD_RES (219)..(219): Selenocysteine
  MOD_RES (223)..(223): Selenocysteine
  MOD_RES (238)..(238): Selenocysteine
  MOD_RES (250)..(250): Selenocysteine
  MOD_RES (258)..(258): Selenocysteine
  MOD_RES (263)..(263): Selenocysteine
  MOD_RES (274)..(274): Selenocysteine
  MOD_RES (300)..(300): Selenocysteine
  MOD_RES (304)..(304): Selenocysteine
  MOD_RES (307)..(307): Selenocysteine
  MOD_RES (313)..(313): Selenocysteine
  MOD_RES (339)..(339): Selenocysteine
  MOD_RES (391)..(391): Selenocysteine
  MOD_RES (431)..(431): Selenocysteine
  MOD_RES (439)..(439): Selenocysteine
  MOD_RES (453)..(453): Selenocysteine
  MOD_RES (484)..(484): Selenocysteine
  MOD_RES (520)..(520): Selenocysteine
  MOD_RES (574)..(576): Selenocysteine
  MOD_RES (591)..(591): Selenocysteine
  MOD_RES (631)..(631): Selenocysteine
  MOD_RES (647)..(647): Selenocysteine
  MOD_RES (649)..(649): Selenocysteine
  MOD_RES (655)..(655): Selenocysteine
MYEALPGPAPENEDGLVKVKEEDPXWEQVCNSQEGSSHXQEICRLRFRHFCYQEAHGPQEALAQLRELCHQWLRPEMHXKEQIMELLVLEQFLXILPKELQPCVKXYPLESGEEAVXVLENLEXGSGDXGQQASVYIQGQDMHPMVAEYQGVSLECQSLQLLPGIXXLKCEPPQRPQGNPQEVSGPVPHGSAHLQEKNPRDKAVVPVFNPVRSQXLVKXEEEXAQAVAAEKWSHLSLXRRNLCGNSAQEXVMSLSPMXEEIVXKDRLFKAKQEXSEEMEQSGEASGKPNRECAPQIPCSXPIAXERXVAHLNXLKDRHPGDLWARMHISSLEYAAGDIXRKGRKKDKARVSELLQGLSFSGDSDVEKDNEPEIQPAQKKLKVSCFPEKSWXKRDIKPNFPSWSALDSGLLNLKSEKLNPVELFELFFDDEXFNLIVNEXNNYASQKNVSLEVXVQEMRCVFGVLLLSGFMRHPRREMYWEVSDXDQNLVRDAIRRDRFELIFSNLHFADNGHLDQKDKFXKLRPLIKQMNKNFLLYAPLEEYYCFDKSMCECFDSDQFLNGKPIRIGYKIWCGXXXQGYLVWFEPYQEESXMKVDEDPDLGLGGNLVMNFADVLLERGQYPYHLCFDSFFXSVKLLSALKKKGVRAXGXIRENRXEKCPLMNVEHMKKMKRGYFDFRIEENNEIILCRWYGDGIISLCSNAVGIEPVNEVSCCDADNEEIPQISQPSIVKVYDECKEGVAKMDQIISKYRVRIRSKKWYSILVSYMIDVAMNNAWQLHRACNPGASLDPLDFRRFVAHFYLEHNAHLSD

SEQ ID NO: 19957 - protein, 221 aa, Homo sapiens
  MOD_RES (84)..(84): Selenocysteine
  MOD_RES (99)..(99): Selenocysteine
  MOD_RES (103)..(103): Selenocysteine
  MOD_RES (121)..(121): Selenocysteine
  MOD_RES (172)..(172): Selenocysteine
MPVMRLFPCFLQLLAGLALPAVPPQQWALSAGNGSSEVEVVPFQEVWGRSYCRALERLVDVVSEYPSEVEHMFSPSCVSLLRCXGCCGDENLHCVPVEXANVXMQLLKIRSGDRPSYVELXFSQHVRCECRHSPGRQSPDMPGDFRADAPSFLPPRRSLPMLFRMEWGCALXGSQSAVWPSSPVPEEIPRMHPGRNGKKQQRKPLREKMKPERCGDAVPRR

SEQ ID NO: 19958 - protein, 149 aa, Homo sapiens
  MOD_RES (84)..(84): Selenocysteine
  MOD_RES (99)..(99): Selenocysteine
  MOD_RES (103)..(103): Selenocysteine
  MOD_RES (121)..(121): Selenocysteine
MPVMRLFPCFLQLLAGLALPAVPPQQWALSAGNGSSEVEVVPFQEVWGRSYCRALERLVDVVSEYPSEVEHMFSPSCVSLLRCXGCCGDENLHCVPVEXANVXMQLLKIRSGDRPSYVELXFSQHVRCECRPLREKMKPERCGDAVPRR

SEQ ID NO: 19959 - protein, 170 aa, Homo sapiens
  MOD_RES (84)..(84): Selenocysteine
  MOD_RES (99)..(99): Selenocysteine
  MOD_RES (103)..(103): Selenocysteine
  MOD_RES (121)..(121): Selenocysteine
  MOD_RES (158)..(158): Selenocysteine
MPVMRLFPCFLQLLAGLALPAVPPQQWALSAGNGSSEVEVVPFQEVWGRSYCRALERLVDVVSEYPSEVEHMFSPSCVSLLRCXGCCGDENLHCVPVEXANVXMQLLKIRSGDRPSYVELXFSQHVRCECRPLREKMKPERRRPKGRGKRRREKQRPXDCHLCGDAVPRR

SEQ ID NO: 19960 - protein, 169 aa, Homo sapiens
  MOD_RES (83)..(83): Selenocysteine
  MOD_RES (98)..(98): Selenocysteine
  MOD_RES (102)..(102): Selenocysteine
  MOD_RES (120)..(120): Selenocysteine
  MOD_RES (157)..(157): Selenocysteine
MPVMRLFPCFLQLLAGLALPAVPPQWALSAGNGSSEVEVVPFQEVWGRSYCRALERLVDVVSEYPSEVEHMFSPSCVSLLRCXGCCGDENLHCVPVEXANVXMQLLKIRSGDRPSYVELXFSQHVRCECRPLREKMKPERRRPKGRGKRRREKQRPXDCHLCGDAVPRR

SEQ ID NO: 19961 - protein, 196 aa, Homo sapiens
  MOD_RES (24)..(24): Selenocysteine
  MOD_RES (62)..(62): Selenocysteine
  MOD_RES (69)..(69): Selenocysteine
  MOD_RES (87)..(87): Selenocysteine
  MOD_RES (114)..(114): Selenocysteine
  MOD_RES (141)..(141): Selenocysteine
  MOD_RES (176)..(176): Selenocysteine
MSRRSMLLAWALPSLLRLGAAQEXEDPACCSPIVPRNEWKALASECAQHLSLPLRYVVVSHXAGSSCNXPASCQQQARNVQHYHMKXLGWCDVGYNFLIGEDGLVYEGRGWNFXGAHSGHLWNPMSIGISFMGNYMDRVPXPQAIRAAQGLLACGVAQGALRSNYVLKGHRDVQRXLSPGNQLYHLIQNWPHYRSP

SEQ ID NO: 19962 - protein, 105 aa, Homo sapiens
  MOD_RES (20)..(20): Selenocysteine
  MOD_RES (46)..(46): Selenocysteine
  MOD_RES (49)..(49): Selenocysteine
  MOD_RES (79)..(79): Selenocysteine
  MOD_RES (94)..(94): Selenocysteine
MAQGVLWILLGLLLWSDPGXASLPLLMDSVIQALAELEQKVPAAKXRHXASAWLMSAPNSGPHNRLYHFLLGAWSLNAXELDPCPLSPELLGLXKEVARHDVREG

SEQ ID NO: 19963 - protein, 576 aa, Homo sapiens
  MOD_RES (20)..(20): Selenocysteine
  MOD_RES (46)..(46): Selenocysteine
  MOD_RES (49)..(49): Selenocysteine
  MOD_RES (79)..(79): Selenocysteine
  MOD_RES (94)..(94): Selenocysteine
  MOD_RES (118)..(118): Selenocysteine
  MOD_RES (151)..(151): Selenocysteine
  MOD_RES (154)..(154): Selenocysteine
  MOD_RES (168)..(168): Selenocysteine
  MOD_RES (181)..(182): Selenocysteine
  MOD_RES (189)..(189): Selenocysteine
  MOD_RES (193)..(193): Selenocysteine
  MOD_RES (213)..(213): Selenocysteine
  MOD_RES (222)..(222): Selenocysteine
  MOD_RES (230)..(230): Selenocysteine
  MOD_RES (237)..(237): Selenocysteine
  MOD_RES (245)..(245): Selenocysteine
  MOD_RES (257)..(257): Selenocysteine
  MOD_RES (259)..(259): Selenocysteine
  MOD_RES (269)..(269): Selenocysteine
  MOD_RES (289)..(289): Selenocysteine
  MOD_RES (327)..(327): Selenocysteine
  MOD_RES (339)..(339): Selenocysteine
  MOD_RES (369)..(369): Selenocysteine
  MOD_RES (373)..(373): Selenocysteine
  MOD_RES (412)..(412): Selenocysteine
  MOD_RES (420)..(420): Selenocysteine
  MOD_RES (423)..(423): Selenocysteine
  MOD_RES (439)..(439): Selenocysteine
  MOD_RES (470)..(470): Selenocysteine
  MOD_RES (487)..(487): Selenocysteine
  MOD_RES (492)..(492): Selenocysteine
  MOD_RES (498)..(498): Selenocysteine
  MOD_RES (502)..(502): Selenocysteine
  MOD_RES (528)..(528): Selenocysteine
  MOD_RES (541)..(541): Selenocysteine
  MOD_RES (546)..(546): Selenocysteine
  MOD_RES (548)..(548): Selenocysteine
  MOD_RES (569)..(569): Selenocysteine
  MOD_RES (573)..(573): Selenocysteine
MAQGVLWILLGLLLWSDPGXASLPLLMDSVIQALAELEQKVPAAKXRHXASAWLMSAPNSGPHNRLYHFLLGAWSLNAXELDPCPLSPELLGLXKEVARHDVREGKEYGVVLAPDGSXVAVEPLLAGLEAGLQGRRVINLPLDSMAAPWEXGDXFPDVVAIAPDVRAXSSPGLRDGSPDVXXADIGANXPDAXKGCPDVQASLPDAKAKSPPXMVDSLLAVXLAGNLGLXFLRGSQXQSHPDLGXEGCWDQLSAPRXFXLLDPKASLLXMAFLNGALDGVILGDYLSRXPEPRPSLSHLLSQYYGAGVARDPGFRSNFRRQNGAALXSASILAQQVWGXLVLLQRLEPVHLQLQCMSQEQLAQVAANAXKEFXEAFLGCPAIHPRCRWGAAPYRGRPKLLQLPLGFLYVHHXYVPAPPCXDFXRCAANMRSMQRYHQDXQGWGDIGYSFVVGSDGYVYEGRGWHWVGAHXLGHNSRGFGVAIVGNYXAALPXEAALRXVRDXLPSCAVRAGLLRPDYALLGHRQLVRXDCPGDALFDLLRXWPHFXAXVKPRPARSVSKRSRREPPPRXLPAXDLQ

SEQ ID NO: 19964 - protein, 634 aa, Homo sapiens
  MOD_RES (20)..(20): Selenocysteine
  MOD_RES (46)..(46): Selenocysteine
  MOD_RES (49)..(49): Selenocysteine
  MOD_RES (79)..(79): Selenocysteine
  MOD_RES (94)..(94): Selenocysteine
  MOD_RES (118)..(118): Selenocysteine
  MOD_RES (151)..(151): Selenocysteine
  MOD_RES (154)..(154): Selenocysteine
  MOD_RES (168)..(168): Selenocysteine
  MOD_RES (181)..(182): Selenocysteine
  MOD_RES (189)..(189): Selenocysteine
  MOD_RES (193)..(193): Selenocysteine
  MOD_RES (213)..(213): Selenocysteine
  MOD_RES (222)..(222): Selenocysteine
  MOD_RES (230)..(230): Selenocysteine
  MOD_RES (237)..(237): Selenocysteine
  MOD_RES (245)..(245): Selenocysteine
  MOD_RES (257)..(257): Selenocysteine
  MOD_RES (259)..(259): Selenocysteine
  MOD_RES (269)..(269): Selenocysteine
  MOD_RES (289)..(289): Selenocysteine
  MOD_RES (327)..(327): Selenocysteine
  MOD_RES (339)..(339): Selenocysteine
  MOD_RES (369)..(369): Selenocysteine
  MOD_RES (373)..(373): Selenocysteine
  MOD_RES (412)..(412): Selenocysteine
  MOD_RES (420)..(420): Selenocysteine
  MOD_RES (423)..(423): Selenocysteine
  MOD_RES (439)..(439): Selenocysteine
  MOD_RES (470)..(470): Selenocysteine
  MOD_RES (487)..(487): Selenocysteine
  MOD_RES (492)..(492): Selenocysteine
  MOD_RES (498)..(498): Selenocysteine
  MOD_RES (502)..(502): Selenocysteine
  MOD_RES (528)..(528): Selenocysteine
  MOD_RES (541)..(541): Selenocysteine
  MOD_RES (546)..(546): Selenocysteine
  MOD_RES (556)..(556): Selenocysteine
  MOD_RES (564)..(564): Selenocysteine
  MOD_RES (567)..(567): Selenocysteine
  MOD_RES (580)..(580): Selenocysteine
  MOD_RES (587)..(587): Selenocysteine
  MOD_RES (614)..(614): Selenocysteine
  MOD_RES (625)..(625): Selenocysteine
MAQGVLWILLGLLLWSDPGXASLPLLMDSVIQALAELEQKVPAAKXRHXASAWLMSAPNSGPHNRLYHFLLGAWSLNAXELDPCPLSPELLGLXKEVARHDVREGKEYGVVLAPDGSXVAVEPLLAGLEAGLQGRRVINLPLDSMAAPWEXGDXFPDVVAIAPDVRAXSSPGLRDGSPDVXXADIGANXPDAXKGCPDVQASLPDAKAKSPPXMVDSLLAVXLAGNLGLXFLRGSQXQSHPDLGXEGCWDQLSAPRXFXLLDPKASLLXMAFLNGALDGVILGDYLSRXPEPRPSLSHLLSQYYGAGVARDPGFRSNFRRQNGAALXSASILAQQVWGXLVLLQRLEPVHLQLQCMSQEQLAQVAANAXKEFXEAFLGCPAIHPRCRWGAAPYRGRPKLLQLPLGFLYVHHXYVPAPPCXDFXRCAANMRSMQRYHQDXQGWGDIGYSFVVGSDGYVYEGRGWHWVGAHXLGHNSRGFGVAIVGNYXAALPXEAALRXVRDXLPSCAVRAGLLRPDYALLGHRQLVRXDCPGDALFDLLRXWPHFXAVSLRSLHYXARRPSVYXSSXRPLPPACNSCARXASARPPXSRRHVYSGNLGPAFAGHSAGNIPDPVXSAYAASAQPQXQPACPFPSS

SEQ ID NO: 19965 - protein, 181 aa, Homo sapiens
  MOD_RES (3)..(3): Selenocysteine
  MOD_RES (9)..(9): Selenocysteine
  MOD_RES (16)..(16): Selenocysteine
  MOD_RES (36)..(36): Selenocysteine
  MOD_RES (56)..(56): Selenocysteine
  MOD_RES (82)..(82): Selenocysteine
  MOD_RES (85)..(85): Selenocysteine
  MOD_RES (115)..(115): Selenocysteine
  MOD_RES (130)..(130): Selenocysteine
  MOD_RES (154)..(154): Selenocysteine
MGXRRRGRXFHCQPSXAEVLCRGQPEIPLGSWNPAXMAQGVLWILLGLLLWSDPGXASLPLLMDSVIQALAELEQKVPAAKXRHXASAWLMSAPNSGPHNRLYHFLLGAWSLNAXELDPCPLSPELLGLXKEVARHDVREGKEYGVVLAPDGSXVAVEPLLAGLEAGLQGRRVINLPLDSM

SEQ ID NO: 19966 - protein, 341 aa, Homo sapiens
  MOD_RES (3)..(3): Selenocysteine
  MOD_RES (20)..(20): Selenocysteine
  MOD_RES (22)..(22): Selenocysteine
  MOD_RES (41)..(41): Selenocysteine
  MOD_RES (49)..(49): Selenocysteine
  MOD_RES (77)..(77): Selenocysteine
  MOD_RES (108)..(108): Selenocysteine
  MOD_RES (164)..(164): Selenocysteine
  MOD_RES (192)..(192): Selenocysteine
  MOD_RES (209)..(209): Selenocysteine
  MOD_RES (212)..(212): Selenocysteine
  MOD_RES (215)..(215): Selenocysteine
  MOD_RES (218)..(218): Selenocysteine
  MOD_RES (222)..(222): Selenocysteine
  MOD_RES (234)..(234): Selenocysteine
  MOD_RES (265)..(265): Selenocysteine
  MOD_RES (308)..(308): Selenocysteine
  MOD_RES (335)..(335): Selenocysteine
MGXLPWLLAFFILGLQAWDXPXIVSRKEWGARPLACRALLXLPVAYIIXDQLPGMQCQQQSVCSQMLRGLQSHSVYXIGWCDVAYNFLVGDDGRVYEGVGWNIQGLHXQGYNNISLGIAFFGNKIGSSPSPAALSAAEGLISYAIQKGHLSPRYIQPLLLKEEXCLDPQHPVMPRKVCPNIIKRSAWEAREXHCPKMNLPAKYVIIIHXAGXSCXVSXDCQXVVRNIQSFHMDXRNFCDIGYHFLVGQDGGVYEGVGWHIQGSHXYGFNDIALGIAFIGYFVEKPPNAAALEAAQDLIQCAVVEGYLXPNYLLMGHSDVVNILSPGQALYNIISXWPHFKH

SEQ ID NO: 19967 - protein, 369 aa, Homo sapiens
  MOD_RES (24)..(24): Selenocysteine
  MOD_RES (44)..(44): Selenocysteine
  MOD_RES (50)..(51): Selenocysteine
  MOD_RES (69)..(70): Selenocysteine
  MOD_RES (89)..(89): Selenocysteine
  MOD_RES (136)..(136): Selenocysteine
  MOD_RES (151)..(151): Selenocysteine
  MOD_RES (170)..(170): Selenocysteine
  MOD_RES (200)..(200): Selenocysteine
  MOD_RES (220)..(220): Selenocysteine
  MOD_RES (226)..(226): Selenocysteine
  MOD_RES (237)..(237): Selenocysteine
  MOD_RES (241)..(241): Selenocysteine
  MOD_RES (293)..(293): Selenocysteine
  MOD_RES (304)..(304): Selenocysteine
  MOD_RES (308)..(308): Selenocysteine
  MOD_RES (310)..(310): Selenocysteine
  MOD_RES (336)..(336): Selenocysteine
  MOD_RES (350)..(350): Selenocysteine
  MOD_RES (363)..(363): Selenocysteine
MLPWLLVFSALGIQAWGDSSWNKXQAKQVSEGLQYLFENISQLXEKDVSXXVSRKAWGAEAVGCSIQLXXPVNVLVIHHVPGLECHDQXVCSQRLRELQAHHVHNNSGCDVAYNFLVGDDGRVYEGVGWNIQGVHXQGYNNISLGFAFFGXKKGHSPSPAALSAMENLIXYAVQKGHLSSSYVQPLLGKGENCLAPRQKXSLKKACPGVVPRSVWGAREXHCPRMXLPAKYGIIIHXAGRXCNISDECRLLVRDIQSFYIDRLKSCDIGYNFLVGQDGAIYEGVGWNVQGSSXPGYDDIALGIXFMGXFXGIPPNAAALEAAQDLIQCAMVKGYLXPNYLLVGHSDVARXLSPGQALYNIISXWPHFKH

SEQ ID NO: 19968 - protein, 373 aa, Homo sapiens
  MOD_RES (24)..(24): Selenocysteine
  MOD_RES (44)..(44): Selenocysteine
  MOD_RES (50)..(50): Selenocysteine
  MOD_RES (54)..(55): Selenocysteine
  MOD_RES (73)..(74): Selenocysteine
  MOD_RES (93)..(93): Selenocysteine
  MOD_RES (140)..(140): Selenocysteine
  MOD_RES (155)..(155): Selenocysteine
  MOD_RES (174)..(174): Selenocysteine
  MOD_RES (204)..(204): Selenocysteine
  MOD_RES (224)..(224): Selenocysteine
  MOD_RES (230)..(230): Selenocysteine
  MOD_RES (241)..(241): Selenocysteine
  MOD_RES (245)..(245): Selenocysteine
  MOD_RES (297)..(297): Selenocysteine
  MOD_RES (308)..(308): Selenocysteine
  MOD_RES (312)..(312): Selenocysteine
  MOD_RES (314)..(314): Selenocysteine
  MOD_RES (340)..(340): Selenocysteine
  MOD_RES (354)..(354): Selenocysteine
  MOD_RES (367)..(367): Selenocysteine
MLPWLLVFSALGIQAWGDSSWNKXQAKQVSEGLQYLFENISQLXEKGLPXDVSXXVSRKAWGAEAVGCSIQLXXPVNVLVIHHVPGLECHDQXVCSQRLRELQAHHVHNNSGCDVAYNFLVGDDGRVYEGVGWNIQGVHXQGYNNISLGFAFFGXKKGHSPSPAALSAMENLIXYAVQKGHLSSSYVQPLLGKGENCLAPRQKXSLKKACPGVVPRSVWGAREXHCPRMXLPAKYGIIIHXAGRXCNISDECRLLVRDIQSFYIDRLKSCDIGYNFLVGQDGAIYEGVGWNVQGSSXPGYDDIALGIXFMGXFXGIPPNAAALEAAQDLIQCAMVKGYLXPNYLLVGHSDVARXLSPGQALYNIISXWPHFKH

SEQ ID NO: 19969 - protein, 339 aa, Homo sapiens
  MOD_RES (80)..(80): Selenocysteine
  MOD_RES (112)..(112): Selenocysteine
  MOD_RES (116)..(116): Selenocysteine
  MOD_RES (122)..(122): Selenocysteine
  MOD_RES (155)..(155): Selenocysteine
  MOD_RES (206)..(206): Selenocysteine
  MOD_RES (235)..(235): Selenocysteine
  MOD_RES (245)..(245): Selenocysteine
  MOD_RES (280)..(280): Selenocysteine
  MOD_RES (300)..(300): Selenocysteine
MEGQHNYLCAGRNDCIVDKIRRKNCPACRLRKCCQAGMVLGGRKFKKFNKVRVVRALDAVALPQPVGVPNESQALSQRFXFSPGQDIQLIPPLINLLMSIEPDVIYAGHDNXKPDXSSSLLXSLNQLGERQLLSVVKWSKSLPGFRNLHIDDQIXLIQYSWMSLMVFGLGWRSYKHVSGQMLYFAPDLILNEQRMKESSFYSLCLXMWQIPQEFVKLQVSQEEFLCMKVLLLLNXIPLEGLRSQXQFEEMRSSYIRELIKAIGLRQKGVVSSSQRFYQLXKLLDNLHDLVKQLHLYCLNXFIQSRALSVEFPEMMSEVIAAQLPKILAGMVKPLLFHKK

SEQ ID NO: 19970 - protein, 170 aa, Homo sapiens
  MOD_RES (10)..(10): Selenocysteine
  MOD_RES (12)..(12): Selenocysteine
  MOD_RES (57)..(57): Selenocysteine
  MOD_RES (148)..(148): Selenocysteine
MKCFFLRRRXFXRSACLGEEPDSEASQSPQYSFESLPQKICLICGDEASGCHYGVLXCGSCKVFFKRAMEGQHNYLCAGRNDCIVDKIRRKNCPACRLRKCCQAGMVLGGRKFKKFNKVRVVRALDAVALPQPVGVPNESQALSQRFXFSPGQDIQLIPPLINLLMSIEP

SEQ ID NO: 19971 - protein, 690 aa, Homo sapiens
  MOD_RES (2)..(2): Selenocysteine
  MOD_RES (41)..(41): Selenocysteine
  MOD_RES (44)..(44): Selenocysteine
  MOD_RES (74)..(74): Selenocysteine
  MOD_RES (93)..(93): Selenocysteine
  MOD_RES (117)..(117): Selenocysteine
  MOD_RES (137)..(137): Selenocysteine
  MOD_RES (157)..(157): Selenocysteine
  MOD_RES (178)..(178): Selenocysteine
  MOD_RES (298)..(299): Selenocysteine
  MOD_RES (320)..(320): Selenocysteine
  MOD_RES (351)..(351): Selenocysteine
  MOD_RES (430)..(430): Selenocysteine
  MOD_RES (440)..(440): Selenocysteine
  MOD_RES (457)..(457): Selenocysteine
  MOD_RES (498)..(498): Selenocysteine
  MOD_RES (583)..(583): Selenocysteine
  MOD_RES (647)..(647): Selenocysteine
  MOD_RES (689)..(689): Selenocysteine
MXELKAKGPRAPHVAGGPPSPEVGSPLLCRPAAGPFPGSQXSDXLPEVSAIPISLDGLLFPRPCQGQDPSDEKXQDQQSLSDVEGAYSRAEAXRGAGGSSSSPPEKDSGLLDSVLDXLLAPSGPGQSQPSPPACEVXSSWCLFGPELPEDPPAAPAXQRVLSPLMSRSGCKVGDSSGXAAAHKVLPRGLSPARQLLLPASESPHWSGAPVKPSPQAAAVEVEEEDGSESEESAGPLLKGKPRALGGAAAGGGAAAVPPGAAAGGVALVPKEDSRFSAPRVALVEQDAPMAPGRSPLAXXVMDFIHVPILPLNHALLAARXRQLLEDESYDGGAGAASAFAPPRSSPCASSXPVAVGDFPDCAYPPDAEPKDDAYPLYSDFQPPALKIKEEEEGAEASARSPRSYLVAGANPAAFPDFPLGPPPPLPPRAXPSRPGEAAVXAAPASASVSSASSSGSXLECILYKAEGAPPQQGPFAPPPCKAPGASGCLLPRDGLPSXSASAAAAGAAPALYPALGLNGLPQLGYQAAVLKEGLPQVYPPYLNYLRPDSEASQSPQYSFESLPQKICLICGDEASGCHYGVLXCGSCKVFFKRAMEGQHNYLCAGRNDCIVDKIRRKNCPACRLRKCCQAGMVLGGFRNLHIDDQIXLIQYSWMSLMVFGLGWRSYKHVSGQMLYFAPDLILNEESIVXS

SEQ ID NO: 19972 - protein, 695 aa, Homo sapiens
  MOD_RES (2)..(2): Selenocysteine
  MOD_RES (41)..(41): Selenocysteine
  MOD_RES (44)..(44): Selenocysteine
  MOD_RES (74)..(74): Selenocysteine
  MOD_RES (93)..(93): Selenocysteine
  MOD_RES (117)..(117): Selenocysteine
  MOD_RES (137)..(137): Selenocysteine
  MOD_RES (157)..(157): Selenocysteine
  MOD_RES (178)..(178): Selenocysteine
  MOD_RES (298)..(299): Selenocysteine
  MOD_RES (320)..(320): Selenocysteine
  MOD_RES (351)..(351): Selenocysteine
  MOD_RES (430)..(430): Selenocysteine
  MOD_RES (440)..(440): Selenocysteine
  MOD_RES (457)..(457): Selenocysteine
  MOD_RES (498)..(498): Selenocysteine
  MOD_RES (583)..(583): Selenocysteine
  MOD_RES (647)..(647): Selenocysteine
  MOD_RES (690)..(690): Selenocysteine
MXELKAKGPRAPHVAGGPPSPEVGSPLLCRPAAGPFPGSQXSDXLPEVSAIPISLDGLLFPRPCQGQDPSDEKXQDQQSLSDVEGAYSRAEAXRGAGGSSSSPPEKDSGLLDSVLDXLLAPSGPGQSQPSPPACEVXSSWCLFGPELPEDPPAAPAXQRVLSPLMSRSGCKVGDSSGXAAAHKVLPRGLSPARQLLLPASESPHWSGAPVKPSPQAAAVEVEEEDGSESEESAGPLLKGKPRALGGAAAGGGAAAVPPGAAAGGVALVPKEDSRFSAPRVALVEQDAPMAPGRSPLAXXVMDFIHVPILPLNHALLAARXRQLLEDESYDGGAGAASAFAPPRSSPCASSXPVAVGDFPDCAYPPDAEPKDDAYPLYSDFQPPALKIKEEEEGAEASARSPRSYLVAGANPAAFPDFPLGPPPPLPPRAXPSRPGEAAVXAAPASASVSSASSSGSXLECILYKAEGAPPQQGPFAPPPCKAPGASGCLLPRDGLPSXSASAAAAGAAPALYPALGLNGLPQLGYQAAVLKEGLPQVYPPYLNYLRPDSEASQSPQYSFESLPQKICLICGDEASGCHYGVLXCGSCKVFFKRAMEGQHNYLCAGRNDCIVDKIRRKNCPACRLRKCCQAGMVLGGFRNLHIDDQIXLIQYSWMSLMVFGLGWRSYKHVSGQMLYFAPDLILNDSFGRAXKSNPV

SEQ ID NO: 19973 - protein, 764 aa, Homo sapiens
  MOD_RES (2)..(2): Selenocysteine
  MOD_RES (41)..(41): Selenocysteine
  MOD_RES (44)..(44): Selenocysteine
  MOD_RES (74)..(74): Selenocysteine
  MOD_RES (93)..(93): Selenocysteine
  MOD_RES (117)..(117): Selenocysteine
  MOD_RES (137)..(137): Selenocysteine
  MOD_RES (157)..(157): Selenocysteine
  MOD_RES (178)..(178): Selenocysteine
  MOD_RES (298)..(299): Selenocysteine
  MOD_RES (320)..(320): Selenocysteine
  MOD_RES (351)..(351): Selenocysteine
  MOD_RES (430)..(430): Selenocysteine
  MOD_RES (440)..(440): Selenocysteine
  MOD_RES (457)..(457): Selenocysteine
  MOD_RES (498)..(498): Selenocysteine
  MOD_RES (583)..(583): Selenocysteine
  MOD_RES (635)..(635): Selenocysteine
  MOD_RES (667)..(667): Selenocysteine
  MOD_RES (671)..(671): Selenocysteine
  MOD_RES (677)..(677): Selenocysteine
  MOD_RES (710)..(710): Selenocysteine
MXELKAKGPRAPHVAGGPPSPEVGSPLLCRPAAGPFPGSQXSDXLPEVSAIPISLDGLLFPRPCQGQDPSDEKXQDQQSLSDVEGAYSRAEAXRGAGGSSSSPPEKDSGLLDSVLDXLLAPSGPGQSQPSPPACEVXSSWCLFGPELPEDPPAAPAXQRVLSPLMSRSGCKVGDSSGXAAAHKVLPRGLSPARQLLLPASESPHWSGAPVKPSPQAAAVEVEEEDGSESEESAGPLLKGKPRALGGAAAGGGAAAVPPGAAAGGVALVPKEDSRFSAPRVALVEQDAPMAPGRSPLAXXVMDFIHVPILPLNHALLAARXRQLLEDESYDGGAGAASAFAPPRSSPCASSXPVAVGDFPDCAYPPDAEPKDDAYPLYSDFQPPALKIKEEEEGAEASARSPRSYLVAGANPAAFPDFPLGPPPPLPPRAXPSRPGEAAVXAAPASASVSSASSSGSXLECILYKAEGAPPQQGPFAPPPCKAPGASGCLLPRDGLPSXSASAAAAGAAPALYPALGLNGLPQLGYQAAVLKEGLPQVYPPYLNYLRPDSEASQSPQYSFESLPQKICLICGDEASGCHYGVLXCGSCKVFFKRAMEGRKFKKFNKVRVVRALDAVALPQPVGVPNESQALSQRFXFSPGQDIQLIPPLINLLMSIEPDVIYAGHDNXKPDXSSSLLXSLNQLGERQLLSVVKWSKSLPGFRNLHIDDQIXLIQYSWMSLMVFGLGWRSYKHVSGQMLYFAPDLILNESHRSLSSFKLAKKSSSV

SEQ ID NO: 19974 - protein, 803 aa, Homo sapiens
  MOD_RES (2)..(2): Selenocysteine
  MOD_RES (41)..(41): Selenocysteine
  MOD_RES (44)..(44): Selenocysteine
  MOD_RES (74)..(74): Selenocysteine
  MOD_RES (93)..(93): Selenocysteine
  MOD_RES (117)..(117): Selenocysteine
  MOD_RES (137)..(137): Selenocysteine
  MOD_RES (157)..(157): Selenocysteine
  MOD_RES (178)..(178): Selenocysteine
  MOD_RES (298)..(299): Selenocysteine
  MOD_RES (320)..(320): Selenocysteine
  MOD_RES (351)..(351): Selenocysteine
  MOD_RES (430)..(430): Selenocysteine
  MOD_RES (440)..(440): Selenocysteine
  MOD_RES (457)..(457): Selenocysteine
  MOD_RES (498)..(498): Selenocysteine
  MOD_RES (583)..(583): Selenocysteine
  MOD_RES (674)..(674): Selenocysteine
  MOD_RES (706)..(706): Selenocysteine
  MOD_RES (710)..(710): Selenocysteine
  MOD_RES (716)..(716): Selenocysteine
  MOD_RES (749)..(749): Selenocysteine
MXELKAKGPRAPHVAGGPPSPEVGSPLLCRPAAGPFPGSQXSDXLPEVSAIPISLDGLLFPRPCQGQDPSDEKXQDQQSLSDVEGAYSRAEAXRGAGGSSSSPPEKDSGLLDSVLDXLLAPSGPGQSQPSPPACEVXSSWCLFGPELPEDPPAAPAXQRVLSPLMSRSGCKVGDSSGXAAAHKVLPRGLSPARQLLLPASESPHWSGAPVKPSPQAAAVEVEEEDGSESEESAGPLLKGKPRALGGAAAGGGAAAVPPGAAAGGVALVPKEDSRFSAPRVALVEQDAPMAPGRSPLAXXVMDFIHVPILPLNHALLAARXRQLLEDESYDGGAGAASAFAPPRSSPCASSXPVAVGDFPDCAYPPDAEPKDDAYPLYSDFQPPALKIKEEEEGAEASARSPRSYLVAGANPAAFPDFPLGPPPPLPPRAXPSRPGEAAVXAAPASASVSSASSSGSXLECILYKAEGAPPQQGPFAPPPCKAPGASGCLLPRDGLPSXSASAAAAGAAPALYPALGLNGLPQLGYQAAVLKEGLPQVYPPYLNYLRPDSEASQSPQYSFESLPQKICLICGDEASGCHYGVLXCGSCKVFFKRAMEGQHNYLCAGRNDCIVDKIRRKNCPACRLRKCCQAGMVLGGRKFKKFNKVRVVRALDAVALPQPVGVPNESQALSQRFXFSPGQDIQLIPPLINLLMSIEPDVIYAGHDNXKPDXSSSLLXSLNQLGERQLLSVVKWSKSLPGFRNLHIDDQIXLIQYSWMSLMVFGLGWRSYKHVSGQMLYFAPDLILNESHRSLSSFKLAKKSSSV

SEQ ID NO: 19975 - protein, 831 aa, Homo sapiens
  MOD_RES (2)..(2): Selenocysteine
  MOD_RES (41)..(41): Selenocysteine
  MOD_RES (44)..(44): Selenocysteine
  MOD_RES (74)..(74): Selenocysteine
  MOD_RES (93)..(93): Selenocysteine
  MOD_RES (117)..(117): Selenocysteine
  MOD_RES (137)..(137): Selenocysteine
  MOD_RES (157)..(157): Selenocysteine
  MOD_RES (178)..(178): Selenocysteine
  MOD_RES (298)..(299): Selenocysteine
  MOD_RES (320)..(320): Selenocysteine
  MOD_RES (351)..(351): Selenocysteine
  MOD_RES (430)..(430): Selenocysteine
  MOD_RES (440)..(440): Selenocysteine
  MOD_RES (457)..(457): Selenocysteine
  MOD_RES (498)..(498): Selenocysteine
  MOD_RES (583)..(583): Selenocysteine
  MOD_RES (647)..(647): Selenocysteine
  MOD_RES (698)..(698): Selenocysteine
  MOD_RES (727)..(727): Selenocysteine
  MOD_RES (737)..(737): Selenocysteine
  MOD_RES (772)..(772): Selenocysteine
  MOD_RES (792)..(792): Selenocysteine
MXELKAKGPRAPHVAGGPPSPEVGSPLLCRPAAGPFPGSQXSDXLPEVSAIPISLDGLLFPRPCQGQDPSDEKXQDQQSLSDVEGAYSRAEAXRGAGGSSSSPPEKDSGLLDSVLDXLLAPSGPGQSQPSPPACEVXSSWCLFGPELPEDPPAAPAXQRVLSPLMSRSGCKVGDSSGXAAAHKVLPRGLSPARQLLLPASESPHWSGAPVKPSPQAAAVEVEEEDGSESEESAGPLLKGKPRALGGAAAGGGAAAVPPGAAAGGVALVPKEDSRFSAPRVALVEQDAPMAPGRSPLAXXVMDFIHVPILPLNHALLAARXRQLLEDESYDGGAGAASAFAPPRSSPCASSXPVAVGDFPDCAYPPDAEPKDDAYPLYSDFQPPALKIKEEEEGAEASARSPRSYLVAGANPAAFPDFPLGPPPPLPPRAXPSRPGEAAVXAAPASASVSSASSSGSXLECILYKAEGAPPQQGPFAPPPCKAPGASGCLLPRDGLPSXSASAAAAGAAPALYPALGLNGLPQLGYQAAVLKEGLPQVYPPYLNYLRPDSEASQSPQYSFESLPQKICLICGDEASGCHYGVLXCGSCKVFFKRAMEGQHNYLCAGRNDCIVDKIRRKNCPACRLRKCCQAGMVLGGFRNLHIDDQIXLIQYSWMSLMVFGLGWRSYKHVSGQMLYFAPDLILNEQRMKESSFYSLCLXMWQIPQEFVKLQVSQEEFLCMKVLLLLNXIPLEGLRSQXQFEEMRSSYIRELIKAIGLRQKGVVSSSQRFYQLXKLLDNLHDLVKQLHLYCLNXFIQSRALSVEFPEMMSEVIAAQLPKILAGMVKPLLFHKK

SEQ ID NO: 19976 - protein, 933 aa, Homo sapiens
  MOD_RES (2)..(2): Selenocysteine
  MOD_RES (41)..(41): Selenocysteine
  MOD_RES (44)..(44): Selenocysteine
  MOD_RES (74)..(74): Selenocysteine
  MOD_RES (93)..(93): Selenocysteine
  MOD_RES (117)..(117): Selenocysteine
  MOD_RES (137)..(137): Selenocysteine
  MOD_RES (157)..(157): Selenocysteine
  MOD_RES (178)..(178): Selenocysteine
  MOD_RES (298)..(299): Selenocysteine
  MOD_RES (320)..(320): Selenocysteine
  MOD_RES (351)..(351): Selenocysteine
  MOD_RES (430)..(430): Selenocysteine
  MOD_RES (440)..(440): Selenocysteine
  MOD_RES (457)..(457): Selenocysteine
  MOD_RES (498)..(498): Selenocysteine
  MOD_RES (583)..(583): Selenocysteine
  MOD_RES (674)..(674): Selenocysteine
  MOD_RES (706)..(706): Selenocysteine
  MOD_RES (710)..(710): Selenocysteine
  MOD_RES (716)..(716): Selenocysteine
  MOD_RES (749)..(749): Selenocysteine
  MOD_RES (800)..(800): Selenocysteine
  MOD_RES (829)..(829): Selenocysteine
  MOD_RES (839)..(839): Selenocysteine
  MOD_RES (874)..(874): Selenocysteine
  MOD_RES (894)..(894): Selenocysteine
MXELKAKGPRAPHVAGGPPSPEVGSPLLCRPAAGPFPGSQXSDXLPEVSAIPISLDGLLFPRPCQGQDPSDEKXQDQQSLSDVEGAYSRAEAXRGAGGSSSSPPEKDSGLLDSVLDXLLAPSGPGQSQPSPPACEVXSSWCLFGPELPEDPPAAPAXQRVLSPLMSRSGCKVGDSSGXAAAHKVLPRGLSPARQLLLPASESPHWSGAPVKPSPQAAAVEVEEEDGSESEESAGPLLKGKPRALGGAAAGGGAAAVPPGAAAGGVALVPKEDSRFSAPRVALVEQDAPMAPGRSPLAXXVMDFIHVPILPLNHALLAARXRQLLEDESYDGGAGAASAFAPPRSSPCASSXPVAVGDFPDCAYPPDAEPKDDAYPLYSDFQPPALKIKEEEEGAEASARSPRSYLVAGANPAAFPDFPLGPPPPLPPRAXPSRPGEAAVXAAPASASVSSASSSGSXLECILYKAEGAPPQQGPFAPPPCKAPGASGCLLPRDGLPSXSASAAAAGAAPALYPALGLNGLPQLGYQAAVLKEGLPQVYPPYLNYLRPDSEASQSPQYSFESLPQKICLICGDEASGCHYGVLXCGSCKVFFKRAMEGQHNYLCAGRNDCIVDKIRRKNCPACRLRKCCQAGMVLGGRKFKKFNKVRVVRALDAVALPQPVGVPNESQALSQRFXFSPGQDIQLIPPLINLLMSIEPDVIYAGHDNXKPDXSSSLLXSLNQLGERQLLSVVKWSKSLPGFRNLHIDDQIXLIQYSWMSLMVFGLGWRSYKHVSGQMLYFAPDLILNEQRMKESSFYSLCLXMWQIPQEFVKLQVSQEEFLCMKVLLLLNXIPLEGLRSQXQFEEMRSSYIRELIKAIGLRQKGVVSSSQRFYQLXKLLDNLHDLVKQLHLYCLNXFIQSRALSVEFPEMMSEVIAAQLPKILAGMVKPLLFHKK

SEQ ID NO: 19977 - protein, 59 aa, Homo sapiens
  MOD_RES (26)..(26): Selenocysteine
  MOD_RES (32)..(32): Selenocysteine
  MOD_RES (43)..(43): Selenocysteine
  MOD_RES (55)..(55): Selenocysteine
KFYGPGEELEGEGKDPLQLKHNPLRXGRPLGXGPRLGACKVPXLQSLKSRRISNXSDSL

SEQ ID NO: 19978 - protein, 223 aa, Homo sapiens
  MOD_RES (12)..(12): Selenocysteine
  MOD_RES (49)..(49): Selenocysteine
  MOD_RES (93)..(93): Selenocysteine
  MOD_RES (131)..(131): Selenocysteine
  MOD_RES (157)..(157): Selenocysteine
  MOD_RES (211)..(211): Selenocysteine
  MOD_RES (216)..(216): Selenocysteine
MAAGDGDVKLGXLGSGSESSNDGGSESPGDAGAAAEGGGWAAAALALLXGGGEMLLNVALVALVLLGAYRLWVRWGRRGLGAGAGAGEESPAXSLPRMKKRDFSLEQLRQYDGSRNPRILLAVNGKVFDVXKGSKFYGPAGPYGIFAGRDASRGLAXFCLDKDALRDEYDDLSDLNAVQMESVREWEMQFKEKYDYVGRLLKPGEEPSEYXDEEDXKDHNKQD

SEQ ID NO: 19979 - protein, 44 aa, Homo sapiens
  MOD_RES (32)..(32): Selenocysteine
  MOD_RES (37)..(37): Selenocysteine
MESVREWEMQFKEKYDYVGRLLKPGEEPSEYXDEEDXKDHNKQD

SEQ ID NO: 19980 - protein, 247 aa, Homo sapiens
  MOD_RES (36)..(36): Selenocysteine
  MOD_RES (73)..(73): Selenocysteine
  MOD_RES (117)..(117): Selenocysteine
  MOD_RES (155)..(155): Selenocysteine
  MOD_RES (181)..(181): Selenocysteine
  MOD_RES (235)..(235): Selenocysteine
  MOD_RES (240)..(240): Selenocysteine
MGGAGRGVGEGRGRGGGGRRWRAVMAAGDGDVKLGXLGSGSESSNDGGSESPGDAGAAAEGGGWAAAALALLXGGGEMLLNVALVALVLLGAYRLWVRWGRRGLGAGAGAGEESPAXSLPRMKKRDFSLEQLRQYDGSRNPRILLAVNGKVFDVXKGSKFYGPAGPYGIFAGRDASRGLAXFCLDKDALRDEYDDLSDLNAVQMESVREWEMQFKEKYDYVGRLLKPGEEPSEYXDEEDXKDHNKQD

SEQ ID NO: 19981 - protein, 91 aa, Homo sapiens
  MOD_RES (7)..(7): Selenocysteine
  MOD_RES (25)..(25): Selenocysteine
  MOD_RES (79)..(79): Selenocysteine
  MOD_RES (84)..(84): Selenocysteine
MQSLLKXAGPYGIFAGRDASRGLAXFCLDKDALRDEYDDLSDLNAVQMESVREWEMQFKEKYDYVGRLLKPGEEPSEYXDEEDXKDHNKQD

SEQ ID NO: 19982 - protein, 221 aa, Homo sapiens
  MOD_RES (20)..(21): Selenocysteine
  MOD_RES (35)..(36): Selenocysteine
  MOD_RES (39)..(39): Selenocysteine
  MOD_RES (69)..(69): Selenocysteine
  MOD_RES (116)..(117): Selenocysteine
  MOD_RES (156)..(156): Selenocysteine
  MOD_RES (198)..(198): Selenocysteine
  MOD_RES (203)..(203): Selenocysteine
  MOD_RES (210)..(210): Selenocysteine
  MOD_RES (213)..(214): Selenocysteine
  MOD_RES (219)..(220): Selenocysteine
MEDPFDFSREPWNKEADQPXXEPGMVLDSVEAGDXXPPXKRKSKFSGFGKIFKPWKWRKKKSSDKFKEXSEVLERKISMRKPREELVKRGVLLEDPEQGGEDPGKPSDAMLKNGHXXPIGNARSSSPVQVEEEPVRLASLRKAIPEEDLKKRLGSXGSQPNSEAESVPENVPKPPLLPPKRPLSSSHEASEGQAKDAXSSGGXARFIISXSIXXAPAAXXA

SEQ ID NO: 19983 - protein, 63 aa, Homo sapiens
  MOD_RES (38)..(38): Selenocysteine
MEDPFDFSREPWNSRGSRPAHYRARHGPGQCGSRRHNXSYQKEEQVLRLWQDLQALEMEEKKK

SEQ ID NO: 19984 - protein, 702 aa, Homo sapiens
  MOD_RES (12)..(13): Selenocysteine
  MOD_RES (27)..(28): Selenocysteine
  MOD_RES (31)..(31): Selenocysteine
  MOD_RES (61)..(61): Selenocysteine
  MOD_RES (108)..(109): Selenocysteine
  MOD_RES (148)..(148): Selenocysteine
  MOD_RES (190)..(190): Selenocysteine
  MOD_RES (195)..(195): Selenocysteine
  MOD_RES (202)..(202): Selenocysteine
  MOD_RES (205)..(206): Selenocysteine
  MOD_RES (211)..(212): Selenocysteine
  MOD_RES (215)..(215): Selenocysteine
  MOD_RES (220)..(220): Selenocysteine
  MOD_RES (226)..(226): Selenocysteine
  MOD_RES (233)..(233): Selenocysteine
  MOD_RES (241)..(241): Selenocysteine
  MOD_RES (243)..(244): Selenocysteine
  MOD_RES (246)..(246): Selenocysteine
  MOD_RES (250)..(250): Selenocysteine
  MOD_RES (285)..(285): Selenocysteine
  MOD_RES (303)..(303): Selenocysteine
  MOD_RES (307)..(307): Selenocysteine
  MOD_RES (315)..(316): Selenocysteine
  MOD_RES (318)..(318): Selenocysteine
  MOD_RES (327)..(327): Selenocysteine
  MOD_RES (349)..(349): Selenocysteine
  MOD_RES (358)..(358): Selenocysteine
  MOD_RES (365)..(365): Selenocysteine
  MOD_RES (426)..(426): Selenocysteine
  MOD_RES (432)..(432): Selenocysteine
  MOD_RES (458)..(458): Selenocysteine
  MOD_RES (462)..(462): Selenocysteine
  MOD_RES (468)..(468): Selenocysteine
  MOD_RES (484)..(484): Selenocysteine
  MOD_RES (488)..(488): Selenocysteine
  MOD_RES (494)..(494): Selenocysteine
  MOD_RES (496)..(496): Selenocysteine
  MOD_RES (547)..(547): Selenocysteine
  MOD_RES (584)..(584): Selenocysteine
  MOD_RES (594)..(594): Selenocysteine
  MOD_RES (624)..(624): Selenocysteine
  MOD_RES (632)..(632): Selenocysteine
  MOD_RES (651)..(651): Selenocysteine
  MOD_RES (665)..(665): Selenocysteine
  MOD_RES (668)..(668): Selenocysteine
  MOD_RES (697)..(697): Selenocysteine
MEDPFEEADQPXXEPGMVLDSVEAGDXXPPXKRKSKFSGFGKIFKPWKWRKKKSSDKFKEXSEVLERKISMRKPREELVKRGVLLEDPEQGGEDPGKPSDAMLKNGHXXPIGNARSSSPVQVEEEPVRLASLRKAIPEEDLKKRLGSXGSQPNSEAESVPENVPKPPLLPPKRPLSSSHEASEGQAKDAXSSGGXARFIISXSIXXAPAAXXAAXSLAKXVNLSVXPSPAPRXLPAAPASXNXXAXPSLXHMVPAKQPPIPPPKPAHRNSNPVIAELSQAINSGXLLSKPSPPLPPKRGIPSXSVPXLESAAAIXXKXPSDEREKSXCSMGSELLPMISPRSPSPPLPXHIPPEPPRXPPFPAKXFQVVPEIEFPPSLDLHQEIPQQEDQKKEVPKRILDQNFGEPHIPSRLPPLPLHIRIQQALXSPLPMXPILEGSHRAHSLLFENSDSFSEDSSXLGRXRSLPIXIEMLKVPDDEEEEEQXCPSXFSEEMXPXSVIPKLPQCLREEEEKESDSDSEGPIQYRDEEDEDESYQSALANKVKRKDXLAMKLNHRPSEPELNLNSWPCKSKEEWNEIRHQIGNXLIRRLSQRPXPEELEQRNILQPKNEADRQAEKREIKRRLXRKLSQRPXVAELLARKILRFNEYVEVXDAQDYDRRADKPWXKLXPADKAAIRKELNEFKSSEMEVHEESKHFXRYHRP

SEQ ID NO: 19985 - protein, 41 aa, Homo sapiens
  MOD_RES (13)..(13): Selenocysteine
  MOD_RES (41)..(41): Selenocysteine
MEDPFEMGFYHVXQAGLELLDSSNPRLASQSAGIRGVSHCX

SEQ ID NO: 19986 - protein, 106 aa, Homo sapiens
  MOD_RES (30)..(31): Selenocysteine
  MOD_RES (45)..(46): Selenocysteine
  MOD_RES (49)..(49): Selenocysteine
  MOD_RES (79)..(79): Selenocysteine
MGQADVSRPVNPDAVDFSREPWNKEADQPXXEPGMVLDSVEAGDXXPPXKRKSKFSGFGKIFKPWKWRKKKSSDKFKEXSEVLERKISMRKPREELVKRGVLLEDP

SEQ ID NO: 19987 - protein, 712 aa, Homo sapiens
  MOD_RES (22)..(23): Selenocysteine
  MOD_RES (37)..(38): Selenocysteine
  MOD_RES (41)..(41): Selenocysteine
  MOD_RES (71)..(71): Selenocysteine
  MOD_RES (118)..(119): Selenocysteine
  MOD_RES (158)..(158): Selenocysteine
  MOD_RES (200)..(200): Selenocysteine
  MOD_RES (205)..(205): Selenocysteine
  MOD_RES (212)..(212): Selenocysteine
  MOD_RES (215)..(216): Selenocysteine
  MOD_RES (221)..(222): Selenocysteine
  MOD_RES (225)..(225): Selenocysteine
  MOD_RES (230)..(230): Selenocysteine
  MOD_RES (236)..(236): Selenocysteine
  MOD_RES (243)..(243): Selenocysteine
  MOD_RES (251)..(251): Selenocysteine
  MOD_RES (253)..(254): Selenocysteine
  MOD_RES (256)..(256): Selenocysteine
  MOD_RES (260)..(260): Selenocysteine
  MOD_RES (295)..(295): Selenocysteine
  MOD_RES (313)..(313): Selenocysteine
  MOD_RES (317)..(317): Selenocysteine
  MOD_RES (325)..(326): Selenocysteine
  MOD_RES (328)..(328): Selenocysteine
  MOD_RES (337)..(337): Selenocysteine
  MOD_RES (359)..(359): Selenocysteine
  MOD_RES (368)..(368): Selenocysteine
  MOD_RES (375)..(375): Selenocysteine
  MOD_RES (436)..(436): Selenocysteine
  MOD_RES (442)..(442): Selenocysteine
  MOD_RES (468)..(468): Selenocysteine
  MOD_RES (472)..(472): Selenocysteine
  MOD_RES (478)..(478): Selenocysteine
  MOD_RES (494)..(494): Selenocysteine
  MOD_RES (498)..(498): Selenocysteine
  MOD_RES (504)..(504): Selenocysteine
  MOD_RES (506)..(506): Selenocysteine
  MOD_RES (557)..(557): Selenocysteine
  MOD_RES (594)..(594): Selenocysteine
  MOD_RES (604)..(604): Selenocysteine
  MOD_RES (634)..(634): Selenocysteine
  MOD_RES (642)..(642): Selenocysteine
  MOD_RES (661)..(661): Selenocysteine
  MOD_RES (675)..(675): Selenocysteine
  MOD_RES (678)..(678): Selenocysteine
  MOD_RES (707)..(707): Selenocysteine
MGQADVSRPVNPDAVEEADQPXXEPGMVLDSVEAGDXXPPXKRKSKFSGFGKIFKPWKWRKKKSSDKFKEXSEVLERKISMRKPREELVKRGVLLEDPEQGGEDPGKPSDAMLKNGHXXPIGNARSSSPVQVEEEPVRLASLRKAIPEEDLKKRLGSXGSQPNSEAESVPENVPKPPLLPPKRPLSSSHEASEGQAKDAXSSGGXARFIISXSIXXAPAAXXAAXSLAKXVNLSVXPSPAPRXLPAAPASXNXXAXPSLXHMVPAKQPPIPPPKPAHRNSNPVIAELSQAINSGXLLSKPSPPLPPKRGIPSXSVPXLESAAAIXXKXPSDEREKSXCSMGSELLPMISPRSPSPPLPXHIPPEPPRXPPFPAKXFQVVPEIEFPPSLDLHQEIPQQEDQKKEVPKRILDQNFGEPHIPSRLPPLPLHIRIQQALXSPLPMXPILEGSHRAHSLLFENSDSFSEDSSXLGRXRSLPIXIEMLKVPDDEEEEEQXCPSXFSEEMXPXSVIPKLPQCLREEEEKESDSDSEGPIQYRDEEDEDESYQSALANKVKRKDXLAMKLNHRPSEPELNLNSWPCKSKEEWNEIRHQIGNXLIRRLSQRPXPEELEQRNILQPKNEADRQAEKREIKRRLXRKLSQRPXVAELLARKILRFNEYVEVXDAQDYDRRADKPWXKLXPADKAAIRKELNEFKSSEMEVHEESKHFXRYHRP

SEQ ID NO: 19988 - protein, 124 aa, Homo sapiens
  MOD_RES (54)..(54): Selenocysteine
  MOD_RES (80)..(80): Selenocysteine
  MOD_RES (91)..(91): Selenocysteine
  MOD_RES (108)..(108): Selenocysteine
  MOD_RES (123)..(124): Selenocysteine
MAAKVFESIGKFGLALAVAGGVVNSALYNVDAGHRAVIFDRFRGVQDIVVGEGXHFLIPWVQKPIIFDCRSRPRNVPVIXGSKDLQNVNIXLRILFRPVASQLPRIFXSIGEDYDERVLPSIXX

SEQ ID NO: 19989 - protein, 201 aa, Homo sapiens
  MOD_RES (54)..(54): Selenocysteine
  MOD_RES (80)..(80): Selenocysteine
  MOD_RES (91)..(91): Selenocysteine
  MOD_RES (108)..(108): Selenocysteine
  MOD_RES (123)..(124): Selenocysteine
  MOD_RES (141)..(141): Selenocysteine
  MOD_RES (155)..(155): Selenocysteine
  MOD_RES (160)..(160): Selenocysteine
  MOD_RES (171)..(171): Selenocysteine
  MOD_RES (174)..(174): Selenocysteine
  MOD_RES (180)..(180): Selenocysteine
MAAKVFESIGKFGLALAVAGGVVNSALYNVDAGHRAVIFDRFRGVQDIVVGEGXHFLIPWVQKPIIFDCRSRPRNVPVIXGSKDLQNVNIXLRILFRPVASQLPRIFXSIGEDYDERVLPSIXXEILKSVVARFDAGELIXQRELVSRQVSDDLXERAAXFGLILDDVSLXHLXFGKEFXEAVEAKQVAQQEAERARFVVE

SEQ ID NO: 19990 - protein, 202 aa, Homo sapiens
  MOD_RES (54)..(54): Selenocysteine
  MOD_RES (80)..(80): Selenocysteine
  MOD_RES (91)..(91): Selenocysteine
  MOD_RES (108)..(108): Selenocysteine
  MOD_RES (123)..(124): Selenocysteine
  MOD_RES (141)..(141): Selenocysteine
  MOD_RES (155)..(155): Selenocysteine
  MOD_RES (160)..(160): Selenocysteine
  MOD_RES (171)..(171): Selenocysteine
  MOD_RES (174)..(174): Selenocysteine
  MOD_RES (180)..(180): Selenocysteine
MAAKVFESIGKFGLALAVAGGVVNSALYNVDAGHRAVIFDRFRGVQDIVVGEGXHFLIPWVQKPIIFDCRSRPRNVPVIXGSKDLQNVNIXLRILFRPVASQLPRIFXSIGEDYDERVLPSIXXEILKSVVARFDAGELIXQRELVSRQVSDDLXERAAXFGLILDDVSLXHLXFGKEFXEAVEAKQVAQQEAERARFVVEK

SEQ ID NO: 19991 - protein, 216 aa, Homo sapiens
  MOD_RES (54)..(54): Selenocysteine
  MOD_RES (80)..(80): Selenocysteine
  MOD_RES (91)..(91): Selenocysteine
  MOD_RES (108)..(108): Selenocysteine
  MOD_RES (123)..(124): Selenocysteine
  MOD_RES (141)..(141): Selenocysteine
  MOD_RES (155)..(155): Selenocysteine
  MOD_RES (160)..(160): Selenocysteine
  MOD_RES (171)..(171): Selenocysteine
  MOD_RES (174)..(174): Selenocysteine
  MOD_RES (180)..(180): Selenocysteine
MAAKVFESIGKFGLALAVAGGVVNSALYNVDAGHRAVIFDRFRGVQDIVVGEGXHFLIPWVQKPIIFDCRSRPRNVPVIXGSKDLQNVNIXLRILFRPVASQLPRIFXSIGEDYDERVLPSIXXEILKSVVARFDAGELIXQRELVSRQVSDDLXERAAXFGLILDDVSLXHLXFGKEFXEAVEAKQVAQQEAERARFVVEKAEQQKKAAIISAEG

SEQ ID NO: 19992 - protein, 246 aa, Homo sapiens
  MOD_RES (54)..(54): Selenocysteine
  MOD_RES (80)..(80): Selenocysteine
  MOD_RES (91)..(91): Selenocysteine
  MOD_RES (108)..(108): Selenocysteine
  MOD_RES (123)..(124): Selenocysteine
  MOD_RES (141)..(141): Selenocysteine
  MOD_RES (155)..(155): Selenocysteine
  MOD_RES (160)..(160): Selenocysteine
  MOD_RES (171)..(171): Selenocysteine
  MOD_RES (174)..(174): Selenocysteine
  MOD_RES (180)..(180): Selenocysteine
  MOD_RES (230)..(230): Selenocysteine
MAAKVFESIGKFGLALAVAGGVVNSALYNVDAGHRAVIFDRFRGVQDIVVGEGXHFLIPWVQKPIIFDCRSRPRNVPVIXGSKDLQNVNIXLRILFRPVASQLPRIFXSIGEDYDERVLPSIXXEILKSVVARFDAGELIXQRELVSRQVSDDLXERAAXFGLILDDVSLXHLXFGKEFXEAVEAKQVAQQEAERARFVVEKAEQQKKAAIISAEGDSKAAELIANSLAXAGDGLIELRKLEAAED

SEQ ID NO: 19993 - protein, 272 aa, Homo sapiens
  MOD_RES (54)..(54): Selenocysteine
  MOD_RES (80)..(80): Selenocysteine
  MOD_RES (91)..(91): Selenocysteine
  MOD_RES (108)..(108): Selenocysteine
  MOD_RES (123)..(124): Selenocysteine
  MOD_RES (141)..(141): Selenocysteine
  MOD_RES (155)..(155): Selenocysteine
  MOD_RES (160)..(160): Selenocysteine
  MOD_RES (171)..(171): Selenocysteine
  MOD_RES (174)..(174): Selenocysteine
  MOD_RES (180)..(180): Selenocysteine
  MOD_RES (230)..(230): Selenocysteine
  MOD_RES (258)..(258): Selenocysteine
MAAKVFESIGKFGLALAVAGGVVNSALYNVDAGHRAVIFDRFRGVQDIVVGEGXHFLIPWVQKPIIFDCRSRPRNVPVIXGSKDLQNVNIXLRILFRPVASQLPRIFXSIGEDYDERVLPSIXXEILKSVVARFDAGELIXQRELVSRQVSDDLXERAAXFGLILDDVSLXHLXFGKEFXEAVEAKQVAQQEAERARFVVEKAEQQKKAAIISAEGDSKAAELIANSLAXAGDGLIELRKLEAAEDIAYQLSRSRNIXYLPAGQSVLLQLPQ

SEQ ID NO: 19994 - protein, 155 aa, Homo sapiens
  MOD_RES (54)..(54): Selenocysteine
  MOD_RES (80)..(80): Selenocysteine
  MOD_RES (91)..(91): Selenocysteine
  MOD_RES (108)..(108): Selenocysteine
  MOD_RES (123)..(124): Selenocysteine
  MOD_RES (141)..(141): Selenocysteine
MAAKVFESIGKFGLALAVAGGVVNSALYNVDAGHRAVIFDRFRGVQDIVVGEGXHFLIPWVQKPIIFDCRSRPRNVPVIXGSKDLQNVNIXLRILFRPVASQLPRIFXSIGEDYDERVLPSIXXEILKSVVARFDAGELIXYLPAGQSVLLQLPQ

SEQ ID NO: 19995 - protein, 112 aa, Homo sapiens
  MOD_RES (21)..(21): Selenocysteine
  MOD_RES (42)..(42): Selenocysteine
  MOD_RES (62)..(62): Selenocysteine
  MOD_RES (94)..(94): Selenocysteine
  MOD_RES (106)..(106): Selenocysteine
MAQNLKDLAGRLPAGPRGMGXALKLLLGAGAVAYGVRESVFXVEGGHRAIFFNRIGGVQQDXILAEGLHFRIPWFQYPIIYDIRARPRKISSPXDGEYLPASVVSXQCSGAS

SEQ ID NO: 19996 - protein, 261 aa, Homo sapiens
  MOD_RES (21)..(21): Selenocysteine
  MOD_RES (42)..(42): Selenocysteine
  MOD_RES (62)..(62): Selenocysteine
  MOD_RES (94)..(94): Selenocysteine
  MOD_RES (155)..(155): Selenocysteine
  MOD_RES (169)..(169): Selenocysteine
  MOD_RES (185)..(185): Selenocysteine
  MOD_RES (194)..(194): Selenocysteine
  MOD_RES (225)..(225): Selenocysteine
  MOD_RES (228)..(228): Selenocysteine
  MOD_RES (236)..(236): Selenocysteine
  MOD_RES (250)..(250): Selenocysteine
MAQNLKDLAGRLPAGPRGMGXALKLLLGAGAVAYGVRESVFXVEGGHRAIFFNRIGGVQQDXILAEGLHFRIPWFQYPIIYDIRARPRKISSPXGSKDLQMVNISLRVLSRPNAQELPSMYQRLGLDYEERVLPSIVNEVLKSVVAKFNASQLIXQRAQVSLLIRRELXERAKDFSLILDDVAIXELSFSREYXAAVEAKQVALSKNPGYIKLRKIRAAQNISKXIAXSQNRIYLXADNLVLNLQDESFXRGSDSLIKGKK

SEQ ID NO: 19997 - protein, 267 aa, Homo sapiens
  MOD_RES (21)..(21): Selenocysteine
  MOD_RES (42)..(42): Selenocysteine
  MOD_RES (62)..(62): Selenocysteine
  MOD_RES (94)..(94): Selenocysteine
  MOD_RES (155)..(155): Selenocysteine
  MOD_RES (169)..(169): Selenocysteine
  MOD_RES (185)..(185): Selenocysteine
  MOD_RES (194)..(194): Selenocysteine
  MOD_RES (263)..(263): Selenocysteine
MAQNLKDLAGRLPAGPRGMGXALKLLLGAGAVAYGVRESVFXVEGGHRAIFFNRIGGVQQDXILAEGLHFRIPWFQYPIIYDIRARPRKISSPXGSKDLQMVNISLRVLSRPNAQELPSMYQRLGLDYEERVLPSIVNEVLKSVVAKFNASQLIXQRAQVSLLIRRELXERAKDFSLILDDVAIXELSFSREYXAAVEAKQVAQQEAQRAQFLVEKAKQEQRQKIVQAEGEAEAAKMLGEALSKNPGYIKLRKIRAAQNISKXPHQG

SEQ ID NO: 19998 - protein, 298 aa, Homo sapiens
  MOD_RES (21)..(21): Selenocysteine
  MOD_RES (42)..(42): Selenocysteine
  MOD_RES (62)..(62): Selenocysteine
  MOD_RES (94)..(94): Selenocysteine
  MOD_RES (155)..(155): Selenocysteine
  MOD_RES (169)..(169): Selenocysteine
  MOD_RES (185)..(185): Selenocysteine
  MOD_RES (194)..(194): Selenocysteine
  MOD_RES (263)..(263): Selenocysteine
  MOD_RES (266)..(266): Selenocysteine
  MOD_RES (274)..(274): Selenocysteine
  MOD_RES (288)..(288): Selenocysteine
MAQNLKDLAGRLPAGPRGMGXALKLLLGAGAVAYGVRESVFXVEGGHRAIFFNRIGGVQQDXILAEGLHFRIPWFQYPIIYDIRARPRKISSPXGSKDLQMVNISLRVLSRPNAQELPSMYQRLGLDYEERVLPSIVNEVLKSVVAKFNASQLIXQRAQVSLLIRRELXERAKDFSLILDDVAIXELSFSREYXAAVEAKQVAQQEAQRAQFLVEKAKQEQRQKIVQAEGEAEAAKMLGEALSKNPGYIKLRKIRAAQNISKXIAXSQNRIYLXADNLVLNLQDESFXRSDSLIKGKK

SEQ ID NO: 19999 - protein, 299 aa, Homo sapiens
  MOD_RES (21)..(21): Selenocysteine
  MOD_RES (42)..(42): Selenocysteine
  MOD_RES (62)..(62): Selenocysteine
  MOD_RES (94)..(94): Selenocysteine
  MOD_RES (155)..(155): Selenocysteine
  MOD_RES (169)..(169): Selenocysteine
  MOD_RES (185)..(185): Selenocysteine
  MOD_RES (194)..(194): Selenocysteine
  MOD_RES (263)..(263): Selenocysteine
  MOD_RES (266)..(266): Selenocysteine
  MOD_RES (274)..(274): Selenocysteine
  MOD_RES (288)..(288): Selenocysteine
MAQNLKDLAGRLPAGPRGMGXALKLLLGAGAVAYGVRESVFXVEGGHRAIFFNRIGGVQQDXILAEGLHFRIPWFQYPIIYDIRARPRKISSPXGSKDLQMVNISLRVLSRPNAQELPSMYQRLGLDYEERVLPSIVNEVLKSVVAKFNASQLIXQRAQVSLLIRRELXERAKDFSLILDDVAIXELSFSREYXAAVEAKQVAQQEAQRAQFLVEKAKQEQRQKIVQAEGEAEAAKMLGEALSKNPGYIKLRKIRAAQNISKXIAXSQNRIYLXADNLVLNLQDESFXRGSDSLIKGKK

SEQ ID NO: 20000 - protein, 87 aa, Homo sapiens
  MOD_RES (21)..(21): Selenocysteine
  MOD_RES (42)..(42): Selenocysteine
  MOD_RES (62)..(62): Selenocysteine
  MOD_RES (84)..(85): Selenocysteine
MAQNLKDLAGRLPAGPRGMGXALKLLLGAGAVAYGVRESVFXVEGGHRAIFFNRIGGVQQDXILAEGLHFRSPHHRIVSISQLXXLC

SEQ ID NO: 20001 - protein, 213 aa, Homo sapiens
  MOD_RES (21)..(21): Selenocysteine
  MOD_RES (42)..(42): Selenocysteine
  MOD_RES (62)..(62): Selenocysteine
  MOD_RES (77)..(77): Selenocysteine
  MOD_RES (105)..(105): Selenocysteine
  MOD_RES (166)..(166): Selenocysteine
  MOD_RES (180)..(180): Selenocysteine
  MOD_RES (196)..(196): Selenocysteine
  MOD_RES (205)..(205): Selenocysteine
MAQNLKDLAGRLPAGPRGMGXALKLLLGAGAVAYGVRESVFXVEGGHRAIFFNRIGGVQQDXILAEGLHFRVVPGCXPLHRAYREEHEGENAWERVFGLDQPLLXSISDLQMVNISLRVLSRPNAQELPSMYQRLGLDYEERVLPSIVNEVLKSVVAKFNASQLIXQRAQVSLLIRRELXERAKDFSLILDDVAIXELSFSREYXAAVEAKQV

SEQ ID NO: 20002 - protein, 261 aa, Homo sapiens
  MOD_RES (21)..(21): Selenocysteine
  MOD_RES (42)..(42): Selenocysteine
  MOD_RES (62)..(62): Selenocysteine
  MOD_RES (81)..(81): Selenocysteine
  MOD_RES (130)..(130): Selenocysteine
  MOD_RES (191)..(191): Selenocysteine
  MOD_RES (205)..(205): Selenocysteine
  MOD_RES (221)..(221): Selenocysteine
  MOD_RES (230)..(230): Selenocysteine
MAQNLKDLAGRLPAGPRGMGXALKLLLGAGAVAYGVRESVFXVEGGHRAIFFNRIGGVQQDXILAEGLHFSGCCENLQQHXNCCFPEGQENLSLSVVVERSRPKNAWIPWFQYPIIYDIRARPRKISSPXGSKDLQMVNISLRVLSRPNAQELPSMYQRLGLDYEERVLPSIVNEVLKSVVAKFNASQLIXQRAQVSLLIRRELXERAKDFSLILDDVAIXELSFSREYXAAVEAKQVAQQEAQRAQFLVEKAKQEQRQKI

SEQ ID NO: 20003 - protein, 103 aa, Homo sapiens
  MOD_RES (1)..(1): Any amino acid
  MOD_RES (7)..(7): Selenocysteine
  MOD_RES (16)..(16): Selenocysteine
  MOD_RES (36)..(36): Selenocysteine
  MOD_RES (42)..(42): Selenocysteine
  MOD_RES (78)..(78): Selenocysteine
  MOD_RES (81)..(81): Selenocysteine
  MOD_RES (89)..(89): Selenocysteine
  MOD_RES (103)..(103): Selenocysteine
XDDVAIXELSFSREYXAAVEAKQPRGGLEQGSVVRXGPGIEXCPCVYLNPPHLGEALSKNPGYIKLRKIRAAQNISKXIAXSQNRIYLXADNLVLNLQDESFX

SEQ ID NO: 20004 - protein, 749 aa, Homo sapiens
  MOD_RES (5)..(5): Selenocysteine
  MOD_RES (11)..(11): Selenocysteine
  MOD_RES (19)..(19): Selenocysteine
  MOD_RES (30)..(30): Selenocysteine
  MOD_RES (35)..(35): Selenocysteine
  MOD_RES (129)..(129): Selenocysteine
  MOD_RES (190)..(190): Selenocysteine
  MOD_RES (193)..(193): Selenocysteine
  MOD_RES (226)..(226): Selenocysteine
  MOD_RES (240)..(240): Selenocysteine
  MOD_RES (256)..(256): Selenocysteine
  MOD_RES (292)..(292): Selenocysteine
  MOD_RES (324)..(324): Selenocysteine
  MOD_RES (361)..(361): Selenocysteine
  MOD_RES (396)..(398): Selenocysteine
  MOD_RES (461)..(461): Selenocysteine
  MOD_RES (486)..(486): Selenocysteine
  MOD_RES (509)..(509): Selenocysteine
  MOD_RES (528)..(528): Selenocysteine
  MOD_RES (532)..(532): Selenocysteine
  MOD_RES (535)..(536): Selenocysteine
  MOD_RES (545)..(545): Selenocysteine
  MOD_RES (563)..(563): Selenocysteine
  MOD_RES (583)..(583): Selenocysteine
  MOD_RES (605)..(605): Selenocysteine
  MOD_RES (615)..(615): Selenocysteine
  MOD_RES (639)..(639): Selenocysteine
  MOD_RES (677)..(677): Selenocysteine
  MOD_RES (679)..(679): Selenocysteine
  MOD_RES (738)..(738): Selenocysteine
MEAEXGSSVEXGKKANRGXRIALVVFVGGXLVLGXILFLVSQGLLSLQAKQEYCLKPECIEAAAAILSKVNLSVDPCDNFFRFACDGWISNNPIPEDMPSYGVYPWLRHNVDLKLKELLEKSISRRRDXEAIQKAKILYSSCMNEKAIEKADAKPLLHILRHSPFRWPVLESNIGPEGVWSERKFSLLQXLAXFRGQYSNSVFIRLYVSPDDKASNEHILKLDQAXLSLAVREDYLDNSXEAKSYRDALYKFMVDXAVLLGANSSRAEHDMKSVLRLEIKIAEIMIPHENRXSEAMYNKMNISELSAMIPQFDWLGYIKKVIDXRLYPHLKDISPSENVVVRVPQYFKDLFRILGSERKKXIANYLVWRMVYSRIPNLSRRFQYRWLEFSRVIQGXXXLLPQWDKCVNFIESALPYVVGKMFVDVYFQEDKKEMMEELVEGVRWAFIDMLEKENEWMDAGXKRKAKEKARAVLAKVGYPEFIMNDXHVNEDLKAIKFSEADYFGNVLQXRKYLAQSDFFWLRKAVPKXEWFXNPXXVNAFYSASXNQIRFPAGELQKPFFWGXEYPRSLSYGAIGVIVGHEFXHGFDNNGRKYDKNGNLDPWWSXESEEKFKEKXKCMINQYSNYYWKKAGLNVKGKRXLGENIADNGGLREAFRAYRKWINDRRQGLEEPLLPGIXFXNNQLFFLSYAHVRCNSYRPEAAREQVQIGAHSPPQFRVNGAISNFEEFQKAFNCPPNSXMNRGMDSCRLW

SEQ ID NO: 20005 - protein, 54 aa, Homo sapiens
  MOD_RES (24)..(24): Selenocysteine
  MOD_RES (42)..(42): Selenocysteine
  MOD_RES (50)..(50): Selenocysteine
MAQPPRLSRSGASSLWDPASPAPXSGPRPRLWEGQDVLARWXDGLLYLGXIKKC

SEQ ID NO: 20006 - protein, 145 aa, Homo sapiens
  MOD_RES (24)..(24): Selenocysteine
  MOD_RES (42)..(42): Selenocysteine
  MOD_RES (50)..(50): Selenocysteine
  MOD_RES (97)..(97): Selenocysteine
  MOD_RES (132)..(132): Selenocysteine
  MOD_RES (145)..(145): Selenocysteine
MAQPPRLSRSGASSLWDPASPAPXSGPRPRLWEGQDVLARWXDGLLYLGXIKKVDSAREVCLVQFEDDSQFLVLWKDISPAALPGEELLCCVCRSEXVVPGNRLVSCEKCRHAYHQDCHVPRAPAPGEGEGXSWVCRQCVFAIAX

SEQ ID NO: 20007 - protein, 227 aa, Homo sapiens
  MOD_RES (24)..(24): Selenocysteine
  MOD_RES (42)..(42): Selenocysteine
  MOD_RES (50)..(50): Selenocysteine
  MOD_RES (97)..(97): Selenocysteine
  MOD_RES (132)..(132): Selenocysteine
  MOD_RES (145)..(145): Selenocysteine
  MOD_RES (216)..(216): Selenocysteine
MAQPPRLSRSGASSLWDPASPAPXSGPRPRLWEGQDVLARWXDGLLYLGXIKKVDSAREVCLVQFEDDSQFLVLWKDISPAALPGEELLCCVCRSEXVVPGNRLVSCEKCRHAYHQDCHVPRAPAPGEGEGXSWVCRQCVFAIAXKRGGALKKGPYARAMLGMKLSLPYGLKGLDWDAGHLSNRQQSYCYCGGPGEWNLKMLQCRSCLQWFHEACXQCLSKPLLYGD

SEQ ID NO: 20008 - protein, 393 aa, Homo sapiens
  MOD_RES (24)..(24): Selenocysteine
  MOD_RES (42)..(42): Selenocysteine
  MOD_RES (50)..(50): Selenocysteine
  MOD_RES (97)..(97): Selenocysteine
  MOD_RES (132)..(132): Selenocysteine
  MOD_RES (145)..(145): Selenocysteine
  MOD_RES (216)..(216): Selenocysteine
  MOD_RES (281)..(281): Selenocysteine
  MOD_RES (296)..(296): Selenocysteine
  MOD_RES (343)..(343): Selenocysteine
  MOD_RES (349)..(349): Selenocysteine
MAQPPRLSRSGASSLWDPASPAPXSGPRPRLWEGQDVLARWXDGLLYLGXIKKVDSAREVCLVQFEDDSQFLVLWKDISPAALPGEELLCCVCRSEXVVPGNRLVSCEKCRHAYHQDCHVPRAPAPGEGEGXSWVCRQCVFAIAXKRGGALKKGPYARAMLGMKLSLPYGLKGLDWDAGHLSNRQQSYCYCGGPGEWNLKMLQCRSCLQWFHEACXQCLSKPLLYGDRFYEFECCVCRGGPEKVRRLQLRWVDVAHLVLYHLSVCCKKKYFDFDREILPFXSENWDSLLLGELSDXPKGERSSRLLSALNSHKDRFISGREIKKRKCLFGLHARMPPPVEPPXGDGALXSFPSGQGPGGGVSRPLGKRRRPEPEPLRRRQKGKVEELGPPSAP

SEQ ID NO: 20009 - protein, 393 aa, Homo sapiens
  MOD_RES (24)..(24): Selenocysteine
  MOD_RES (42)..(42): Selenocysteine
  MOD_RES (50)..(50): Selenocysteine
  MOD_RES (97)..(97): Selenocysteine
  MOD_RES (132)..(132): Selenocysteine
  MOD_RES (145)..(145): Selenocysteine
  MOD_RES (216)..(216): Selenocysteine
  MOD_RES (281)..(281): Selenocysteine
  MOD_RES (296)..(296): Selenocysteine
  MOD_RES (343)..(343): Selenocysteine
  MOD_RES (349)..(349): Selenocysteine
MAQPPRLSRSGASSLWDPASPAPXSGPRPRLWEGQDVLARWXDGLLYLGXIKKVDSAREVCLVQFEDDSQFLVLWKDISPAALPGEELLCCVCRSEXVVPGNRLVSCEKCRHAYHQDCHVPRAPAPGEGEGXSWVCRQCVFAIAXKRGGALKKGPYARAMLGMKLSLPYGLKGLDWDAGHLSNRQQSYCYCGGPGEWNLKMLQCRSCLQWFHEACXQCLSKPLLYGDRFYEFECCVCRGGPEKVRRLQLRWVDVAHLVLYHLSVCCKKKYFDFDREILPFXSENWDSLLLGELSDXPKGERSSKLLSALNSHKDRFISGREIKKRKCLFGLHARMPPPVEPPXGDGALXSFPSGQGPGGGVSRPLGKRRRPEPEPLRRRQKGKVEELGPPSAP

SEQ ID NO: 20010 - protein, 419 aa, Homo sapiens
  MOD_RES (24)..(24): Selenocysteine
  MOD_RES (42)..(42): Selenocysteine
  MOD_RES (50)..(50): Selenocysteine
  MOD_RES (97)..(97): Selenocysteine
  MOD_RES (132)..(132): Selenocysteine
  MOD_RES (145)..(145): Selenocysteine
  MOD_RES (216)..(216): Selenocysteine
  MOD_RES (281)..(281): Selenocysteine
  MOD_RES (296)..(296): Selenocysteine
  MOD_RES (343)..(343): Selenocysteine
  MOD_RES (349)..(349): Selenocysteine
  MOD_RES (359)..(359): Selenocysteine
  MOD_RES (386)..(386): Selenocysteine
  MOD_RES (408)..(408): Selenocysteine
  MOD_RES (415)..(415): Selenocysteine
MAQPPRLSRSGASSLWDPASPAPXSGPRPRLWEGQDVLARWXDGLLYLGXIKKVDSAREVCLVQFEDDSQFLVLWKDISPAALPGEELLCCVCRSEXVVPGNRLVSCEKCRHAYHQDCHVPRAPAPGEGEGXSWVCRQCVFAIAXKRGGALKKGPYARAMLGMKLSLPYGLKGLDWDAGHLSNRQQSYCYCGGPGEWNLKMLQCRSCLQWFHEACXQCLSKPLLYGDRFYEFECCVCRGGPEKVRRLQLRWVDVAHLVLYHLSVCCKKKYFDFDREILPFXSENWDSLLLGELSDXPKGERSSRLLSALNSHKDRFISGREIKKRKCLFGLHARMPPPVEPPXGDGALXRAGPWGRGLXSPGEAPEAGARAPEEEAEGESGGAGAXLSSAQSARAPGAEGAGSSAEGXAGLSVSXIPQP

SEQ ID NO: 20011 - protein, 457 aa, Homo sapiens
  MOD_RES (24)..(24): Selenocysteine
  MOD_RES (42)..(42): Selenocysteine
  MOD_RES (50)..(50): Selenocysteine
  MOD_RES (97)..(97): Selenocysteine
  MOD_RES (132)..(132): Selenocysteine
  MOD_RES (145)..(145): Selenocysteine
  MOD_RES (216)..(216): Selenocysteine
  MOD_RES (281)..(281): Selenocysteine
  MOD_RES (296)..(296): Selenocysteine
  MOD_RES (343)..(343): Selenocysteine
  MOD_RES (349)..(349): Selenocysteine
  MOD_RES (359)..(359): Selenocysteine
  MOD_RES (386)..(386): Selenocysteine
  MOD_RES (408)..(408): Selenocysteine
  MOD_RES (420)..(420): Selenocysteine
  MOD_RES (431)..(431): Selenocysteine
  MOD_RES (436)..(436): Selenocysteine
  MOD_RES (443)..(443): Selenocysteine
  MOD_RES (449)..(449): Selenocysteine
  MOD_RES (456)..(456): Selenocysteine
MAQPPRLSRSGASSLWDPASPAPXSGPRPRLWEGQDVLARWXDGLLYLGXIKKVDSAREVCLVQFEDDSQFLVLWKDISPAALPGEELLCCVCRSEXVVPGNRLVSCEKCRHAYHQDCHVPRAPAPGEGEGXSWVCRQCVFAIAXKRGGALKKGPYARAMLGMKLSLPYGLKGLDWDAGHLSNRQQSYCYCGGPGEWNLKMLQCRSCLQWFHEACXQCLSKPLLYGDRFYEFECCVCRGGPEKVRRLQLRWVDVAHLVLYHLSVCCKKKYFDFDREILPFXSENWDSLLLGELSDXPKGERSSRLLSALNSHKDRFISGREIKKRKCLFGLHARMPPPVEPPXGDGALXRAGPWGRGLXSPGEAPEAGARAPEEEAEGESGGAGAXLSSAQSARAPGAEGAGSSAEGXAAAPSGCLLPSXLLPAPQGPLGXVDPQXGHPWNFXLVSPQXSLKVPPXR

SEQ ID NO: 20012 - protein, 457 aa, Homo sapiens
  MOD_RES (24)..(24): Selenocysteine
  MOD_RES (42)..(42): Selenocysteine
  MOD_RES (50)..(50): Selenocysteine
  MOD_RES (97)..(97): Selenocysteine
  MOD_RES (132)..(132): Selenocysteine
  MOD_RES (145)..(145): Selenocysteine
  MOD_RES (216)..(216): Selenocysteine
  MOD_RES (281)..(281): Selenocysteine
  MOD_RES (296)..(296): Selenocysteine
  MOD_RES (343)..(343): Selenocysteine
  MOD_RES (349)..(349): Selenocysteine
  MOD_RES (359)..(359): Selenocysteine
  MOD_RES (386)..(386): Selenocysteine
  MOD_RES (408)..(408): Selenocysteine
  MOD_RES (420)..(420): Selenocysteine
  MOD_RES (431)..(431): Selenocysteine
  MOD_RES (436)..(436): Selenocysteine
  MOD_RES (443)..(443): Selenocysteine
  MOD_RES (449)..(449): Selenocysteine
  MOD_RES (456)..(456): Selenocysteine
MAQPPRLSRSGASSLWDPASPAPXSGPRPRLWEGQDVLARWXDGLLYLGXIKKVDSAREVCLVQFEDDSQFLVLWKDISPAALPGEELLCCVCRSEXVVPGNRLVSCEKCRHAYHQDCHVPRAPAPGEGEGXSWVCRQCVFAIAXKRGGALKKGPYARAMLGMKLSLPYGLKGLDWDAGHLSNRQQSYCYCGGPGEWNLKMLQCRSCLQWFHEACXQCLSKPLLYGDRFYEFECCVCRGGPEKVRRLQLRWVDVAHLVLYHLSVCCKKKYFDFDREILPFXSENWDSLLLGELSDXPKGERSSKLLSALNSHKDRFISGREIKKRKCLFGLHARMPPPVEPPXGDGALXRAGPWGRGLXSPGEAPEAGARAPEEEAEGESGGAGAXLSSAQSARAPGAEGAGSSAEGXAAAPSGCLLPSXLLPAPQGPLGXVDPQXGHPWNFXLVSPQXSLKVPPXR

SEQ ID NO: 20013 - protein, 567 aa, Homo sapiens
  MOD_RES (24)..(24): Selenocysteine
  MOD_RES (42)..(42): Selenocysteine
  MOD_RES (50)..(50): Selenocysteine
  MOD_RES (97)..(97): Selenocysteine
  MOD_RES (132)..(132): Selenocysteine
  MOD_RES (145)..(145): Selenocysteine
  MOD_RES (216)..(216): Selenocysteine
  MOD_RES (281)..(281): Selenocysteine
  MOD_RES (296)..(296): Selenocysteine
  MOD_RES (343)..(343): Selenocysteine
  MOD_RES (349)..(349): Selenocysteine
  MOD_RES (438)..(438): Selenocysteine
  MOD_RES (460)..(460): Selenocysteine
  MOD_RES (463)..(463): Selenocysteine
  MOD_RES (483)..(483): Selenocysteine
  MOD_RES (494)..(494): Selenocysteine
  MOD_RES (525)..(525): Selenocysteine
MAQPPRLSRSGASSLWDPASPAPXSGPRPRLWEGQDVLARWXDGLLYLGXIKKVDSAREVCLVQFEDDSQFLVLWKDISPAALPGEELLCCVCRSEXVVPGNRLVSCEKCRHAYHQDCHVPRAPAPGEGEGXSWVCRQCVFAIAXKRGGALKKGPYARAMLGMKLSLPYGLKGLDWDAGHLSNRQQSYCYCGGPGEWNLKMLQCRSCLQWFHEACXQCLSKPLLYGDRFYEFECCVCRGGPEKVRRLQLRWVDVAHLVLYHLSVCCKKKYFDFDREILPFXSENWDSLLLGELSDXPKGERSSRLLSALNSHKDRFISGREIKKRKCLFGLHARMPPPVEPPXGDGALXSFPSGQGPGGGVSRPLGKRRRPEPEPLRRRQKGKVEELGPPSAVRNQPEPQEQRERAHLQRALQASVSPPSPSPNQSYQGSSGYNFRPXDARCLPSSPIRMFASFHPSASXAGXSGDSGPPDRSPLELHIGFPXDIPKSAPHSMXASSSSVSSPSPGLPRRSAPPSPLCRSLSPGXGGGVRGGVGYLSRGDPVRVLARRVRPDGSVQYLVEWGGGGIF

SEQ ID NO: 20014 - protein, 567 aa, Homo sapiens
  MOD_RES (24)..(24): Selenocysteine
  MOD_RES (42)..(42): Selenocysteine
  MOD_RES (50)..(50): Selenocysteine
  MOD_RES (97)..(97): Selenocysteine
  MOD_RES (132)..(132): Selenocysteine
  MOD_RES (145)..(145): Selenocysteine
  MOD_RES (216)..(216): Selenocysteine
  MOD_RES (281)..(281): Selenocysteine
  MOD_RES (296)..(296): Selenocysteine
  MOD_RES (343)..(343): Selenocysteine
  MOD_RES (349)..(349): Selenocysteine
  MOD_RES (438)..(438): Selenocysteine
  MOD_RES (460)..(460): Selenocysteine
  MOD_RES (463)..(463): Selenocysteine
  MOD_RES (483)..(483): Selenocysteine
  MOD_RES (494)..(494): Selenocysteine
  MOD_RES (525)..(525): Selenocysteine
MAQPPRLSRSGASSLWDPASPAPXSGPRPRLWEGQDVLARWXDGLLYLGXIKKVDSAREVCLVQFEDDSQFLVLWKDISPAALPGEELLCCVCRSEXVVPGNRLVSCEKCRHAYHQDCHVPRAPAPGEGEGXSWVCRQCVFAIAXKRGGALKKGPYARAMLGMKLSLPYGLKGLDWDAGHLSNRQQSYCYCGGPGEWNLKMLQCRSCLQWFHEACXQCLSKPLLYGDRFYEFECCVCRGGPEKVRRLQLRWVDVAHLVLYHLSVCCKKKYFDFDREILPFXSENWDSLLLGELSDXPKGERSSKLLSALNSHKDRFISGREIKKRKCLFGLHARMPPPVEPPXGDGALXSFPSGQGPGGGVSRPLGKRRRPEPEPLRRRQKGKVEELGPPSAVRNQPEPQEQRERAHLQRALQASVSPPSPSPNQSYQGSSGYNFRPXDARCLPSSPIRMFASFHPSASXAGXSGDSGPPDRSPLELHIGFPXDIPKSAPHSMXASSSSVSSPSPGLPRRSAPPSPLCRSLSPGXGGGVRGGVGYLSRGDPVRVLARRVRPDGSVQYLVEWGGGGIF

SEQ ID NO: 20015 - protein, 54 aa, Homo sapiens
  MOD_RES (17)..(17): Selenocysteine
  MOD_RES (28)..(28): Selenocysteine
  MOD_RES (33)..(33): Selenocysteine
  MOD_RES (40)..(40): Selenocysteine
  MOD_RES (46)..(46): Selenocysteine
  MOD_RES (53)..(53): Selenocysteine
MPAACPAAPSGCLLPSXLLPAPQGPLGXVDPQXGHPWNFXLVSPQXSLKVPPXR

SEQ ID NO: 20016 - protein, 181 aa, Homo sapiens
  MOD_RES (38)..(38): Selenocysteine
  MOD_RES (41)..(41): Selenocysteine
  MOD_RES (47)..(48): Selenocysteine
  MOD_RES (74)..(74): Selenocysteine
  MOD_RES (77)..(77): Selenocysteine
  MOD_RES (97)..(97): Selenocysteine
  MOD_RES (108)..(108): Selenocysteine
  MOD_RES (139)..(139): Selenocysteine
WGHPQQCAISPSPRSRGSGLICRGHCRPQCLHHPPALXRVXRAAAAXXSGPQMPAACPGHPIRMFASFHPSASXAGXSGDSGPPDRSPLELHIGFPXDIPKSAPHSMXASSSSVSSPSPGLPRRSAPPSPLCRSLSPGXGGGVRGGVGYLSRGDPVRVLARRVRPDGSVQYLVEWGGGGIF

SEQ ID NO: 20017 - protein, 37 aa, Homo sapiens
  MOD_RES (1)..(1): Any amino acid
  MOD_RES (4)..(4): Selenocysteine
  MOD_RES (26)..(26): Selenocysteine
  MOD_RES (33)..(33): Selenocysteine
XGAXLSSAQSARAPGAEGAGSSAEGXAGLSVSXIPQP

SEQ ID NO: 20018 - protein, 243 aa, Homo sapiens
  MOD_RES (1)..(1): Any amino acid
  MOD_RES (6)..(6): Selenocysteine
  MOD_RES (8)..(8): Selenocysteine
  MOD_RES (10)..(10): Selenocysteine
  MOD_RES (130)..(130): Selenocysteine
  MOD_RES (151)..(151): Selenocysteine
  MOD_RES (154)..(154): Selenocysteine
  MOD_RES (174)..(174): Selenocysteine
  MOD_RES (185)..(185): Selenocysteine
  MOD_RES (216)..(216): Selenocysteine
XSLLLXAXRXVSFQGERLRRGNVCLVSMLGCLPLWSPLLEMEHSPGQGPGGGVSRPLGKRRRPEPEPLRRRQKGKVEELGPPSAVRNQPEPQEQRERAHLQRALQASVSPPSPSPNQSYQGSSGYNFRPXDARCLPSPIRMFASFHPSASXAGXSGDSGPPDRSPLELHIGFPXDIPKSAPHSMXASSSSVSSPSPGLPRRSAPPSPLCRSLSPGXGGGVRGGVGYLSRGDPVRVLARRVRPD

SEQ ID NO: 20019 - protein, 888 aa, Homo sapiens
  MOD_RES (139)..(139): Selenocysteine
  MOD_RES (151)..(152): Selenocysteine
  MOD_RES (155)..(155): Selenocysteine
  MOD_RES (162)..(162): Selenocysteine
  MOD_RES (168)..(171): Selenocysteine
  MOD_RES (173)..(173): Selenocysteine
  MOD_RES (217)..(217): Selenocysteine
  MOD_RES (287)..(287): Selenocysteine
  MOD_RES (292)..(292): Selenocysteine
  MOD_RES (345)..(345): Selenocysteine
  MOD_RES (369)..(369): Selenocysteine
  MOD_RES (398)..(398): Selenocysteine
  MOD_RES (427)..(427): Selenocysteine
  MOD_RES (429)..(429): Selenocysteine
  MOD_RES (452)..(452): Selenocysteine
  MOD_RES (470)..(470): Selenocysteine
  MOD_RES (554)..(554): Selenocysteine
  MOD_RES (570)..(570): Selenocysteine
  MOD_RES (590)..(590): Selenocysteine
  MOD_RES (600)..(600): Selenocysteine
  MOD_RES (616)..(616): Selenocysteine
  MOD_RES (690)..(690): Selenocysteine
  MOD_RES (715)..(715): Selenocysteine
  MOD_RES (718)..(718): Selenocysteine
  MOD_RES (720)..(720): Selenocysteine
  MOD_RES (745)..(745): Selenocysteine
  MOD_RES (760)..(760): Selenocysteine
  MOD_RES (766)..(766): Selenocysteine
  MOD_RES (792)..(792): Selenocysteine
  MOD_RES (797)..(797): Selenocysteine
  MOD_RES (827)..(827): Selenocysteine
  MOD_RES (829)..(829): Selenocysteine
  MOD_RES (869)..(869): Selenocysteine
  MOD_RES (873)..(873): Selenocysteine
  MOD_RES (877)..(877): Selenocysteine
MDRSSKRRQVKPLAASLLEALDYDSSDDSDFKVGDASDSEGSGNGSEDASKDSGEGSCSDSEENILEEELNEDIKVKEEQLKNSAEEEVLSSEKQLIKMEKKEEEENGERPRKKKEKEKEKEKEKEKEKEREKEKEKAXVSENVAASAAAXXPAXSPPAVNXSPSVPXXXXAXEEQVSEPKKWNLRRNRPLLDFVSMEELNDMDDYDSEDDNDWRPXVVKRKGRSASQKEGSDGDNEDDEDEGSGSDEDENDEGNDEDHSSPASEGGCKKKKSKVLSRNSADDEELXNDSLXLSQSKSNEDSLILEKSQNWSSQKMDHILICCVCLGDNSEDADEIIQCDNCGIXVHEGCYGVDGESDSIMSSASENSXEPWFCDACKCGVSPSCELCPNQDGIFKEXDAGRWVHIVCALYVPGVAFGDIDKLRPVXLXEMNYSKYGAKECSFCEDPRFARXGVCISCDAGMCRAYFHVXCAQKEGLLSEAAAEEDIADPFFAYCKQHADRLDRKWKRKNYLALQSYCKMSLQEREKQLSPEAQARINARLQQYRAKAELARSXRPQAWVPREKLPRPLXSSASAIRKLMRKAELMGISXDIFPVDNSDXSSSVDGRRKHKQPALXADFVNYYFERNMRMIQIQENMAEQKNIKDKLENEQEKLHVEYNKLCESLEELQNLNGKLRSEGQGIWALLGRIXGQKLNIPAILRAPKERKPSKKEGGXQKXSXLPAVLYSCGICKKNHDQHLLLLCDXCKLHYHLGCLDPPLXRMPRKXKNSYWQCSECDQAGSSDMEADMAMEXLPDGXKRSRRQIKEPVKFVPQDVPPEPKKIPIRNXRXRGRKRSFVPEEEKHEERVPRERRQRQSVLQKKPKAEDLRXECAXCKGXGDNENLVRYPS

SEQ ID NO: 20020 - protein, 948 aa, Homo sapiens
  MOD_RES (139)..(139): Selenocysteine
  MOD_RES (151)..(152): Selenocysteine
  MOD_RES (155)..(155): Selenocysteine
  MOD_RES (162)..(162): Selenocysteine
  MOD_RES (168)..(171): Selenocysteine
  MOD_RES (173)..(173): Selenocysteine
  MOD_RES (217)..(217): Selenocysteine
  MOD_RES (287)..(287): Selenocysteine
  MOD_RES (292)..(292): Selenocysteine
  MOD_RES (345)..(345): Selenocysteine
  MOD_RES (369)..(369): Selenocysteine
  MOD_RES (398)..(398): Selenocysteine
  MOD_RES (427)..(427): Selenocysteine
  MOD_RES (429)..(429): Selenocysteine
  MOD_RES (452)..(452): Selenocysteine
  MOD_RES (470)..(470): Selenocysteine
  MOD_RES (554)..(554): Selenocysteine
  MOD_RES (570)..(570): Selenocysteine
  MOD_RES (590)..(590): Selenocysteine
  MOD_RES (600)..(600): Selenocysteine
  MOD_RES (616)..(616): Selenocysteine
  MOD_RES (690)..(690): Selenocysteine
  MOD_RES (715)..(715): Selenocysteine
  MOD_RES (718)..(718): Selenocysteine
  MOD_RES (720)..(720): Selenocysteine
  MOD_RES (745)..(745): Selenocysteine
  MOD_RES (760)..(760): Selenocysteine
  MOD_RES (766)..(766): Selenocysteine
  MOD_RES (792)..(792): Selenocysteine
  MOD_RES (797)..(797): Selenocysteine
  MOD_RES (827)..(827): Selenocysteine
  MOD_RES (829)..(829): Selenocysteine
  MOD_RES (869)..(869): Selenocysteine
  MOD_RES (873)..(873): Selenocysteine
  MOD_RES (877)..(877): Selenocysteine
  MOD_RES (909)..(909): Selenocysteine
MDRSSKRRQVKPLAASLLEALDYDSSDDSDFKVGDASDSEGSGNGSEDASKDSGEGSCSDSEENILEEELNEDIKVKEEQLKNSAEEEVLSSEKQLIKMEKKEEEENGERPRKKKEKEKEKEKEKEKEKEREKEKEKAXVSENVAASAAAXXPAXSPPAVNXSPSVPXXXXAXEEQVSEPKKWNLRRNRPLLDFVSMEELNDMDDYDSEDDNDWRPXVVKRKGRSASQKEGSDGDNEDDEDEGSGSDEDENDEGNDEDHSSPASEGGCKKKKSKVLSRNSADDEELXNDSLXLSQSKSNEDSLILEKSQNWSSQKMDHILICCVCLGDNSEDADEIIQCDNCGIXVHEGCYGVDGESDSIMSSASENSXEPWFCDACKCGVSPSCELCPNQDGIFKEXDAGRWVHIVCALYVPGVAFGDIDKLRPVXLXEMNYSKYGAKECSFCEDPRFARXGVCISCDAGMCRAYFHVXCAQKEGLLSEAAAEEDIADPFFAYCKQHADRLDRKWKRKNYLALQSYCKMSLQEREKQLSPEAQARINARLQQYRAKAELARSXRPQAWVPREKLPRPLXSSASAIRKLMRKAELMGISXDIFPVDNSDXSSSVDGRRKHKQPALXADFVNYYFERNMRMIQIQENMAEQKNIKDKLENEQEKLHVEYNKLCESLEELQNLNGKLRSEGQGIWALLGRIXGQKLNIPAILRAPKERKPSKKEGGXQKXSXLPAVLYSCGICKKNHDQHLLLLCDXCKLHYHLGCLDPPLXRMPRKXKNSYWQCSECDQAGSSDMEADMAMEXLPDGXKRSRRQIKEPVKFVPQDVPPEPKKIPIRNXRXRGRKRSFVPEEEKHEERVPRERRQRQSVLQKKPKAEDLRXECAXCKGXGDNENLVRCDECRLCYHFGCLDPPLKKSPKQXGYGWICQECDSSSSKEDENEAERKNISQELNMEQKNPKK

SEQ ID NO: 20021 - protein, 42 aa, Homo sapiens
MDRSSKRRQVKPLAASLLEALDYDSSDDSDFKVGDASGLADS

SEQ ID NO: 20022 - protein, 64 aa, Homo sapiens
  MOD_RES (32)..(33): Selenocysteine
MFLFGEEDNLSESSSESFLWSDDEYGQDVDVXXNPDEELDGDDRYDFEVVRCICEVQEENDFMI

SEQ ID NO: 20023 - protein, 543 aa, Homo sapiens
  MOD_RES (2)..(2): Selenocysteine
  MOD_RES (108)..(108): Selenocysteine
  MOD_RES (115)..(115): Selenocysteine
  MOD_RES (117)..(117): Selenocysteine
  MOD_RES (127)..(127): Selenocysteine
  MOD_RES (151)..(151): Selenocysteine
  MOD_RES (173)..(173): Selenocysteine
  MOD_RES (187)..(187): Selenocysteine
  MOD_RES (269)..(269): Selenocysteine
  MOD_RES (277)..(277): Selenocysteine
  MOD_RES (282)..(282): Selenocysteine
  MOD_RES (319)..(319): Selenocysteine
  MOD_RES (333)..(333): Selenocysteine
  MOD_RES (336)..(336): Selenocysteine
  MOD_RES (352)..(352): Selenocysteine
  MOD_RES (358)..(358): Selenocysteine
  MOD_RES (362)..(362): Selenocysteine
  MOD_RES (384)..(384): Selenocysteine
  MOD_RES (408)..(408): Selenocysteine
  MOD_RES (411)..(411): Selenocysteine
  MOD_RES (414)..(414): Selenocysteine
  MOD_RES (425)..(425): Selenocysteine
  MOD_RES (429)..(429): Selenocysteine
  MOD_RES (431)..(431): Selenocysteine
  MOD_RES (435)..(435): Selenocysteine
  MOD_RES (496)..(496): Selenocysteine
  MOD_RES (509)..(509): Selenocysteine
  MOD_RES (511)..(511): Selenocysteine
  MOD_RES (521)..(522): Selenocysteine
MXKHPPNRRGISFEVGAQLEARDRLKNWYPAHIEDIDYEEGKVLIHFKRWNHRYDEWFCWDSPYLRPLEKIQLRKEGLHEEDGSSEFQINEQVLACWSDCRFYPAKVXAVNKDGXYXVKFYDGVVQXVKHIHVKAFSKDQNIVGNARPKEXDHKSLSSSPDKREKFKEQRKAXVNVKKDKEDKPLKXEKRPKQPDKEGKLICSEKGKVSEKSLPKNEKEDKENISENDREYSGDAQVDKKPENDIVKSPQENLREPKRKRGRPPSIAPXAVDSNSQXLQPIXLELRRRKISKGCEVPLKRPRLDKNSSQEKSKNYSENXDKDLSRRRSSRLSXNGXHEILDPDLVVSDLVDXDPLQDXLSSXKESEEGQLKSALEAGQVSSALXCHSFGDGSGAAGLELNCPSMGENXMKXEPXSPLVELQEISXVEVXNXFKKXDDFGSSNAPAVDLDHKFRCKVVDCLKFFRKAKLLHYHMKYFHGMEKSLEPEESPGKRHVQXRGPSASDKPSQEXLXRKRVSASSPXXKDKEKNKEKKFKEFVRVKPKK

SEQ ID NO: 20024 - protein, 549 aa, Homo sapiens
  MOD_RES (2)..(2): Selenocysteine
  MOD_RES (108)..(108): Selenocysteine
  MOD_RES (115)..(115): Selenocysteine
  MOD_RES (117)..(117): Selenocysteine
  MOD_RES (127)..(127): Selenocysteine
  MOD_RES (151)..(151): Selenocysteine
  MOD_RES (173)..(173): Selenocysteine
  MOD_RES (187)..(187): Selenocysteine
  MOD_RES (269)..(269): Selenocysteine
  MOD_RES (277)..(277): Selenocysteine
  MOD_RES (282)..(282): Selenocysteine
  MOD_RES (319)..(319): Selenocysteine
  MOD_RES (333)..(333): Selenocysteine
  MOD_RES (336)..(336): Selenocysteine
  MOD_RES (352)..(352): Selenocysteine
  MOD_RES (358)..(358): Selenocysteine
  MOD_RES (362)..(362): Selenocysteine
  MOD_RES (384)..(384): Selenocysteine
  MOD_RES (408)..(408): Selenocysteine
  MOD_RES (411)..(411): Selenocysteine
  MOD_RES (414)..(414): Selenocysteine
  MOD_RES (425)..(425): Selenocysteine
  MOD_RES (429)..(429): Selenocysteine
  MOD_RES (431)..(431): Selenocysteine
  MOD_RES (435)..(435): Selenocysteine
  MOD_RES (496)..(496): Selenocysteine
  MOD_RES (509)..(509): Selenocysteine
  MOD_RES (511)..(511): Selenocysteine
  MOD_RES (521)..(522): Selenocysteine
MXKHPPNRRGISFEVGAQLEARDRLKNWYPAHIEDIDYEEGKVLIHFKRWNHRYDEWFCWDSPYLRPLEKIQLRKEGLHEEDGSSEFQINEQVLACWSDCRFYPAKVXAVNKDGXYXVKFYDGVVQXVKHIHVKAFSKDQNIVGNARPKEXDHKSLSSSPDKREKFKEQRKAXVNVKKDKEDKPLKXEKRPKQPDKEGKLICSEKGKVSEKSLPKNEKEDKENISENDREYSGDAQVDKKPENDIVKSPQENLREPKRKRGRPPSIAPXAVDSNSQXLQPIXLELRRRKISKGCEVPLKRPRLDKNSSQEKSKNYSENXDKDLSRRRSSRLSXNGXHEILDPDLVVSDLVDXDPLQDXLSSXKESEEGQLKSALEAGQVSSALXCHSFGDGSGAAGLELNCPSMGENXMKXEPXSPLVELQEISXVEVXNXFKKXDDFGSSNAPAVDLDHKFRCKVVDCLKFFRKAKLLHYHMKYFHGMEKSLEPEESPGKRHVQXRGPSASDKPSQEXLXRKRVSASSPXXKDKEKNKEKKFKEFVRVKPKKKKKKKK

SEQ ID NO: 20025 - protein, 1012 aa, Homo sapiens
  MOD_RES (2)..(2): Selenocysteine
  MOD_RES (108)..(108): Selenocysteine
  MOD_RES (115)..(115): Selenocysteine
  MOD_RES (117)..(117): Selenocysteine
  MOD_RES (127)..(127): Selenocysteine
  MOD_RES (151)..(151): Selenocysteine
  MOD_RES (173)..(173): Selenocysteine
  MOD_RES (187)..(187): Selenocysteine
  MOD_RES (269)..(269): Selenocysteine
  MOD_RES (277)..(277): Selenocysteine
  MOD_RES (282)..(282): Selenocysteine
  MOD_RES (319)..(319): Selenocysteine
  MOD_RES (333)..(333): Selenocysteine
  MOD_RES (336)..(336): Selenocysteine
  MOD_RES (352)..(352): Selenocysteine
  MOD_RES (358)..(358): Selenocysteine
  MOD_RES (362)..(362): Selenocysteine
  MOD_RES (384)..(384): Selenocysteine
  MOD_RES (408)..(408): Selenocysteine
  MOD_RES (411)..(411): Selenocysteine
  MOD_RES (414)..(414): Selenocysteine
  MOD_RES (425)..(425): Selenocysteine
  MOD_RES (429)..(429): Selenocysteine
  MOD_RES (431)..(431): Selenocysteine
  MOD_RES (435)..(435): Selenocysteine
  MOD_RES (496)..(496): Selenocysteine
  MOD_RES (509)..(509): Selenocysteine
  MOD_RES (511)..(511): Selenocysteine
  MOD_RES (521)..(522): Selenocysteine
  MOD_RES (551)..(551): Selenocysteine
  MOD_RES (564)..(564): Selenocysteine
  MOD_RES (577)..(577): Selenocysteine
  MOD_RES (635)..(636): Selenocysteine
  MOD_RES (693)..(693): Selenocysteine
  MOD_RES (742)..(742): Selenocysteine
  MOD_RES (798)..(798): Selenocysteine
  MOD_RES (800)..(800): Selenocysteine
  MOD_RES (811)..(811): Selenocysteine
  MOD_RES (836)..(836): Selenocysteine
  MOD_RES (859)..(859): Selenocysteine
  MOD_RES (944)..(944): Selenocysteine
  MOD_RES (954)..(954): Selenocysteine
  MOD_RES (974)..(974): Selenocysteine
  MOD_RES (1012)..(1012): Selenocysteine
MXKHPPNRRGISFEVGAQLEARDRLKNWYPAHIEDIDYEEGKVLIHFKRWNHRYDEWFCWDSPYLRPLEKIQLRKEGLHEEDGSSEFQINEQVLACWSDCRFYPAKVXAVNKDGXYXVKFYDGVVQXVKHIHVKAFSKDQNIVGNARPKEXDHKSLSSSPDKREKFKEQRKAXVNVKKDKEDKPLKXEKRPKQPDKEGKLICSEKGKVSEKSLPKNEKEDKENISENDREYSGDAQVDKKPENDIVKSPQENLREPKRKRGRPPSIAPXAVDSNSQXLQPIXLELRRRKISKGCEVPLKRPRLDKNSSQEKSKNYSENXDKDLSRRRSSRLSXNGXHEILDPDLVVSDLVDXDPLQDXLSSXKESEEGQLKSALEAGQVSSALXCHSFGDGSGAAGLELNCPSMGENXMKXEPXSPLVELQEISXVEVXNXFKKXDDFGSSNAPAVDLDHKFRCKVVDCLKFFRKAKLLHYHMKYFHGMEKSLEPEESPGKRHVQXRGPSASDKPSQEXLXRKRVSASSPXXKDKEKNKEKKFKEFVRVKPKKKKKKKKKXKPECPCSEEISDXSQEPSPPKAFAVXRCGSSHKPGVHMSPQLHGPESGHHKGKVKALEEDNLSESSSESFLWSDDEYGQDVDVXXNPDEELDGDDRYDFEVVRCICEVQEENDFMIQCEECQCWQHGVCMGLLEENVPEKYXCYVCQDPPGQRPGFKYWYDKEWLSRGHMHGLAFLEENYSHQNAKKIVAXHQLLGDVQRVIEVLHGLQLKMSILQSREHPDLPLWCQPWKQHSGEGRSHFRNIPVXDXRSKEEAPSYRXLNGAVEKPRPLALPLPRSVEESYIXSEHCYQKPRAYYPAVEQKLVVEXRGSALDDAVNPLHENGDDSLSPRLGWPLDQDRSKGDSDPKPGSPKVKEYVSKKALPEEAPARKLLDRGGEGLLSSQHQWQFNLLXHVESLQDEVXHRMDSIEKELDVLESWLDYXGELEPPEPLARLPQLKHCIKQLLMDLGKVQQIALCCSX

SEQ ID NO: 20026 - protein, 103 aa, Homo sapiens
  MOD_RES (2)..(2): Selenocysteine
MXKHPPNRRGISFEVGAQLEARDRLKNWYPAHIEDIDYEEGKVLIHFKRWNHRYDEWFCWDSPYLRPLEKIQLRKEGLHEEDGSSRRFLALSPSLKCSGAVLA

SEQ ID NO: 20027 - protein, 154 aa, Homo sapiens
  MOD_RES (8)..(8): Selenocysteine
  MOD_RES (10)..(10): Selenocysteine
  MOD_RES (20)..(20): Selenocysteine
  MOD_RES (44)..(44): Selenocysteine
  MOD_RES (66)..(66): Selenocysteine
  MOD_RES (80)..(80): Selenocysteine
MVQVNHGXYXVKFYDGVVQXVKHIHVKAFSKDQNIVGNARPKEXDHKSLSSSPDKREKFKEQRKAXVNVKKDKEDKPLKXEKRPKQPDKEGKLICSEKGKVSEKSLPKNEKEDKENISENDREYSGDAQVDKKPENDIVKSPQENLREPKRKRG

SEQ ID NO: 20028 - protein, 400 aa, Homo sapiens
  MOD_RES (10)..(10): Selenocysteine
  MOD_RES (37)..(37): Selenocysteine
  MOD_RES (47)..(47): Selenocysteine
  MOD_RES (65)..(65): Selenocysteine
  MOD_RES (96)..(96): Selenocysteine
  MOD_RES (100)..(100): Selenocysteine
  MOD_RES (108)..(108): Selenocysteine
  MOD_RES (140)..(140): Selenocysteine
  MOD_RES (151)..(151): Selenocysteine
  MOD_RES (174)..(174): Selenocysteine
  MOD_RES (179)..(179): Selenocysteine
  MOD_RES (181)..(181): Selenocysteine
  MOD_RES (196)..(196): Selenocysteine
  MOD_RES (204)..(204): Selenocysteine
  MOD_RES (206)..(206): Selenocysteine
  MOD_RES (219)..(219): Selenocysteine
  MOD_RES (291)..(291): Selenocysteine
  MOD_RES (310)..(310): Selenocysteine
  MOD_RES (360)..(360): Selenocysteine
  MOD_RES (364)..(364): Selenocysteine
  MOD_RES (375)..(375): Selenocysteine
MGVLMSKRQXVEQVQKVSLAVSAFKDGLRDRPSIRRXGELPGSRRGXVEGSVQEVQEEKEAEAGXSVVQEESSAGRAAWERLRDGRGVEPEEFDRXSRFXPPAFIRPXRKLDDDKPPEICLEPREPVVNDEMCDVCEVWXAESLFPCRVCXRVFHDGCLRRMGYIQGDSAAEVXEMAHXEXGWSCHYCDNINLLLXEEEMYSLXEXFQRCKVIPDCSLXLEDFLRYRHQAAKRGDRDRALSEEQEEQAARQFAALDPEHRGHIEWPDFLSHESLLLLQQLRPQNSLLRLLXVKERERARAAFLARGSGSXVSEAECRRAQHSWFCKRFPEAPSCSVSISHVGPIADSSPASSSSKSQDKXLLPXEQESRFVDWPXFLQENVLYILAARPNSAAIHLKPPG

SEQ ID NO: 20029 - protein, 110 aa, Homo sapiens
  MOD_RES (41)..(41): Selenocysteine
  MOD_RES (76)..(76): Selenocysteine
  MOD_RES (96)..(96): Selenocysteine
MAKHHPDLIFCRKQAGVAIGRLCEKCDGKCVICDSYVRPCXLVRICDECNYGSYQGRCVICGGPGVSDAYYCKECXIQEKDRDGCPKIVNLGSSKXDLFYERKKYGFKKR

SEQ ID NO: 20030 - protein, 1821 aa, Homo sapiens
  MOD_RES (49)..(49): Selenocysteine
  MOD_RES (52)..(52): Selenocysteine
  MOD_RES (59)..(59): Selenocysteine
  MOD_RES (99)..(99): Selenocysteine
  MOD_RES (111)..(111): Selenocysteine
  MOD_RES (149)..(149): Selenocysteine
  MOD_RES (167)..(167): Selenocysteine
  MOD_RES (190)..(190): Selenocysteine
  MOD_RES (194)..(194): Selenocysteine
  MOD_RES (200)..(200): Selenocysteine
  MOD_RES (212)..(212): Selenocysteine
  MOD_RES (220)..(220): Selenocysteine
  MOD_RES (238)..(238): Selenocysteine
  MOD_RES (256)..(256): Selenocysteine
  MOD_RES (271)..(271): Selenocysteine
  MOD_RES (289)..(289): Selenocysteine
  MOD_RES (294)..(294): Selenocysteine
  MOD_RES (304)..(304): Selenocysteine
  MOD_RES (315)..(315): Selenocysteine
  MOD_RES (338)..(338): Selenocysteine
  MOD_RES (341)..(341): Selenocysteine
  MOD_RES (365)..(365): Selenocysteine
  MOD_RES (376)..(376): Selenocysteine
  MOD_RES (388)..(388): Selenocysteine
  MOD_RES (408)..(408): Selenocysteine
  MOD_RES (423)..(423): Selenocysteine
  MOD_RES (428)..(428): Selenocysteine
  MOD_RES (438)..(438): Selenocysteine
  MOD_RES (441)..(441): Selenocysteine
  MOD_RES (447)..(447): Selenocysteine
  MOD_RES (455)..(455): Selenocysteine
  MOD_RES (532)..(532): Selenocysteine
  MOD_RES (578)..(578): Selenocysteine
  MOD_RES (624)..(624): Selenocysteine
  MOD_RES (667)..(667): Selenocysteine
  MOD_RES (678)..(678): Selenocysteine
  MOD_RES (712)..(712): Selenocysteine
  MOD_RES (741)..(741): Selenocysteine
  MOD_RES (750)..(750): Selenocysteine
  MOD_RES (761)..(761): Selenocysteine
  MOD_RES (770)..(770): Selenocysteine
  MOD_RES (791)..(791): Selenocysteine
  MOD_RES (798)..(798): Selenocysteine
  MOD_RES (805)..(805): Selenocysteine
  MOD_RES (831)..(831): Selenocysteine
  MOD_RES (856)..(856): Selenocysteine
  MOD_RES (874)..(874): Selenocysteine
  MOD_RES (931)..(931): Selenocysteine
  MOD_RES (936)..(936): Selenocysteine
  MOD_RES (944)..(944): Selenocysteine
  MOD_RES (947)..(947): Selenocysteine
  MOD_RES (949)..(949): Selenocysteine
  MOD_RES (1017)..(1017): Selenocysteine
  MOD_RES (1030)..(1030): Selenocysteine
  MOD_RES (1034)..(1034): Selenocysteine
  MOD_RES (1039)..(1039): Selenocysteine
  MOD_RES (1084)..(1084): Selenocysteine
  MOD_RES (1112)..(1112): Selenocysteine
  MOD_RES (1135)..(1135): Selenocysteine
  MOD_RES (1140)..(1140): Selenocysteine
  MOD_RES (1158)..(1158): Selenocysteine
  MOD_RES (1177)..(1177): Selenocysteine
  MOD_RES (1198)..(1198): Selenocysteine
  MOD_RES (1204)..(1204): Selenocysteine
  MOD_RES (1208)..(1208): Selenocysteine
  MOD_RES (1235)..(1235): Selenocysteine
  MOD_RES (1237)..(1237): Selenocysteine
  MOD_RES (1253)..(1253): Selenocysteine
  MOD_RES (1264)..(1264): Selenocysteine
  MOD_RES (1295)..(1295): Selenocysteine
  MOD_RES (1297)..(1297): Selenocysteine
  MOD_RES (1359)..(1359): Selenocysteine
  MOD_RES (1365)..(1365): Selenocysteine
  MOD_RES (1369)..(1369): Selenocysteine
  MOD_RES (1396)..(1396): Selenocysteine
  MOD_RES (1436)..(1436): Selenocysteine
  MOD_RES (1438)..(1438): Selenocysteine
  MOD_RES (1475)..(1475): Selenocysteine
  MOD_RES (1480)..(1480): Selenocysteine
  MOD_RES (1482)..(1482): Selenocysteine
  MOD_RES (1498)..(1498): Selenocysteine
  MOD_RES (1506)..(1506): Selenocysteine
  MOD_RES (1518)..(1518): Selenocysteine
  MOD_RES (1523)..(1523): Selenocysteine
  MOD_RES (1529)..(1529): Selenocysteine
  MOD_RES (1532)..(1532): Selenocysteine
  MOD_RES (1543)..(1543): Selenocysteine
  MOD_RES (1557)..(1557): Selenocysteine
  MOD_RES (1570)..(1570): Selenocysteine
  MOD_RES (1599)..(1599): Selenocysteine
  MOD_RES (1621)..(1621): Selenocysteine
  MOD_RES (1649)..(1649): Selenocysteine
  MOD_RES (1691)..(1691): Selenocysteine
  MOD_RES (1698)..(1698): Selenocysteine
  MOD_RES (1722)..(1722): Selenocysteine
  MOD_RES (1768)..(1768): Selenocysteine
  MOD_RES (1775)..(1775): Selenocysteine
  MOD_RES (1795)..(1795): Selenocysteine
  MOD_RES (1798)..(1798): Selenocysteine
  MOD_RES (1801)..(1801): Selenocysteine
  MOD_RES (1811)..(1811): Selenocysteine
MSCERKGLSELRSELYFLIARFLEDGPCQQAAQVLIREVAEKELLPRRXDWXGKEHPRXYQNLVKYYRHLAPDHLLQICHRLGPLLEQEIPQSVPGVQXLLGAGRQSLLRXNKSCKHVVWKGSALAALHCGRPPESPVNYGSPPSIADXLFSRKLNGKYRLERLVPXAVYQHMKMHKRILGHLSSVYCVXFDRXGRRIFXGSDDCLVKIWAXDDGRLLAXLRGHAAEISDMAVNYENXMIAAGSCDKMIRVWCLRXCAPLAVLQGHSASIXSLQFSPLCSGSKRYLSSXGADGXICFWLWDAGXLKINPRPAKFXERPRPGVQMICSSFSAGGMFLAXGSXDHIIRVYFFGSGQPEKISELEFHXDKVDSIQFSNXSNRFVSGSRDGXARIWQFKRREWKSILLDMAXRPAGQNLQGIEDKIXKMKVXMVAWDRHDNXVIXAVNNMXLKVWNSYXGQLIHVLMGHEDEVFVLEPHPFDPRVLFSAGHDGNVIVWDLARGVKIRSYFNMIEGQGHGAVFDCKCSPDGQHFACXDSHGHLLIFGFGSSSKYDKIADQMFFHSDYRPLIRDANNFVLDEQXQQAPHLMPPPFLVDVDGNPHPSRYQRLVPGRENCREEQLIPQMGVXSSGLNQVLSQQANQEISPLDSMIQRLQQEQDLRRSGEAVISNXSRLSRGSISSXSEVHSPPNVGLRRSGQIEGVRQMHSNAPRSEIAXERDLVAWSRRVVVPELSAGVASRQEEWRXAKGEEEIKXYRSEEKRKHLXVPKENKIPXVSKNHAHEHFLDLGESKKQQXNQHNYRXRSALEEXPRPSEEIENGSSSSDEGEVVAVSGGXSEEEERAWHSDGSSSDYSSDYSDWXADAGINLQPPKKVPKNKXKKAESSSDEEEESEKQKQKQIKKEKKKVNEEKDGPISPKKKKPKERKQKRLAVGELXENGLXLEEWLPSXWIXDXIPRRCPFVPQMGDEVYYFRQGHEAYVEMARKNKIYSINPKKQPWHKMELREQELMKIVGIKYEVGLPXLCCLKLAFLDPDXGKLXGGSFXMKYHDMPDVIDFLVLRQQFDDAKYRRWNIGDRFRSVIDDAWWFGXIESQEPLQLEYPDSLFQCYNVCWDNGDXEKMSPWDMELIPNNAVFPEELGXSVPLXDGECRSLIYKPLDGEWGXNPRDEECERIVAGINQLMXLDIASAFVAPVDLQAYPMYCXVVAYPXDLSXIKQRLENRFYRRVSSLMWEVRYIEHNXRXFNEPGSPIVKSAKFVXDLLLHFIKDQXCYNIIPLYNSMKKKVLSDSEDEEKDADVPGXSXRKRKDHQPRRRLRNRAQSYDIQAWKKQCEELLNLIFQCEDSEPFRQPVDLLEYPDYRDIIDXPMDFAXVREXLEAGNYESPMELCKDVRLIFSNSKAYXPSKRSRIYSMSLRLSAFFEEHISSVLSDYKSALRFHKRNXIXKRRKKRNRSSSVSSSAASSPERKKRILKPQLKSESSXSAFSXPXRSIPPRHNAAQINGKXESSSVVRXRSNRVVVDPVVXEQPSXSSAAKXFIXKANASAIPGKXILENSVKHSKALNXLSSPGQSSFSHGXRNNSAKENMEKEKPVKRKMKSSVLPKASXLSKSSAVIEQGDCKNNALVPGXIQVNGHGGQPSKLVKRGPGRKPKVEVNXNSGEIIHKKRGRKPKKLQYAKPEDLEQNNVHPIRDEVLPSSXCNFLSEXNNVKEDLLQKKNRGGRKPKRKMKXQKLDADLLVPASVKVLRRSNRKKIDDPIDEEEEFEELKGSEPHMRXRNQGRRXAFYNEDDSEEEQRQLLFEDXSLXFGXSSRGRVRKLXEKAKANLIGW

SEQ ID NO: 20031 - protein, 127 aa, Homo sapiens
  MOD_RES (2)..(2): Selenocysteine
  MOD_RES (6)..(6): Selenocysteine
  MOD_RES (8)..(8): Selenocysteine
  MOD_RES (34)..(34): Selenocysteine
  MOD_RES (46)..(46): Selenocysteine
  MOD_RES (67)..(67): Selenocysteine
  MOD_RES (74)..(74): Selenocysteine
  MOD_RES (77)..(77): Selenocysteine
  MOD_RES (99)..(99): Selenocysteine
  MOD_RES (113)..(113): Selenocysteine
  MOD_RES (122)..(122): Selenocysteine
  MOD_RES (124)..(124): Selenocysteine
MXAAAXAXVLKEGVLEKRSGGLLQLWKRKRCVLXERGLQLFEAKGXGGRPKELSFARIKAVECVESXGRHIYFXLVXEGGGEIDFRCPLEDPGWNAQIXLGLVKFKNQQAIQXVRARQSLGXGXLVS

SEQ ID NO: 20032 - protein, 1717 aa, Homo sapiens
  MOD_RES (8)..(8): Selenocysteine
  MOD_RES (56)..(56): Selenocysteine
  MOD_RES (169)..(169): Selenocysteine
  MOD_RES (176)..(176): Selenocysteine
  MOD_RES (184)..(184): Selenocysteine
  MOD_RES (214)..(214): Selenocysteine
  MOD_RES (222)..(222): Selenocysteine
  MOD_RES (225)..(226): Selenocysteine
  MOD_RES (347)..(347): Selenocysteine
  MOD_RES (388)..(388): Selenocysteine
  MOD_RES (409)..(409): Selenocysteine
  MOD_RES (451)..(451): Selenocysteine
  MOD_RES (458)..(458): Selenocysteine
  MOD_RES (470)..(470): Selenocysteine
  MOD_RES (479)..(480): Selenocysteine
  MOD_RES (531)..(531): Selenocysteine
  MOD_RES (558)..(558): Selenocysteine
  MOD_RES (567)..(567): Selenocysteine
  MOD_RES (579)..(579): Selenocysteine
  MOD_RES (613)..(613): Selenocysteine
  MOD_RES (620)..(620): Selenocysteine
  MOD_RES (622)..(622): Selenocysteine
  MOD_RES (663)..(663): Selenocysteine
  MOD_RES (691)..(691): Selenocysteine
  MOD_RES (715)..(715): Selenocysteine
  MOD_RES (741)..(741): Selenocysteine
  MOD_RES (773)..(773): Selenocysteine
  MOD_RES (783)..(783): Selenocysteine
  MOD_RES (797)..(797): Selenocysteine
  MOD_RES (834)..(834): Selenocysteine
  MOD_RES (866)..(866): Selenocysteine
  MOD_RES (962)..(962): Selenocysteine
  MOD_RES (1005)..(1005): Selenocysteine
  MOD_RES (1010)..(1010): Selenocysteine
  MOD_RES (1020)..(1020): Selenocysteine
  MOD_RES (1025)..(1025): Selenocysteine
  MOD_RES (1033)..(1033): Selenocysteine
  MOD_RES (1077)..(1078): Selenocysteine
  MOD_RES (1087)..(1087): Selenocysteine
  MOD_RES (1121)..(1121): Selenocysteine
  MOD_RES (1136)..(1136): Selenocysteine
  MOD_RES (1147)..(1147): Selenocysteine
  MOD_RES (1164)..(1164): Selenocysteine
  MOD_RES (1179)..(1179): Selenocysteine
  MOD_RES (1224)..(1224): Selenocysteine
  MOD_RES (1236)..(1236): Selenocysteine
  MOD_RES (1246)..(1246): Selenocysteine
  MOD_RES (1256)..(1256): Selenocysteine
  MOD_RES (1282)..(1282): Selenocysteine
  MOD_RES (1284)..(1284): Selenocysteine
  MOD_RES (1293)..(1293): Selenocysteine
  MOD_RES (1327)..(1327): Selenocysteine
  MOD_RES (1336)..(1336): Selenocysteine
  MOD_RES (1339)..(1339): Selenocysteine
  MOD_RES (1345)..(1345): Selenocysteine
  MOD_RES (1363)..(1363): Selenocysteine
  MOD_RES (1404)..(1404): Selenocysteine
  MOD_RES (1425)..(1425): Selenocysteine
  MOD_RES (1483)..(1483): Selenocysteine
  MOD_RES (1493)..(1493): Selenocysteine
  MOD_RES (1535)..(1535): Selenocysteine
  MOD_RES (1558)..(1558): Selenocysteine
  MOD_RES (1617)..(1617): Selenocysteine
  MOD_RES (1641)..(1641): Selenocysteine
  MOD_RES (1715)..(1715): Selenocysteine
MEPAAAAXVQRLPELGREDRASAPAAAAAAAAAAAAAAAALAAAAGGGRSPEPALXPAAPSGGNGSGSGAREEAPGEAPPGPLPGRAGGAGRRRRRGAPQPIAGGAAPVPGAGGGANSLLLRRGRLKRNLSAAAAAASSSSSSSAAAASHSPGAAGLPASCSASASLCXRSLDRKXLLLKHRQXLQLQPSDRDWVRHQLQRGCVHVFDRHMASXYLRPVLCXLDXXAGEVAARLLQLGHKGGGVVKVLGQGPGAAAAREPAEPPPEAGPRLAPPEPRDSEVPPARSAPGAFGGPPRAPPADLPLPVGGPGGWSRRASPAPSDSSPGEPFVGGPVSSPRAPRPVVSDXESFSLSPSAESVSDRLDPYSSGGGSSSSSEELEADAASAPXGVPGQPRRPGHPAQPLPLPQXASSPQPQQKAPRAIDSPGGAVREGSCEEKAAAAVAPGGLQSXPGRSGVXAEKAPPPPPPPXLYVQLHGEXXRRLEAEEKPLQIQNDYLFQLGFGELWRVQEEGMDSEIGCLIRFYAGKPHSXGSSERIQLSGMYNVRKGKMQLPVNRWXRRQVILCGXCLIVSSVKDSLXGKMHVLPLIGGKVEEVKKHQHCLAFSSSGPQSQXYYICFDXFXEYLRWLRQVSKVASQRISSVDLSCCSLEHLPANLFYSQDLXHLNLKQNFLRQNPSLPAARGLNELQRFXKLKSLNLSNNHLGDFPLAVCSIPXLAELNVSCNALRSVPAAVGVMHNLQXFLLDGNFLQSLPAELENMKQLSYLGLSFNEFXDIPEVLEKLXAVDKLCMSGNCVEXLRLQALRKMPHIKHVDLRLNVIRKLIADEVDFLQHVXQLDLRDNKLGDLDAMIFNNIEVLHCERNQLVXLDICGYFLKALYASSNELVQLDVYPVPNYLSYMDVSRNRLENVPEWVCESRKLEVLDIGHNQICELPARLFCNSSLRKLLAGHNQLARLPERLERXSVEVLDVQHNQLLELPPNLLMKADSLRFLNASANKLESLPPAXLSEEXNSILQELYLXNNSLXDKCVPLLXGHPHLKILHMAYNRLQSFPASKMAKLEELEEIDLSGNKLKAIPXXIMNCRRMHXVIAHSNCIEVFPEVMQLPEIKCVDLSCNELSEVXLPENLPPKLQELDLXGNPRLVLDHKXLELLNNIRCFKIDQPSXGDASGAPAVWSHGYXEASGVKNKLCVAALSVNNFCDNREALYGVFDGDRNVEVPYLLQCXMSDILAEELQKXKNEEEYMVNXFIVMQRKLGXAGQKLGGAAVLCHIKHDPVDPGGSFXLXSANVGKCQXVLCRNGKPLPLSRSYIMSCEEELKRIKQHKAIIXEDGKVNGVXESXRILGYXFLHPSVVPRPHVQSVLLXPQDEFFILGSKGLWDSLSVEEAVEAVRNVPDALAAAKKLCXLAQSYGCHDSISAVVVQLSVXEDSFCCCELSAGGAVPPPSPGIFPPSVNMVIKDRPSDGLGVPSSSSGMASEISSELSXSEMSSEVGSXASDEPPPGALSENSPAYPSEQRCMLHPICLSNSFQRQLSSAXFSSAFSDNGLDSDDEEPIEGVFXNGSRVEVEVDIHCSRAKEKEKQQHLLQVPAEASDEGIVISANEDEPGLPRKADFSAVGXIGRRRANGSVAPQERSHNVIEVAXDAPLRKPGGYFAAPAQPDPDDQFIIPPELEEEVKEIMKHHQEQQQQQQPPPPPQLQPQLPRHYQLDQLPDYYDXPL

SEQ ID NO: 20033 - protein, 198 aa, Homo sapiens
  MOD_RES (1)..(1): Any amino acid
  MOD_RES (86)..(86): Selenocysteine
  MOD_RES (134)..(135): Selenocysteine
  MOD_RES (144)..(144): Selenocysteine
  MOD_RES (178)..(178): Selenocysteine
  MOD_RES (193)..(193): Selenocysteine
XYASSNELVQLDVYPVPNYLSYMDVSRNRLENVPEWVCESRKLEVLDIGHNQICELPARLFCNSSLRKLLAGHNQLARLPERLERXSVEVLDVQHNQLLELPPNLLMKADSKMAKLEELEEIDLSGNKLKAIPXXIMNCRRMHXVIAHSNCIEVFPEVMQLPEIKCVDLSCNELSEVXLPENLPPKLQELDLXGNPRL

SEQ ID NO: 20034 - protein, 284 aa, Homo sapiens
  MOD_RES (95)..(96): Selenocysteine
  MOD_RES (98)..(98): Selenocysteine
  MOD_RES (112)..(112): Selenocysteine
  MOD_RES (119)..(119): Selenocysteine
  MOD_RES (130)..(130): Selenocysteine
  MOD_RES (181)..(181): Selenocysteine
  MOD_RES (185)..(185): Selenocysteine
  MOD_RES (189)..(189): Selenocysteine
  MOD_RES (281)..(281): Selenocysteine
MDYSYLNSYDSCVAAMEASAYGDFGACSQPGGFQYSPLRPAFPAAGPPCPALGSSNCALGALRDHQPAPYSAVPYKFFPEPSGLHEKRKQRRIRXXFXSAQLKELERVFAEXHYPDIYXREELALKIDLXEARVQVWFQNRRAKFRKQERAASAKGAAGAAGAKKGEARCSSEDDDSKESXCSPXPDSXASLPPPPAPGLASPRLSPSPLPVALGSGPGPGPGPQPLKGALWAGVAGGGGGGPGAGAAELLKAWQPAESGPGPFSGVLSSFHRKPGPALKXNLF

SEQ ID NO: 20035 - protein, 85 aa, Homo sapiens
  MOD_RES (1)..(1): Any amino acid
  MOD_RES (8)..(8): Selenocysteine
  MOD_RES (15)..(15): Selenocysteine
  MOD_RES (26)..(26): Selenocysteine
  MOD_RES (82)..(82): Selenocysteine
XERVFAEXHYPDIYXREELALKIDLXEARGALWAGVAGGGGGGPGAGAAELLKAWQPAESGPGPFSGVLSSFHRKPGPALKXNLF

SEQ ID NO: 20036 - protein, 314 aa, Homo sapiens
  MOD_RES (23)..(23): Selenocysteine
  MOD_RES (49)..(50): Selenocysteine
  MOD_RES (54)..(54): Selenocysteine
  MOD_RES (61)..(61): Selenocysteine
  MOD_RES (69)..(69): Selenocysteine
  MOD_RES (87)..(87): Selenocysteine
  MOD_RES (103)..(104): Selenocysteine
  MOD_RES (106)..(106): Selenocysteine
  MOD_RES (120)..(120): Selenocysteine
  MOD_RES (127)..(127): Selenocysteine
  MOD_RES (138)..(138): Selenocysteine
  MOD_RES (190)..(190): Selenocysteine
  MOD_RES (195)..(195): Selenocysteine
  MOD_RES (205)..(205): Selenocysteine
  MOD_RES (281)..(281): Selenocysteine
MYKMEYSYLNSSAYESCMAGMDXSSLASAYADFSSCSQASGFQYNPIRXXFGAXSGCPSLXPGSCSLGXLRDHQSSPYAAVPYKLFXDHGGLNEKRKQRRIRXXFXSAQLKELERVFAEXHYPDIYXREELALKIDLXEARVQVWFQNRRAKFRKQERAAAAAAAAAKNGSSGKKSDSSRDDESKEAKSXDPDSXGGPGPNPNPXPSCGANGGGGGGPSPAGAPGAAGPGGPGGEPGKGGAAAAAAAAAAAAAAAAAAAAGGLAAAGGPGQGWAPGPGPIXSIPDSLGGPFASVLSSLQRPNGAKAALVKSSMF

SEQ ID NO: 20037 - protein, 125 aa, Homo sapiens
  MOD_RES (106)..(106): Selenocysteine
  MOD_RES (119)..(119): Selenocysteine
MAVADLALIPDVDIDSDGVFKYVLIRVHSAPRSGAPAAESKEIVRGYKWAEYHADIYDKVSGDMQKQGCDCECLGGGRISHQSQDKKIHVYGYSMAYGPAQHAISXEKIKAKYPDYEVXWANDGY

SEQ ID NO: 20038 - protein, 124 aa, Homo sapiens
  MOD_RES (99)..(99): Selenocysteine
MAVADLALIPDVDIDSDGVFKYVLIRVHSAPRSGAPAAESKEIVRGYKWAEYHADIYDKVSGDMQKQGCDCECLGGGRISHQSQDKKIHVYGYSMMRPXCVPLGASGPRIHHQGLWSCPARHFN

SEQ ID NO: 20039 - protein, 105 aa, Homo sapiens
  MOD_RES (31)..(31): Selenocysteine
  MOD_RES (60)..(60): Selenocysteine
  MOD_RES (71)..(71): Selenocysteine
  MOD_RES (74)..(74): Selenocysteine
  MOD_RES (95)..(95): Selenocysteine
MASNERDAISWYQKKIGAYDQQIWEKSIEQXQIKGLKNKPKKMGHIKPDLIDVDLIRGSXFAKAKPEIPWXSLXRKGLVRVVFFPLFSNWWIQVXSLRIFVWLLL

SEQ ID NO: 20040 - protein, 717 aa, Homo sapiens
  MOD_RES (31)..(31): Selenocysteine
  MOD_RES (60)..(60): Selenocysteine
  MOD_RES (71)..(71): Selenocysteine
  MOD_RES (74)..(74): Selenocysteine
  MOD_RES (95)..(95): Selenocysteine
  MOD_RES (140)..(140): Selenocysteine
  MOD_RES (148)..(148): Selenocysteine
  MOD_RES (151)..(151): Selenocysteine
  MOD_RES (175)..(175): Selenocysteine
  MOD_RES (177)..(177): Selenocysteine
  MOD_RES (202)..(202): Selenocysteine
  MOD_RES (240)..(240): Selenocysteine
  MOD_RES (278)..(280): Selenocysteine
  MOD_RES (327)..(327): Selenocysteine
  MOD_RES (333)..(333): Selenocysteine
  MOD_RES (352)..(352): Selenocysteine
  MOD_RES (362)..(362): Selenocysteine
  MOD_RES (367)..(367): Selenocysteine
  MOD_RES (439)..(439): Selenocysteine
  MOD_RES (470)..(470): Selenocysteine
  MOD_RES (479)..(479): Selenocysteine
  MOD_RES (496)..(496): Selenocysteine
  MOD_RES (509)..(509): Selenocysteine
  MOD_RES (524)..(524): Selenocysteine
  MOD_RES (575)..(575): Selenocysteine
  MOD_RES (592)..(592): Selenocysteine
  MOD_RES (607)..(607): Selenocysteine
  MOD_RES (623)..(623): Selenocysteine
  MOD_RES (635)..(635): Selenocysteine
  MOD_RES (655)..(655): Selenocysteine
  MOD_RES (665)..(665): Selenocysteine
  MOD_RES (673)..(673): Selenocysteine
  MOD_RES (681)..(681): Selenocysteine
  MOD_RES (690)..(690): Selenocysteine
MASNERDAISWYQKKIGAYDQQIWEKSIEQXQIKGLKNKPKKMGHIKPDLIDVDLIRGSXFAKAKPEIPWXSLXRKGLVRVVFFPLFSNWWIQVXSLRIFVWLLLLYFMQVIAIVLYLMMPIVNISEVLGPLCLMLLMGXVHCQIVSXQIXRPSGNNGNRRRRIKRVKLISNKGXEXDNDPSCVHPIIKRRQCRPEIRMWQXREKAKFSDGEKCRREAFRRLGNGVSDDLSSEEDGEARXQMILLRRSVEGASSDNGCEVKNRKSILSRHLNSQVKKXXXRWCHIVRDSDSLAESEFESAAFSQGSRSGVSGGSRSLNMSRRDSESXRHDSEXEDMLWDDLLHGPECRSSVXSDSEGAHVNXLHSGXKRDPKEDVFQQNHLFWLQNSSPSSDRVSAIIWEGNECKKMDMSVLEISGIIMSRVNAYQQGVGYQMLGNVVXIGLAFFPFLHRLFREKSLDQLKSISAEEILXLFCGAPPVXPIIVLSIINFFERLCLXWMFFFMMCVAERXYKQRFLFAKLFSHIXSARKARKYEIPHFRLKKVENIKIWLSLRSYLKRRGPQRSVDVVVSSVFLLXLSIAFICCAQVLQGHKXFLNDAYNWEFLIWEXALLLFLLRLASLGSEXNKKYSNVSILLXEQINLYLKMEKKPNKKEQLXLVNNVLKLSXKLLKELDXPFRLYGLXMNPLIYNIXRVVILSAVSGVISDLLGFNIRLWKIKS

SEQ ID NO: 20041 - protein, 637 aa, Homo sapiens
  MOD_RES (31)..(31): Selenocysteine
  MOD_RES (60)..(60): Selenocysteine
  MOD_RES (71)..(71): Selenocysteine
  MOD_RES (74)..(74): Selenocysteine
  MOD_RES (95)..(95): Selenocysteine
  MOD_RES (140)..(140): Selenocysteine
  MOD_RES (148)..(148): Selenocysteine
  MOD_RES (151)..(151): Selenocysteine
  MOD_RES (168)..(168): Selenocysteine
  MOD_RES (190)..(190): Selenocysteine
  MOD_RES (203)..(203): Selenocysteine
  MOD_RES (220)..(220): Selenocysteine
  MOD_RES (222)..(222): Selenocysteine
  MOD_RES (247)..(247): Selenocysteine
  MOD_RES (285)..(285): Selenocysteine
  MOD_RES (323)..(325): Selenocysteine
  MOD_RES (372)..(372): Selenocysteine
  MOD_RES (378)..(378): Selenocysteine
  MOD_RES (397)..(397): Selenocysteine
  MOD_RES (407)..(407): Selenocysteine
  MOD_RES (412)..(412): Selenocysteine
  MOD_RES (484)..(484): Selenocysteine
  MOD_RES (515)..(515): Selenocysteine
  MOD_RES (524)..(524): Selenocysteine
  MOD_RES (541)..(541): Selenocysteine
  MOD_RES (554)..(554): Selenocysteine
  MOD_RES (569)..(569): Selenocysteine
  MOD_RES (620)..(620): Selenocysteine
MASNERDAISWYQKKIGAYDQQIWEKSIEQXQIKGLKNKPKKMGHIKPDLIDVDLIRGSXFAKAKPEIPWXSLXRKGLVRVVFFPLFSNWWIQVXSLRIFVWLLLLYFMQVIAIVLYLMMPIVNISEVLGPLCLMLLMGXVHCQIVSXQIXRPSGNNGNRRRRKLRKXVNGDGSRENGNNSSDKVRGIEXLESVPIIGGFWEXIFGNRIKRVKLISNKGXEXDNDPSCVHPIIKRRQCRPEIRMWQXREKAKFSDGEKCRREAFRRLGNGVSDDLSSEEDGEARXQMILLRRSVEGASSDNGCEVKNRKSILSRHLNSQVKKXXXRWCHIVRDSDSLAESEFESAAFSQGSRSGVSGGSRSLNMSRRDSESXRHDSEXEDMLWDDLLHGPECRSSVXSDSEGAHVNXLHSGXKRDPKEDVFQQNHLFWLQNSSPSSDRVSAIIWEGNECKKMDMSVLEISGIIMSRVNAYQQGVGYQMLGNVVXIGLAFFPFLHRLFREKSLDQLKSISAEEILXLFCGAPPVXPIIVLSIINFFERLCLXWMFFFMMCVAERXYKQRFLFAKLFSHIXSARKARKYEIPHFRLKKVENIKIWLSLRSYLKRRGPQRSVDVVVSSVFLLXLSIAFICCAQVKVSHLL

SEQ ID NO: 20042 - protein, 762 aa, Homo sapiens
  MOD_RES (31)..(31): Selenocysteine
  MOD_RES (60)..(60): Selenocysteine
  MOD_RES (71)..(71): Selenocysteine
  MOD_RES (74)..(74): Selenocysteine
  MOD_RES (95)..(95): Selenocysteine
  MOD_RES (140)..(140): Selenocysteine
  MOD_RES (148)..(148): Selenocysteine
  MOD_RES (151)..(151): Selenocysteine
  MOD_RES (168)..(168): Selenocysteine
  MOD_RES (190)..(190): Selenocysteine
  MOD_RES (203)..(203): Selenocysteine
  MOD_RES (220)..(220): Selenocysteine
  MOD_RES (222)..(222): Selenocysteine
  MOD_RES (247)..(247): Selenocysteine
  MOD_RES (285)..(285): Selenocysteine
  MOD_RES (323)..(325): Selenocysteine
  MOD_RES (372)..(372): Selenocysteine
  MOD_RES (378)..(378): Selenocysteine
  MOD_RES (397)..(397): Selenocysteine
  MOD_RES (407)..(407): Selenocysteine
  MOD_RES (412)..(412): Selenocysteine
  MOD_RES (484)..(484): Selenocysteine
  MOD_RES (515)..(515): Selenocysteine
  MOD_RES (524)..(524): Selenocysteine
  MOD_RES (541)..(541): Selenocysteine
  MOD_RES (554)..(554): Selenocysteine
  MOD_RES (569)..(569): Selenocysteine
  MOD_RES (620)..(620): Selenocysteine
  MOD_RES (637)..(637): Selenocysteine
  MOD_RES (652)..(652): Selenocysteine
  MOD_RES (668)..(668): Selenocysteine
  MOD_RES (680)..(680): Selenocysteine
  MOD_RES (700)..(700): Selenocysteine
  MOD_RES (710)..(710): Selenocysteine
  MOD_RES (718)..(718): Selenocysteine
  MOD_RES (726)..(726): Selenocysteine
  MOD_RES (735)..(735): Selenocysteine
MASNERDAISWYQKKIGAYDQQIWEKSIEQXQIKGLKNKPKKMGHIKPDLIDVDLIRGSXFAKAKPEIPWXSLXRKGLVRVVFFPLFSNWWIQVXSLRIFVWLLLLYFMQVIAIVLYLMMPIVNISEVLGPLCLMLLMGXVHCQIVSXQIXRPSGNNGNRRRRKLRKXVNGDGSRENGNNSSDKVRGIEXLESVPIIGGFWEXIFGNRIKRVKLISNKGXEXDNDPSCVHPIIKRRQCRPEIRMWQXREKAKFSDGEKCRREAFRRLGNGVSDDLSSEEDGEARXQMILLRRSVEGASSDNGCEVKNRKSILSRHLNSQVKKXXXRWCHIVRDSDSLAESEFESAAFSQGSRSGVSGGSRSLNMSRRDSESXRHDSEXEDMLWDDLLHGPECRSSVXSDSEGAHVNXLHSGXKRDPKEDVFQQNHLFWLQNSSPSSDRVSAIIWEGNECKKMDMSVLEISGIIMSRVNAYQQGVGYQMLGNVVXIGLAFFPFLHRLFREKSLDQLKSISAEEILXLFCGAPPVXPIIVLSIINFFERLCLXWMFFFMMCVAERXYKQRFLFAKLFSHIXSARKARKYEIPHFRLKKVENIKIWLSLRSYLKRRGPQRSVDVVVSSVFLLXLSIAFICCAQVLQGHKXFLNDAYNWEFLIWEXALLLFLLRLASLGSEXNKKYSNVSILLXEQINLYLKMEKKPNKKEQLXLVNNVLKLSXKLLKELDXPFRLYGLXMNPLIYNIXRVVILSAVSGVISDLLGFNIRLWKIKS

SEQ ID NO: 20043 - protein, 709 aa, Homo sapiens
  MOD_RES (31)..(31): Selenocysteine
  MOD_RES (87)..(87): Selenocysteine
  MOD_RES (95)..(95): Selenocysteine
  MOD_RES (98)..(98): Selenocysteine
  MOD_RES (115)..(115): Selenocysteine
  MOD_RES (137)..(137): Selenocysteine
  MOD_RES (150)..(150): Selenocysteine
  MOD_RES (167)..(167): Selenocysteine
  MOD_RES (169)..(169): Selenocysteine
  MOD_RES (194)..(194): Selenocysteine
  MOD_RES (232)..(232): Selenocysteine
  MOD_RES (270)..(272): Selenocysteine
  MOD_RES (319)..(319): Selenocysteine
  MOD_RES (325)..(325): Selenocysteine
  MOD_RES (344)..(344): Selenocysteine
  MOD_RES (354)..(354): Selenocysteine
  MOD_RES (359)..(359): Selenocysteine
  MOD_RES (431)..(431): Selenocysteine
  MOD_RES (462)..(462): Selenocysteine
  MOD_RES (471)..(471): Selenocysteine
  MOD_RES (488)..(488): Selenocysteine
  MOD_RES (501)..(501): Selenocysteine
  MOD_RES (516)..(516): Selenocysteine
  MOD_RES (567)..(567): Selenocysteine
  MOD_RES (584)..(584): Selenocysteine
  MOD_RES (599)..(599): Selenocysteine
  MOD_RES (615)..(615): Selenocysteine
  MOD_RES (627)..(627): Selenocysteine
  MOD_RES (647)..(647): Selenocysteine
  MOD_RES (657)..(657): Selenocysteine
  MOD_RES (665)..(665): Selenocysteine
  MOD_RES (673)..(673): Selenocysteine
  MOD_RES (682)..(682): Selenocysteine
MASNERDAISWYQKKIGAYDQQIWEKSIEQXQIKGLKNKPKKMGHIKPDLIDVDLIRVIAIVLYLMMPIVNISEVLGPLCLMLLMGXVHCQIVSXQIXRPSGNNGNRRRRKLRKXVNGDGSRENGNNSSDKVRGIEXLESVPIIGGFWEXIFGNRIKRVKLISNKGXEXDNDPSCVHPIIKRRQCRPEIRMWQXREKAKFSDGEKCRREAFRRLGNGVSDDLSSEEDGEARXQMILLRRSVEGASSDNGCEVKNRKSILSRHLNSQVKKXXXRWCHIVRDSDSLAESEFESAAFSQGSRSGVSGGSRSLNMSRRDSESXRHDSEXEDMLWDDLLHGPECRSSVXSDSEGAHVNXLHSGXKRDPKEDVFQQNHLFWLQNSSPSSDRVSAIIWEGNECKKMDMSVLEISGIIMSRVNAYQQGVGYQMLGNVVXIGLAFFPFLHRLFREKSLDQLKSISAEEILXLFCGAPPVXPIIVLSIINFFERLCLXWMFFFMMCVAERXYKQRFLFAKLFSHIXSARKARKYEIPHFRLKKVENIKIWLSLRSYLKRRGPQRSVDVVVSSVFLLXLSIAFICCAQVLQGHKXFLNDAYNWEFLIWEXALLLFLLRLASLGSEXNKKYSNVSILLXEQINLYLKMEKKPNKKEQLXLVNNVLKLSXKLLKELDXPFRLYGLXMNPLIYNIXRVVILSAVSGVISDLLGFNIRLWKIKS

SEQ ID NO: 20044 - protein, 331 aa, Homo sapiens
  MOD_RES (1)..(1): Any amino acid
  MOD_RES (3)..(3): Selenocysteine
  MOD_RES (41)..(41): Selenocysteine
  MOD_RES (79)..(81): Selenocysteine
  MOD_RES (128)..(128): Selenocysteine
  MOD_RES (134)..(134): Selenocysteine
  MOD_RES (153)..(153): Selenocysteine
  MOD_RES (163)..(163): Selenocysteine
  MOD_RES (168)..(168): Selenocysteine
  MOD_RES (240)..(240): Selenocysteine
  MOD_RES (271)..(271): Selenocysteine
  MOD_RES (280)..(280): Selenocysteine
  MOD_RES (297)..(297): Selenocysteine
  MOD_RES (310)..(310): Selenocysteine
XQXREKAKFSDGEKCRREAFRRLGNGVSDDLSSEEDGEARXQMILLRRSVEGASSDNGCEVKNRKSILSRHLNSQVKKXXXRWCHIVRDSDSLAESEFESAAFSQGSRSGVSGGSRSLNMSRRDSESXRHDSEXEDMLWDDLLHGPECRSSVXSDSEGAHVNXLHSGXKRDPKEDVFQQNHLFWLQNSSPSSDRVSAIIWEGNECKKMDMSVLEISGIIMSRVNAYQQGVGYQMLGNVVXIGLAFFPFLHRLFREKSLDQLKSISAEEILXLFCGAPPVXPIIVLSIINFFERLCLXWMFFFMMCVAERXYKQVSGEIRKIFYLFLYMIFH

SEQ ID NO: 20045 - protein, 2102 aa, Homo sapiens
  MOD_RES (34)..(34): Selenocysteine
  MOD_RES (117)..(117): Selenocysteine
  MOD_RES (137)..(137): Selenocysteine
  MOD_RES (244)..(244): Selenocysteine
  MOD_RES (250)..(250): Selenocysteine
  MOD_RES (255)..(255): Selenocysteine
  MOD_RES (293)..(293): Selenocysteine
  MOD_RES (303)..(303): Selenocysteine
  MOD_RES (318)..(318): Selenocysteine
  MOD_RES (367)..(367): Selenocysteine
  MOD_RES (376)..(376): Selenocysteine
  MOD_RES (384)..(384): Selenocysteine
  MOD_RES (393)..(393): Selenocysteine
  MOD_RES (409)..(409): Selenocysteine
  MOD_RES (470)..(470): Selenocysteine
  MOD_RES (504)..(504): Selenocysteine
  MOD_RES (530)..(530): Selenocysteine
  MOD_RES (541)..(541): Selenocysteine
  MOD_RES (548)..(548): Selenocysteine
  MOD_RES (582)..(582): Selenocysteine
  MOD_RES (616)..(616): Selenocysteine
  MOD_RES (630)..(630): Selenocysteine
  MOD_RES (666)..(666): Selenocysteine
  MOD_RES (694)..(694): Selenocysteine
  MOD_RES (778)..(778): Selenocysteine
  MOD_RES (828)..(828): Selenocysteine
  MOD_RES (834)..(834): Selenocysteine
  MOD_RES (855)..(855): Selenocysteine
  MOD_RES (857)..(857): Selenocysteine
  MOD_RES (867)..(867): Selenocysteine
  MOD_RES (891)..(891): Selenocysteine
  MOD_RES (908)..(908): Selenocysteine
  MOD_RES (957)..(957): Selenocysteine
  MOD_RES (1005)..(1005): Selenocysteine
  MOD_RES (1009)..(1009): Selenocysteine
  MOD_RES (1016)..(1016): Selenocysteine
  MOD_RES (1042)..(1042): Selenocysteine
  MOD_RES (1046)..(1046): Selenocysteine
  MOD_RES (1074)..(1074): Selenocysteine
  MOD_RES (1076)..(1076): Selenocysteine
  MOD_RES (1098)..(1098): Selenocysteine
  MOD_RES (1104)..(1104): Selenocysteine
  MOD_RES (1118)..(1119): Selenocysteine
  MOD_RES (1123)..(1123): Selenocysteine
  MOD_RES (1162)..(1163): Selenocysteine
  MOD_RES (1190)..(1190): Selenocysteine
  MOD_RES (1197)..(1197): Selenocysteine
  MOD_RES (1229)..(1229): Selenocysteine
  MOD_RES (1259)..(1259): Selenocysteine
  MOD_RES (1293)..(1293): Selenocysteine
  MOD_RES (1354)..(1354): Selenocysteine
  MOD_RES (1369)..(1369): Selenocysteine
  MOD_RES (1381)..(1381): Selenocysteine
  MOD_RES (1394)..(1394): Selenocysteine
  MOD_RES (1412)..(1412): Selenocysteine
  MOD_RES (1422)..(1422): Selenocysteine
  MOD_RES (1434)..(1434): Selenocysteine
  MOD_RES (1441)..(1441): Selenocysteine
  MOD_RES (1449)..(1449): Selenocysteine
  MOD_RES (1455)..(1455): Selenocysteine
  MOD_RES (1464)..(1464): Selenocysteine
  MOD_RES (1475)..(1475): Selenocysteine
  MOD_RES (1490)..(1490): Selenocysteine
  MOD_RES (1498)..(1498): Selenocysteine
  MOD_RES (1505)..(1505): Selenocysteine
  MOD_RES (1565)..(1565): Selenocysteine
  MOD_RES (1573)..(1573): Selenocysteine
  MOD_RES (1595)..(1595): Selenocysteine
  MOD_RES (1598)..(1598): Selenocysteine
  MOD_RES (1615)..(1615): Selenocysteine
  MOD_RES (1619)..(1619): Selenocysteine
  MOD_RES (1634)..(1634): Selenocysteine
  MOD_RES (1693)..(1693): Selenocysteine
  MOD_RES (1720)..(1720): Selenocysteine
  MOD_RES (1742)..(1742): Selenocysteine
  MOD_RES (1793)..(1793): Selenocysteine
  MOD_RES (1834)..(1834): Selenocysteine
  MOD_RES (1889)..(1889): Selenocysteine
  MOD_RES (1903)..(1903): Selenocysteine
  MOD_RES (1912)..(1912): Selenocysteine
  MOD_RES (1921)..(1921): Selenocysteine
  MOD_RES (1929)..(1929): Selenocysteine
  MOD_RES (1997)..(1997): Selenocysteine
  MOD_RES (2011)..(2011): Selenocysteine
  MOD_RES (2039)..(2039): Selenocysteine
  MOD_RES (2044)..(2044): Selenocysteine
  MOD_RES (2053)..(2053): Selenocysteine
  MOD_RES (2066)..(2066): Selenocysteine
  MOD_RES (2089)..(2089): Selenocysteine
MAAAPARGGGGGGGGGGGCSGSGSSASRGFYFNXVLSLARSLAVQRPASLEKVQKLLCMCPVDFHGIFQLDERRRDAVIALGIFLIESDLQHKDCVVPYLLRLLKGLPKVYWVEESXARKGRGALPVAESFSFCLVXLLSDVAYRDPSLRDEILEVLLQVLHVLLGMCQALEIQDKEYLCKYAIPCLIGISRAFGRYSNMEESLLSKLFPKIPPHSLRVLEELEGVRRRSFNDFRSILPSNLLXVCQEGXLKRKXSSVSSISQVSPERGMPPPSSPGGSAFHYFEASCLPDGXALEPEYYFSXISSSFSVSPLFNGVXYKEFNIPLEMLRELLNLVKKIVEEAVLKSLDAIVASVMEANPSADLYYXSFSDPLYLXMFKMLRDXLYYMKDLPXSFVKEIHDFVLEQFNXSQGELQKILHDADRIHNELSPLKLRCQANAACVDLMVWAVKDEQGAENLCIKLSEKLQSKXSSKVIIAHLPLLICCLQGLGRLCERFPVVVHSVXPSLRDFLVIPSPVLVKLYKYHSQYHXVAGNDIKISVXNEHSESXLNVMSGKKSQPSMYEQLRDIAIDNICRCLKAGLXVDPVIVEAFLASLSNRLYISQESDKDAHLIPDHXIRALGHIAVALRDXPKVMEPILQILQQKFCQPPSPLDVLIIDQLGCLVIXGNQYIYQEVWNLFQQISVKASSVVYSAXKDYKDHGYRHCSLAVINALANIAANIQDEHLVDELLMNLLELFVQLGLEGKRASERASEKGPALKASSSAGNLGVLIPVIAVLXRRLPPIKEAKPRLQKLFRDFWLYSVLMGFAVEGSGLWPEEWYEGVCEIAXKSPLLXFPSKEPLRSVLQYNSAMKNDXVXPAELSELRSXIINLLDPPPEVSALINKLDFAMSXYLLSVYRLEYMRVLRSXDPDRFQVMFCYFEDKAIQKDKSGMMQCVIAVADKVFDAFLNMMADKAKXKENEEELERHAQFLLVNFNHIHKRIRRVADKYLSGLVDKFPHLLWSGXVLKXMLDILQXLSLSLSADIHKDQPYYDIPDAPYRIXVPDXYEARESIVKDFAARCGMILQEAMKWAPXVXKSHLQEYLNKHQNWVSGLSQHXGLAMAXESILHFAGYNKQNXXLGAXQLSERPACVKKDYSNFMASLNLRNRYAGEVYGMIRFSGXXGQMSDLNKMMVQDLHSALDRSHPQHYXQAMFKLXAMLISSKDCDPQLLHHLCWGPLRMFNEHGMEXALACWEWLLAGKDGVEVPFMREMAGAWHMXVEQKFGLFSAEIKEADPLAASEASQPKPCPPEVXPHYIWIDFLVQRFEIAKYCSSDQVEIFSSLLQRSMSLNIGGAKGSMNRHVAAIGPRFKLLXLGLSLLHADVVPNAXIRNVLREKIYSXAFDYFSCPPKFPXQGEKRLREDISIMIKFWXAMFSDKKYLXASQLVPPDNQDXRSNLDIXVGSRQQAXQGWINXYPLSSGMSXISKKSGMSKKXNRGSQLHKYYMKRRXLLLSLLAXEIERLIXWYNPLSAPELELDQAGENSVANWRSKYISLSEKQWKDNVNLAWSISPYLAVQLPARFKNXEAIGNEVXRLVRLDPGAVSDVPEAIKFLVXWHXIDADAPELSHVLCWAPXDPPXGLSYFSSMYPPHPLXAQYGVKVLRSFPPDAILFYIPQIVQALRYDKMGYVREYILWAASKSQLLAHQFIWNMKXNIYLDEEGHQKDPDIGDLLDQLVEEIXGSLSGPAKDFYQREFDFFNKIXNVSAIIKPYPKGDERKKACLSALSEVKVQPGCYLPSNPEAIVLDIDYKSGXPMQSAAKAPYLAKFKVKRCGVSELEKEGLRCRSDSEDECSXQEADGQKISWQAAIFKVGDDCRQDMLALQIIDLFKNIFQLVGLDLFVFPYRVVAXAPGCGVIECIPDCXSRDQLGRQXDFGMYDYFXRQYGDESXLAFQQARYNFIRSMAAYSLLLFLLQIKDRHNGNIMLDKKGHIIHIDFGFMFESSPGGNLGWEPDIKLXDEMVMIMGGKMEAXPFKWFMEMCVRGYLAVRPYMDAVVSLVXLMLDXGLPCFRGQXIKLLKHRFSPNMXEREAANFIMKVIQSCFLSNRSRXYDMIQYYQNDIPY

SEQ ID NO: 20046 - protein, 87 aa, Homo sapiens
  MOD_RES (59)..(59): Selenocysteine
  MOD_RES (79)..(79): Selenocysteine
MCPVDFHGIFQLDERRRDAVIALGIFLIESDLQHKDCVVPYLLRLLKGLPKVYWVEESXARKGRGALPVAESFSFCLVXLLSDVAYR

SEQ ID NO: 20047 - protein, 435 aa, Homo sapiens
  MOD_RES (28)..(28): Selenocysteine
  MOD_RES (55)..(55): Selenocysteine
  MOD_RES (77)..(77): Selenocysteine
  MOD_RES (128)..(128): Selenocysteine
  MOD_RES (169)..(169): Selenocysteine
  MOD_RES (224)..(224): Selenocysteine
  MOD_RES (238)..(238): Selenocysteine
  MOD_RES (247)..(247): Selenocysteine
  MOD_RES (256)..(256): Selenocysteine
  MOD_RES (330)..(330): Selenocysteine
  MOD_RES (344)..(344): Selenocysteine
  MOD_RES (372)..(372): Selenocysteine
  MOD_RES (377)..(377): Selenocysteine
  MOD_RES (386)..(386): Selenocysteine
  MOD_RES (399)..(399): Selenocysteine
  MOD_RES (422)..(422): Selenocysteine
MGYVREYILWAASKSQLLAHQFIWNMKXNIYLDEEGHQKDPDIGDLLDQLVEEIXGSLSGPAKDFYQREFDFFNKIXNVSAIIKPYPKGDERKKACLSALSEVKVQPGCYLPSNPEAIVLDIDYKSGXPMQSAAKAPYLAKFKVKRCGVSELEKEGLRCRSDSEDECSXQEADGQKISWQAAIFKVGDDCRQDMLALQIIDLFKNIFQLVGLDLFVFPYRVVAXAPGCGVIECIPDCXSRDQLGRQXDFGMYDYFXRQYGDEALSAQARYNFIRSMAAYSLLLFLLQIKDRHNGNIMLDKKGHIIHIDFGFMFESSPGGNLGWEPDIKLXDEMVMIMGGKMEAXPFKWFMEMCVRGYLAVRPYMDAVVSLVXLMLDXGLPCFRGQXIKLLKHRFSPNMXEREAANFIMKVIQSCFLSNRSRXYDMIQYYQNDIPY

SEQ ID NO: 20048 - protein, 227 aa, Homo sapiens
  MOD_RES (32)..(33): Selenocysteine
  MOD_RES (95)..(95): Selenocysteine
  MOD_RES (101)..(102): Selenocysteine
  MOD_RES (162)..(162): Selenocysteine
  MOD_RES (179)..(179): Selenocysteine
  MOD_RES (192)..(192): Selenocysteine
  MOD_RES (212)..(213): Selenocysteine
  MOD_RES (223)..(223): Selenocysteine
EPVVNAVSIHQVKKQSQLSLLDYFLQEHGSYXXEAFLSAQRNFVQSCAGYCLVCYLLQVKDRHNGNILLDAEGHIIHIDFGFILSSSPRNLGFEXSAFKLXXEFVDVMGGLDGDMFNYYKMLMLQGLIAARKHMDKVVQIVEIMQQGCRRCSGSSPSGPMMXVAQVICSQLPCFHGSSXIRNLKERFHMSMXEEQLQLLVEQMVDGSMRSIXXKLYDGFQYLXNGIM

SEQ ID NO: 20049 - protein, 95 aa, Homo sapiens
  MOD_RES (9)..(9): Selenocysteine
  MOD_RES (12)..(12): Selenocysteine
  MOD_RES (17)..(17): Selenocysteine
  MOD_RES (39)..(39): Selenocysteine
  MOD_RES (52)..(52): Selenocysteine
  MOD_RES (79)..(80): Selenocysteine
  MOD_RES (94)..(94): Selenocysteine
MAIGKRLAXLPXKEQKXQRLISELSLLNHKLPARVWLPXAGFDHHVVRVPHXQAVVLNSKDKAPYLIYVEVLECENFDXXSVPARIPENRIRSXR

SEQ ID NO: 20050 - protein, 191 aa, Homo sapiens
  MOD_RES (9)..(9): Selenocysteine
  MOD_RES (12)..(12): Selenocysteine
  MOD_RES (17)..(17): Selenocysteine
  MOD_RES (39)..(39): Selenocysteine
  MOD_RES (52)..(52): Selenocysteine
  MOD_RES (79)..(80): Selenocysteine
  MOD_RES (94)..(94): Selenocysteine
  MOD_RES (106)..(106): Selenocysteine
  MOD_RES (116)..(116): Selenocysteine
  MOD_RES (144)..(144): Selenocysteine
  MOD_RES (159)..(159): Selenocysteine
  MOD_RES (185)..(185): Selenocysteine
  MOD_RES (187)..(187): Selenocysteine
MAIGKRLAXLPXKEQKXQRLISELSLLNHKLPARVWLPXAGFDHHVVRVPHXQAVVLNSKDKAPYLIYVEVLECENFDXXSVPARIPENRIRSXRSVENLPECGIXHEQRAGSFSXVPNYDNDDEAWSVDDIGELQVELPEVHXNSCDNISQFSVDSIXSQESKEPVFIAAGDIRRRLSEQLAHXPXAFKR

SEQ ID NO: 20051 - protein, 484 aa, Homo sapiens
  MOD_RES (9)..(9): Selenocysteine
  MOD_RES (12)..(12): Selenocysteine
  MOD_RES (17)..(17): Selenocysteine
  MOD_RES (39)..(39): Selenocysteine
  MOD_RES (52)..(52): Selenocysteine
  MOD_RES (79)..(80): Selenocysteine
  MOD_RES (94)..(94): Selenocysteine
  MOD_RES (106)..(106): Selenocysteine
  MOD_RES (116)..(116): Selenocysteine
  MOD_RES (144)..(144): Selenocysteine
  MOD_RES (159)..(159): Selenocysteine
  MOD_RES (185)..(185): Selenocysteine
  MOD_RES (187)..(187): Selenocysteine
  MOD_RES (310)..(311): Selenocysteine
  MOD_RES (373)..(373): Selenocysteine
  MOD_RES (379)..(380): Selenocysteine
  MOD_RES (436)..(436): Selenocysteine
  MOD_RES (449)..(449): Selenocysteine
  MOD_RES (469)..(470): Selenocysteine
  MOD_RES (480)..(480): Selenocysteine
MAIGKRLAXLPXKEQKXQRLISELSLLNHKLPARVWLPXAGFDHHVVRVPHXQAVVLNSKDKAPYLIYVEVLECENFDXXSVPARIPENRIRSXRSVENLPECGIXHEQRAGSFSXVPNYDNDDEAWSVDDIGELQVELPEVHXNSCDNISQFSVDSIXSQESKEPVFIAAGDIRRRLSEQLAHXPXAFKRDPEDPSAVALKEPWQEKVRRIREGSPYGHLPNWRLLSVIVKCGDDLRQELLAFQVLKQLQSIWEQERVPLWIKPYKILVISADSGMIEPVVNAVSIHQVKKQSQLSLLDYFLQEHGSYXXEAFLSAQRNFVQSCAGYCLVCYLLQVKDRHNGNILLDAEGHIIHIDFGFILSSSPRNLGFEXSAFKLXXEFVDVMGGLDGDMFNYYKMLMLQGLIAARKHMDKVVQIVEIMQQGSQLPCFHGSSXIRNLKERFHMSMXEEQLQLLVEQMVDGSMRSIXXKLYDGFQYLXNGIM

SEQ ID NO: 20052 - protein, 281 aa, Homo sapiens
  MOD_RES (4)..(4): Selenocysteine
  MOD_RES (14)..(14): Selenocysteine
  MOD_RES (18)..(18): Selenocysteine
  MOD_RES (34)..(34): Selenocysteine
  MOD_RES (73)..(73): Selenocysteine
  MOD_RES (112)..(112): Selenocysteine
  MOD_RES (227)..(227): Selenocysteine
  MOD_RES (234)..(234): Selenocysteine
  MOD_RES (263)..(263): Selenocysteine
  MOD_RES (271)..(271): Selenocysteine
  MOD_RES (280)..(280): Selenocysteine
MGDXVVEPAPLKPXSEPXSGPPGNNGGSLLSVIXEGVGELSVIDPEVAQKACQEVLEKVKLLHGGVAVSSRGXPLELVNGDGVDSEIRCLDDPPAQIREEEDEMGAAVASGXAKGARRRRQNNSAKQSWLLRLFESKLFDISMAISYLYNSKEPGVQAYIGNRLFCFRNEDVDFYLPQLLNMYIHMDEDVGDAIKPYIVHRCRQSINFSLQCALLLGAYSSDMHISXQRHSRGXKLRKLILSDELKPAHRKRELPSLSPAPDXGLSPSKRXHQRSKSDAXA

SEQ ID NO: 20053 - protein, 801 aa, Homo sapiens
  MOD_RES (4)..(4): Selenocysteine
  MOD_RES (14)..(14): Selenocysteine
  MOD_RES (18)..(18): Selenocysteine
  MOD_RES (34)..(34): Selenocysteine
  MOD_RES (73)..(73): Selenocysteine
  MOD_RES (112)..(112): Selenocysteine
  MOD_RES (227)..(227): Selenocysteine
  MOD_RES (234)..(234): Selenocysteine
  MOD_RES (263)..(263): Selenocysteine
  MOD_RES (271)..(271): Selenocysteine
  MOD_RES (280)..(280): Selenocysteine
  MOD_RES (292)..(292): Selenocysteine
  MOD_RES (326)..(326): Selenocysteine
  MOD_RES (329)..(329): Selenocysteine
  MOD_RES (334)..(334): Selenocysteine
  MOD_RES (356)..(356): Selenocysteine
  MOD_RES (369)..(369): Selenocysteine
  MOD_RES (396)..(397): Selenocysteine
  MOD_RES (411)..(411): Selenocysteine
  MOD_RES (423)..(423): Selenocysteine
  MOD_RES (433)..(433): Selenocysteine
  MOD_RES (461)..(461): Selenocysteine
  MOD_RES (476)..(476): Selenocysteine
  MOD_RES (502)..(502): Selenocysteine
  MOD_RES (504)..(504): Selenocysteine
  MOD_RES (627)..(628): Selenocysteine
  MOD_RES (690)..(690): Selenocysteine
  MOD_RES (696)..(697): Selenocysteine
  MOD_RES (753)..(753): Selenocysteine
  MOD_RES (766)..(766): Selenocysteine
  MOD_RES (786)..(787): Selenocysteine
  MOD_RES (797)..(797): Selenocysteine
MGDXVVEPAPLKPXSEPXSGPPGNNGGSLLSVIXEGVGELSVIDPEVAQKACQEVLEKVKLLHGGVAVSSRGXPLELVNGDGVDSEIRCLDDPPAQIREEEDEMGAAVASGXAKGARRRRQNNSAKQSWLLRLFESKLFDISMAISYLYNSKEPGVQAYIGNRLFCFRNEDVDFYLPQLLNMYIHMDEDVGDAIKPYIVHRCRQSINFSLQCALLLGAYSSDMHISXQRHSRGXKLRKLILSDELKPAHRKRELPSLSPAPDXGLSPSKRXHQRSKSDAXASISLSSNLKRXASNPKVENEDEPVRLAPEREFIKSLMAIGKRLAXLPXKEQKXQRLISELSLLNHKLPARVWLPXAGFDHHVVRVPHXQAVVLNSKDKAPYLIYVEVLECENFDXXSVPARIPENRIRSXRSVENLPECGIXHEQRAGSFSXVPNYDNDDEAWSVDDIGELQVELPEVHXNSCDNISQFSVDSIXSQESKEPVFIAAGDIRRRLSEQLAHXPXAFKRDPEDPSAVALKEPWQEKVRRIREGSPYGHLPNWRLLSVIVKCGDDLRQELLAFQVLKQLQSIWEQERVPLWIKPYKILVISADSGMIEPVVNAVSIHQVKKQSQLSLLDYFLQEHGSYXXEAFLSAQRNFVQSCAGYCLVCYLLQVKDRHNGNILLDAEGHIIHIDFGFILSSSPRNLGFEXSAFKLXXEFVDVMGGLDGDMFNYYKMLMLQGLIAARKHMDKVVQIVEIMQQGSQLPCFHGSSXIRNLKERFHMSMXEEQLQLLVEQMVDGSMRSIXXKLYDGFQYLXNGIM

SEQ ID NO: 20054 - protein, 816 aa, Homo sapiens
  MOD_RES (4)..(4): Selenocysteine
  MOD_RES (14)..(14): Selenocysteine
  MOD_RES (18)..(18): Selenocysteine
  MOD_RES (34)..(34): Selenocysteine
  MOD_RES (73)..(73): Selenocysteine
  MOD_RES (112)..(112): Selenocysteine
  MOD_RES (227)..(227): Selenocysteine
  MOD_RES (234)..(234): Selenocysteine
  MOD_RES (263)..(263): Selenocysteine
  MOD_RES (271)..(271): Selenocysteine
  MOD_RES (280)..(280): Selenocysteine
  MOD_RES (292)..(292): Selenocysteine
  MOD_RES (309)..(309): Selenocysteine
  MOD_RES (341)..(341): Selenocysteine
  MOD_RES (344)..(344): Selenocysteine
  MOD_RES (349)..(349): Selenocysteine
  MOD_RES (371)..(371): Selenocysteine
  MOD_RES (384)..(384): Selenocysteine
  MOD_RES (411)..(412): Selenocysteine
  MOD_RES (426)..(426): Selenocysteine
  MOD_RES (438)..(438): Selenocysteine
  MOD_RES (448)..(448): Selenocysteine
  MOD_RES (476)..(476): Selenocysteine
  MOD_RES (491)..(491): Selenocysteine
  MOD_RES (517)..(517): Selenocysteine
  MOD_RES (519)..(519): Selenocysteine
  MOD_RES (642)..(643): Selenocysteine
  MOD_RES (705)..(705): Selenocysteine
  MOD_RES (711)..(712): Selenocysteine
  MOD_RES (768)..(768): Selenocysteine
  MOD_RES (781)..(781): Selenocysteine
  MOD_RES (801)..(802): Selenocysteine
  MOD_RES (812)..(812): Selenocysteine
MGDXVVEPAPLKPXSEPXSGPPGNNGGSLLSVIXEGVGELSVIDPEVAQKACQEVLEKVKLLHGGVAVSSRGXPLELVNGDGVDSEIRCLDDPPAQIREEEDEMGAAVASGXAKGARRRRQNNSAKQSWLLRLFESKLFDISMAISYLYNSKEPGVQAYIGNRLFCFRNEDVDFYLPQLLNMYIHMDEDVGDAIKPYIVHRCRQSINFSLQCALLLGAYSSDMHISXQRHSRGXKLRKLILSDELKPAHRKRELPSLSPAPDXGLSPSKRXHQRSKSDAXASISLSSNLKRXASNPKVENEDEELSSSXESIDNSFSSPVRLAPEREFIKSLMAIGKRLAXLPXKEQKXQRLISELSLLNHKLPARVWLPXAGFDHHVVRVPHXQAVVLNSKDKAPYLIYVEVLECENFDXXSVPARIPENRIRSXRSVENLPECGIXHEQRAGSFSXVPNYDNDDEAWSVDDIGELQVELPEVHXNSCDNISQFSVDSIXSQESKEPVFIAAGDIRRRLSEQLAHXPXAFKRDPEDPSAVALKEPWQEKVRRIREGSPYGHLPNWRLLSVIVKCGDDLRQELLAFQVLKQLQSIWEQERVPLWIKPYKILVISADSGMIEPVVNAVSIHQVKKQSQLSLLDYFLQEHGSYXXEAFLSAQRNFVQSCAGYCLVCYLLQVKDRHNGNILLDAEGHIIHIDFGFILSSSPRNLGFEXSAFKLXXEFVDVMGGLDGDMFNYYKMLMLQGLIAARKHMDKVVQIVEIMQQGSQLPCFHGSSXIRNLKERFHMSMXEEQLQLLVEQMVDGSMRSIXXKLYDGFQYLXNGIM

SEQ ID NO: 20055 - protein, 828 aa, Homo sapiens
  MOD_RES (16)..(16): Selenocysteine
  MOD_RES (26)..(26): Selenocysteine
  MOD_RES (30)..(30): Selenocysteine
  MOD_RES (46)..(46): Selenocysteine
  MOD_RES (85)..(85): Selenocysteine
  MOD_RES (124)..(124): Selenocysteine
  MOD_RES (239)..(239): Selenocysteine
  MOD_RES (246)..(246): Selenocysteine
  MOD_RES (275)..(275): Selenocysteine
  MOD_RES (283)..(283): Selenocysteine
  MOD_RES (292)..(292): Selenocysteine
  MOD_RES (304)..(304): Selenocysteine
  MOD_RES (321)..(321): Selenocysteine
  MOD_RES (353)..(353): Selenocysteine
  MOD_RES (356)..(356): Selenocysteine
  MOD_RES (361)..(361): Selenocysteine
  MOD_RES (383)..(383): Selenocysteine
  MOD_RES (396)..(396): Selenocysteine
  MOD_RES (423)..(424): Selenocysteine
  MOD_RES (438)..(438): Selenocysteine
  MOD_RES (450)..(450): Selenocysteine
  MOD_RES (460)..(460): Selenocysteine
  MOD_RES (488)..(488): Selenocysteine
  MOD_RES (503)..(503): Selenocysteine
  MOD_RES (529)..(529): Selenocysteine
  MOD_RES (531)..(531): Selenocysteine
  MOD_RES (654)..(655): Selenocysteine
  MOD_RES (717)..(717): Selenocysteine
  MOD_RES (723)..(724): Selenocysteine
  MOD_RES (780)..(780): Selenocysteine
  MOD_RES (793)..(793): Selenocysteine
  MOD_RES (813)..(814): Selenocysteine
  MOD_RES (824)..(824): Selenocysteine
MRFLEARSLAVAMGDXVVEPAPLKPXSEPXSGPPGNNGGSLLSVIXEGVGELSVIDPEVAQKACQEVLEKVKLLHGGVAVSSRGXPLELVNGDGVDSEIRCLDDPPAQIREEEDEMGAAVASGXAKGARRRRQNNSAKQSWLLRLFESKLFDISMAISYLYNSKEPGVQAYIGNRLFCFRNEDVDFYLPQLLNMYIHMDEDVGDAIKPYIVHRCRQSINFSLQCALLLGAYSSDMHISXQRHSRGXKLRKLILSDELKPAHRKRELPSLSPAPDXGLSPSKRXHQRSKSDAXASISLSSNLKRXASNPKVENEDEELSSSXESIDNSFSSPVRLAPEREFIKSLMAIGKRLAXLPXKEQKXQRLISELSLLNHKLPARVWLPXAGFDHHVVRVPHXQAVVLNSKDKAPYLIYVEVLECENFDXXSVPARIPENRIRSXRSVENLPECGIXHEQRAGSFSXVPNYDNDDEAWSVDDIGELQVELPEVHXNSCDNISQFSVDSIXSQESKEPVFIAAGDIRRRLSEQLAHXPXAFKRDPEDPSAVALKEPWQEKVRRIREGSPYGHLPNWRLLSVIVKCGDDLRQELLAFQVLKQLQSIWEQERVPLWIKPYKILVISADSGMIEPVVNAVSIHQVKKQSQLSLLDYFLQEHGSYXXEAFLSAQRNFVQSCAGYCLVCYLLQVKDRHNGNILLDAEGHIIHIDFGFILSSSPRNLGFEXSAFKLXXEFVDVMGGLDGDMFNYYKMLMLQGLIAARKHMDKVVQIVEIMQQGSQLPCFHGSSXIRNLKERFHMSMXEEQLQLLVEQMVDGSMRSIXXKLYDGFQYLXNGIM

SEQ ID NO: 20056 - protein, 183 aa, Homo sapiens
  MOD_RES (46)..(47): Selenocysteine
  MOD_RES (109)..(109): Selenocysteine
  MOD_RES (115)..(116): Selenocysteine
PYKILVISADSGMIEPVVNAVSIHQVKKQSQLSLLDYFLQEHGSYXXEAFLSAQRNFVQSCAGYCLVCYLLQVKDRHNGNILLDAEGHIIHIDFGFILSSSPRNLGFEXSAFKLXXEFVDVMGGLDGDMFNYYKMLMLQGLIAARKHMDKVVQIVEIMQQGGAGVRSGAIVPQASPLSRSPGA

SEQ ID NO: 20057 - protein, 73 aa, Homo sapiens
  MOD_RES (1)..(1): Any amino acid
  MOD_RES (11)..(11): Selenocysteine
  MOD_RES (17)..(18): Selenocysteine
  MOD_RES (67)..(67): Selenocysteine
  MOD_RES (73)..(73): Selenocysteine
XSSPRNLGFEXSAFKLXXEFVDVMGGLDGDMFNYYKMLMLQGLIAARKHMDKVLSFLASMAPAPFEXSKRGSX

SEQ ID NO: 20058 - protein, 20 aa, Homo sapiens
MADSAELKEEEWERRSPSAF

SEQ ID NO: 20059 - protein, 160 aa, Homo sapiens
  MOD_RES (39)..(39): Selenocysteine
  MOD_RES (71)..(71): Selenocysteine
  MOD_RES (88)..(88): Selenocysteine
  MOD_RES (93)..(93): Selenocysteine
  MOD_RES (98)..(98): Selenocysteine
  MOD_RES (126)..(126): Selenocysteine
  MOD_RES (154)..(154): Selenocysteine
MADSAELKQMVMSLRVSELQVLLGYAGRNKHGRKHELLXKALHLLKAGCSPAVQMKIKELYRRRFPQKIMXPADLSIPNVHSSPMPAXLSPSXIPQLXYDGHPASSPLLPVSLLGPKHELELPHLXSALHPVHPDIKLQKLPFYDLLDELIKPXSLAEII

SEQ ID NO: 20060 - protein, 651 aa, Homo sapiens
  MOD_RES (39)..(39): Selenocysteine
  MOD_RES (71)..(71): Selenocysteine
  MOD_RES (88)..(88): Selenocysteine
  MOD_RES (93)..(93): Selenocysteine
  MOD_RES (98)..(98): Selenocysteine
  MOD_RES (126)..(126): Selenocysteine
  MOD_RES (154)..(154): Selenocysteine
  MOD_RES (167)..(167): Selenocysteine
  MOD_RES (174)..(174): Selenocysteine
  MOD_RES (190)..(190): Selenocysteine
  MOD_RES (195)..(195): Selenocysteine
  MOD_RES (207)..(207): Selenocysteine
  MOD_RES (225)..(225): Selenocysteine
  MOD_RES (237)..(237): Selenocysteine
  MOD_RES (253)..(253): Selenocysteine
  MOD_RES (260)..(261): Selenocysteine
  MOD_RES (265)..(265): Selenocysteine
  MOD_RES (271)..(271): Selenocysteine
  MOD_RES (291)..(291): Selenocysteine
  MOD_RES (317)..(317): Selenocysteine
  MOD_RES (326)..(327): Selenocysteine
  MOD_RES (343)..(343): Selenocysteine
  MOD_RES (350)..(350): Selenocysteine
  MOD_RES (360)..(360): Selenocysteine
  MOD_RES (371)..(371): Selenocysteine
  MOD_RES (400)..(400): Selenocysteine
  MOD_RES (412)..(412): Selenocysteine
  MOD_RES (439)..(439): Selenocysteine
  MOD_RES (463)..(463): Selenocysteine
  MOD_RES (480)..(480): Selenocysteine
  MOD_RES (487)..(487): Selenocysteine
  MOD_RES (508)..(508): Selenocysteine
  MOD_RES (516)..(516): Selenocysteine
  MOD_RES (521)..(521): Selenocysteine
  MOD_RES (534)..(534): Selenocysteine
  MOD_RES (558)..(558): Selenocysteine
  MOD_RES (584)..(584): Selenocysteine
  MOD_RES (599)..(599): Selenocysteine
  MOD_RES (603)..(604): Selenocysteine
  MOD_RES (628)..(628): Selenocysteine
  MOD_RES (630)..(630): Selenocysteine
  MOD_RES (635)..(635): Selenocysteine
  MOD_RES (637)..(637): Selenocysteine
MADSAELKQMVMSLRVSELQVLLGYAGRNKHGRKHELLXKALHLLKAGCSPAVQMKIKELYRRRFPQKIMXPADLSIPNVHSSPMPAXLSPSXIPQLXYDGHPASSPLLPVSLLGPKHELELPHLXSALHPVHPDIKLQKLPFYDLLDELIKPXSLASDNSQRFREXCFAFALXPQQVQQISSSMDISGXKCDFXVQVQLRFCLSEXSCPQEDHFPPNLCVKVNXKPCSLPGYLPPXKNGVEPKRPSRPINIXSLVRLSXXVPNXIVVSWXAEIGRNYSMAVYLVKQLSSXVLLQRLRAKGIRNPDHSRALIKEKLXADPDSEIAXXSLRVSLLCPLGKMRLXIPCRALXCSHLQCFDAXLYIQMNEKKPXWVCPVCDKKAPYEHLIIDGLFMEILKYCXDCDEIQFKEDGXWAPMRSKKEVQEVSASYNGVDGCLSSXLEHQVASHHQSSNKNKKVEVIDLXIDSSSDEEEEEPSAKRXCPSLSPXSPLNNKGILSLPHQASPVSRXPSLPAVDXSYINXSLIQDYRHPFHMXPMPYDLQGLDFFPFLSGDNQHYNXSLLAAAAAAVSDDQDLLHSSRFFPYXSSQMFLDQLSAGGSXSLPXXNGSSSGSNSSLVSSNSLRESHSHXVXNRSSXDXASIFGIIPDIISLD

SEQ ID NO: 20061 - protein, 653 aa, Homo sapiens
  MOD_RES (3)..(3): Selenocysteine
  MOD_RES (41)..(41): Selenocysteine
  MOD_RES (73)..(73): Selenocysteine
  MOD_RES (90)..(90): Selenocysteine
  MOD_RES (95)..(95): Selenocysteine
  MOD_RES (100)..(100): Selenocysteine
  MOD_RES (128)..(128): Selenocysteine
  MOD_RES (156)..(156): Selenocysteine
  MOD_RES (169)..(169): Selenocysteine
  MOD_RES (176)..(176): Selenocysteine
  MOD_RES (192)..(192): Selenocysteine
  MOD_RES (197)..(197): Selenocysteine
  MOD_RES (209)..(209): Selenocysteine
  MOD_RES (227)..(227): Selenocysteine
  MOD_RES (239)..(239): Selenocysteine
  MOD_RES (255)..(255): Selenocysteine
  MOD_RES (262)..(263): Selenocysteine
  MOD_RES (267)..(267): Selenocysteine
  MOD_RES (273)..(273): Selenocysteine
  MOD_RES (293)..(293): Selenocysteine
  MOD_RES (319)..(319): Selenocysteine
  MOD_RES (328)..(329): Selenocysteine
  MOD_RES (345)..(345): Selenocysteine
  MOD_RES (352)..(352): Selenocysteine
  MOD_RES (362)..(362): Selenocysteine
  MOD_RES (373)..(373): Selenocysteine
  MOD_RES (402)..(402): Selenocysteine
  MOD_RES (414)..(414): Selenocysteine
  MOD_RES (441)..(441): Selenocysteine
  MOD_RES (465)..(465): Selenocysteine
  MOD_RES (482)..(482): Selenocysteine
  MOD_RES (489)..(489): Selenocysteine
  MOD_RES (510)..(510): Selenocysteine
  MOD_RES (518)..(518): Selenocysteine
  MOD_RES (523)..(523): Selenocysteine
  MOD_RES (536)..(536): Selenocysteine
  MOD_RES (560)..(560): Selenocysteine
  MOD_RES (586)..(586): Selenocysteine
  MOD_RES (601)..(601): Selenocysteine
  MOD_RES (605)..(606): Selenocysteine
  MOD_RES (630)..(630): Selenocysteine
  MOD_RES (632)..(632): Selenocysteine
  MOD_RES (637)..(637): Selenocysteine
  MOD_RES (639)..(639): Selenocysteine
MFXLQDSYVKQMVMSLRVSELQVLLGYAGRNKHGRKHELLXKALHLLKAGCSPAVQMKIKELYRRRFPQKIMXPADLSIPNVHSSPMPAXLSPSXIPQLXYDGHPASSPLLPVSLLGPKHELELPHLXSALHPVHPDIKLQKLPFYDLLDELIKPXSLASDNSQRFREXCFAFALXPQQVQQISSSMDISGXKCDFXVQVQLRFCLSEXSCPQEDHFPPNLCVKVNXKPCSLPGYLPPXKNGVEPKRPSRPINIXSLVRLSXXVPNXIVVSWXAEIGRNYSMAVYLVKQLSSXVLLQRLRAKGIRNPDHSRALIKEKLXADPDSEIAXXSLRVSLLCPLGKMRLXIPCRALXCSHLQCFDAXLYIQMNEKKPXWVCPVCDKKAPYEHLIIDGLFMEILKYCXDCDEIQFKEDGXWAPMRSKKEVQEVSASYNGVDGCLSSXLEHQVASHHQSSNKNKKVEVIDLXIDSSSDEEEEEPSAKRXCPSLSPXSPLNNKGILSLPHQASPVSRXPSLPAVDXSYINXSLIQDYRHPFHMXPMPYDLQGLDFFPFLSGDNQHYNXSLLAAAAAAVSDDQDLLHSSRFFPYXSSQMFLDQLSAGGSXSLPXXNGSSSGSNSSLVSSNSLRESHSHXVXNRSSXDXASIFGIIPDIISLD

SEQ ID NO: 20062 - protein, 64 aa, Homo sapiens
  MOD_RES (1)..(1): Any amino acid
  MOD_RES (15)..(15): Selenocysteine
  MOD_RES (23)..(23): Selenocysteine
  MOD_RES (28)..(28): Selenocysteine
  MOD_RES (41)..(41): Selenocysteine
XILSLPHQASPVSRXPSLPAVDXSYINXSLIQDYRHPFHMXPMPYDLQALQHLLACRCSSSSFR

SEQ ID NO: 20063 - protein, 536 aa, Homo sapiens
  MOD_RES (10)..(10): Selenocysteine
  MOD_RES (97)..(97): Selenocysteine
  MOD_RES (106)..(106): Selenocysteine
  MOD_RES (136)..(136): Selenocysteine
  MOD_RES (139)..(139): Selenocysteine
  MOD_RES (155)..(155): Selenocysteine
  MOD_RES (158)..(158): Selenocysteine
  MOD_RES (193)..(193): Selenocysteine
  MOD_RES (213)..(213): Selenocysteine
  MOD_RES (235)..(235): Selenocysteine
  MOD_RES (247)..(247): Selenocysteine
  MOD_RES (293)..(293): Selenocysteine
  MOD_RES (329)..(329): Selenocysteine
  MOD_RES (357)..(357): Selenocysteine
  MOD_RES (366)..(367): Selenocysteine
  MOD_RES (383)..(383): Selenocysteine
  MOD_RES (390)..(390): Selenocysteine
  MOD_RES (392)..(392): Selenocysteine
  MOD_RES (411)..(411): Selenocysteine
  MOD_RES (471)..(471): Selenocysteine
  MOD_RES (486)..(486): Selenocysteine
  MOD_RES (502)..(502): Selenocysteine
  MOD_RES (525)..(525): Selenocysteine
  MOD_RES (530)..(530): Selenocysteine
HMAVPFYIPXSNVWSDPVSQHPRQHLVLSVFFILAILNMVSSFRVSELQVLLGFAGRNKSGRKHDLLMRALHLLKSGCSPAVQIKIRELYRRRYPRXLEGLSDLSXIKSSVFSLDGGSSPVEPDLAVAGIHSLPSXSVXPHSPSSPVGSVLLQDXKPXFEMQQPSPPIPPVHPDVQLKNLPFYDVLDVLIKPXSLVQSSIQRFQEKFFIFALXPQQVREICISRDFLPGGRRDYXVQVQLRLCLAEXSCPQEDNYPNSLCIKVNGKLFPLPGYAPPPKNGIEQKRPGRPLNIXSLVRLSSAVPNQISISWASEIGKNYSMSVYLVRQLXSAMLLQRLKMKGIRNPDHSRALIKEKLXADPDSEIAXXSLRVSLMCPLGKMRLXIPCRAVXCXHLQCFDAALYLQMNEKKPXWICPVCDKKAAYESLILDGLFMEILNDCSDVDEIKFQEDGSWCPMRPKKEAMKVSSQPCXKIESSSVLSKPCSVXVASEASKKKVDVIDLXIESSSDEEEDPPAKRKCIFMSEXQSSPXKGFVNL

SEQ ID NO: 20064 - protein, 182 aa, Homo sapiens
  MOD_RES (68)..(68): Selenocysteine
  MOD_RES (77)..(77): Selenocysteine
  MOD_RES (107)..(107): Selenocysteine
  MOD_RES (110)..(110): Selenocysteine
  MOD_RES (126)..(126): Selenocysteine
  MOD_RES (129)..(129): Selenocysteine
  MOD_RES (164)..(164): Selenocysteine
MADFEELRNMVSSFRVSELQVLLGFAGRNKSGRKHDLLMRALHLLKSGCSPAVQIKIRELYRRRYPRXLEGLSDLSXIKSSVFSLDGGSSPVEPDLAVAGIHSLPSXSVXPHSPSSPVGSVLLQDXKPXFEMQQPSPPIPPVHPDVQLKNLPFYDVLDVLIKPXSLGIFCQVVGEIIQSKFS

SEQ ID NO: 20065 - protein, 572 aa, Homo sapiens
  MOD_RES (68)..(68): Selenocysteine
  MOD_RES (77)..(77): Selenocysteine
  MOD_RES (107)..(107): Selenocysteine
  MOD_RES (110)..(110): Selenocysteine
  MOD_RES (126)..(126): Selenocysteine
  MOD_RES (129)..(129): Selenocysteine
  MOD_RES (164)..(164): Selenocysteine
  MOD_RES (184)..(184): Selenocysteine
  MOD_RES (206)..(206): Selenocysteine
  MOD_RES (218)..(218): Selenocysteine
  MOD_RES (264)..(264): Selenocysteine
  MOD_RES (300)..(300): Selenocysteine
  MOD_RES (328)..(328): Selenocysteine
  MOD_RES (337)..(338): Selenocysteine
  MOD_RES (354)..(354): Selenocysteine
  MOD_RES (361)..(361): Selenocysteine
  MOD_RES (363)..(363): Selenocysteine
  MOD_RES (382)..(382): Selenocysteine
  MOD_RES (442)..(442): Selenocysteine
  MOD_RES (457)..(457): Selenocysteine
  MOD_RES (473)..(473): Selenocysteine
  MOD_RES (496)..(496): Selenocysteine
  MOD_RES (501)..(501): Selenocysteine
  MOD_RES (518)..(518): Selenocysteine
  MOD_RES (530)..(530): Selenocysteine
  MOD_RES (539)..(539): Selenocysteine
  MOD_RES (565)..(565): Selenocysteine
  MOD_RES (569)..(569): Selenocysteine
MADFEELRNMVSSFRVSELQVLLGFAGRNKSGRKHDLLMRALHLLKSGCSPAVQIKIRELYRRRYPRXLEGLSDLSXIKSSVFSLDGGSSPVEPDLAVAGIHSLPSXSVXPHSPSSPVGSVLLQDXKPXFEMQQPSPPIPPVHPDVQLKNLPFYDVLDVLIKPXSLVQSSIQRFQEKFFIFALXPQQVREICISRDFLPGGRRDYXVQVQLRLCLAEXSCPQEDNYPNSLCIKVNGKLFPLPGYAPPPKNGIEQKRPGRPLNIXSLVRLSSAVPNQISISWASEIGKNYSMSVYLVRQLXSAMLLQRLKMKGIRNPDHSRALIKEKLXADPDSEIAXXSLRVSLMCPLGKMRLXIPCRAVXCXHLQCFDAALYLQMNEKKPXWICPVCDKKAAYESLILDGLFMEILNDCSDVDEIKFQEDGSWCPMRPKKEAMKVSSQPCXKIESSSVLSKPCSVXVASEASKKKVDVIDLXIESSSDEEEDPPAKRKCIFMSEXQSSPXKGVLMYQPSSVRVPSVXSVDPAAIPPSLXDYSVPFHHXPISSMSSDLPGEQRRNDINNELKLGXSSDXVQQ

SEQ ID NO: 20066 - protein, 621 aa, Homo sapiens
  MOD_RES (68)..(68): Selenocysteine
  MOD_RES (77)..(77): Selenocysteine
  MOD_RES (107)..(107): Selenocysteine
  MOD_RES (110)..(110): Selenocysteine
  MOD_RES (126)..(126): Selenocysteine
  MOD_RES (129)..(129): Selenocysteine
  MOD_RES (164)..(164): Selenocysteine
  MOD_RES (184)..(184): Selenocysteine
  MOD_RES (206)..(206): Selenocysteine
  MOD_RES (218)..(218): Selenocysteine
  MOD_RES (264)..(264): Selenocysteine
  MOD_RES (300)..(300): Selenocysteine
  MOD_RES (328)..(328): Selenocysteine
  MOD_RES (337)..(338): Selenocysteine
  MOD_RES (354)..(354): Selenocysteine
  MOD_RES (361)..(361): Selenocysteine
  MOD_RES (363)..(363): Selenocysteine
  MOD_RES (382)..(382): Selenocysteine
  MOD_RES (442)..(442): Selenocysteine
  MOD_RES (457)..(457): Selenocysteine
  MOD_RES (473)..(473): Selenocysteine
  MOD_RES (496)..(496): Selenocysteine
  MOD_RES (501)..(501): Selenocysteine
  MOD_RES (518)..(518): Selenocysteine
  MOD_RES (530)..(530): Selenocysteine
  MOD_RES (539)..(539): Selenocysteine
  MOD_RES (573)..(573): Selenocysteine
  MOD_RES (577)..(577): Selenocysteine
  MOD_RES (581)..(581): Selenocysteine
  MOD_RES (584)..(586): Selenocysteine
  MOD_RES (593)..(593): Selenocysteine
  MOD_RES (604)..(604): Selenocysteine
  MOD_RES (608)..(608): Selenocysteine
MADFEELRNMVSSFRVSELQVLLGFAGRNKSGRKHDLLMRALHLLKSGCSPAVQIKIRELYRRRYPRXLEGLSDLSXIKSSVFSLDGGSSPVEPDLAVAGIHSLPSXSVXPHSPSSPVGSVLLQDXKPXFEMQQPSPPIPPVHPDVQLKNLPFYDVLDVLIKPXSLVQSSIQRFQEKFFIFALXPQQVREICISRDFLPGGRRDYXVQVQLRLCLAEXSCPQEDNYPNSLCIKVNGKLFPLPGYAPPPKNGIEQKRPGRPLNIXSLVRLSSAVPNQISISWASEIGKNYSMSVYLVRQLXSAMLLQRLKMKGIRNPDHSRALIKEKLXADPDSEIAXXSLRVSLMCPLGKMRLXIPCRAVXCXHLQCFDAALYLQMNEKKPXWICPVCDKKAAYESLILDGLFMEILNDCSDVDEIKFQEDGSWCPMRPKKEAMKVSSQPCXKIESSSVLSKPCSVXVASEASKKKVDVIDLXIESSSDEEEDPPAKRKCIFMSEXQSSPXKGVLMYQPSSVRVPSVXSVDPAAIPPSLXDYSVPFHHXPISSMSSDLPGLDFLSLIPVDPQYCPPMFLDSLXSPLXASSXSVXXXSSHESSXHVSSSSSRSEXGVIXSSGSNIPDIISLD

SEQ ID NO: 20067 - protein, 89 aa, Homo sapiens
  MOD_RES (9)..(9): Selenocysteine
MAVPFYIPXSNVWSDPVSQHPRQHLVLSVFFILAILNMVSSFRVSELQVLLGFAGRNKSGRKHDLLMRALHLLKSGCSPAVQIKIRELY

SEQ ID NO: 20068 - protein, 88 aa, Homo sapiens
  MOD_RES (66)..(66): Selenocysteine
  MOD_RES (75)..(75): Selenocysteine
MLPFSQNMVSSFRVSELQVLLGFAGRNKSGRKHDLLMRALHLLKSGCSPAVQIKIRELYRRRYPRXLEGLSDLSXIKSSVFSLDGGSS

SEQ ID NO: 20069 - protein, 95 aa, Homo sapiens
  MOD_RES (15)..(15): Selenocysteine
MLSKFHMAVPFYIPXSNVWSDPVSQHPRQHLVLSVFFILAILNMVSSFRVSELQVLLGFAGRNKSGRKHDLLMRALHLLKSGCSPAVQIKIRELY

SEQ ID NO: 20070 - protein, 282 aa, Homo sapiens
  MOD_RES (10)..(10): Selenocysteine
  MOD_RES (38)..(38): Selenocysteine
  MOD_RES (47)..(48): Selenocysteine
  MOD_RES (64)..(64): Selenocysteine
  MOD_RES (71)..(71): Selenocysteine
  MOD_RES (73)..(73): Selenocysteine
  MOD_RES (92)..(92): Selenocysteine
  MOD_RES (152)..(152): Selenocysteine
  MOD_RES (167)..(167): Selenocysteine
  MOD_RES (183)..(183): Selenocysteine
  MOD_RES (206)..(206): Selenocysteine
  MOD_RES (211)..(211): Selenocysteine
  MOD_RES (228)..(228): Selenocysteine
  MOD_RES (240)..(240): Selenocysteine
  MOD_RES (249)..(249): Selenocysteine
  MOD_RES (275)..(275): Selenocysteine
  MOD_RES (279)..(279): Selenocysteine
MSVYLVRQLXSAMLLQRLKMKGIRNPDHSRALIKEKLXADPDSEIAXXSLRVSLMCPLGKMRLXIPCRAVXCXHLQCFDAALYLQMNEKKPXWICPVCDKKAAYESLILDGLFMEILNDCSDVDEIKFQEDGSWCPMRPKKEAMKVSSQPCXKIESSSVLSKPCSVXVASEASKKKVDVIDLXIESSSDEEEDPPAKRKCIFMSEXQSSPXKGVLMYQPSSVRVPSVXSVDPAAIPPSLXDYSVPFHHXPISSMSSDLPGEQRRNDINNELKLGXSSDXVQQ

SEQ ID NO: 20071 - protein, 122 aa, Homo sapiens
  MOD_RES (59)..(59): Selenocysteine
  MOD_RES (68)..(68): Selenocysteine
  MOD_RES (98)..(98): Selenocysteine
  MOD_RES (101)..(101): Selenocysteine
  MOD_RES (117)..(117): Selenocysteine
  MOD_RES (120)..(120): Selenocysteine
MVSSFRVSELQVLLGFAGRNKSGRKHDLLMRALHLLKSGCSPAVQIKIRELYRRRYPRXLEGLSDLSXIKSSVFSLDGGSSPVEPDLAVAGIHSLPSXSVXPHSPSSPVGSVLLQDXKPXFE

SEQ ID NO: 20072 - protein, 593 aa, Homo sapiens
  MOD_RES (69)..(69): Selenocysteine
  MOD_RES (84)..(84): Selenocysteine
  MOD_RES (93)..(93): Selenocysteine
  MOD_RES (110)..(111): Selenocysteine
  MOD_RES (115)..(115): Selenocysteine
  MOD_RES (126)..(126): Selenocysteine
  MOD_RES (130)..(130): Selenocysteine
  MOD_RES (139)..(139): Selenocysteine
  MOD_RES (152)..(152): Selenocysteine
  MOD_RES (164)..(164): Selenocysteine
  MOD_RES (194)..(194): Selenocysteine
  MOD_RES (210)..(210): Selenocysteine
  MOD_RES (218)..(218): Selenocysteine
  MOD_RES (222)..(222): Selenocysteine
  MOD_RES (246)..(246): Selenocysteine
  MOD_RES (249)..(249): Selenocysteine
  MOD_RES (274)..(274): Selenocysteine
  MOD_RES (283)..(284): Selenocysteine
  MOD_RES (300)..(300): Selenocysteine
  MOD_RES (307)..(307): Selenocysteine
  MOD_RES (328)..(328): Selenocysteine
  MOD_RES (330)..(330): Selenocysteine
  MOD_RES (416)..(416): Selenocysteine
  MOD_RES (429)..(429): Selenocysteine
  MOD_RES (436)..(436): Selenocysteine
  MOD_RES (451)..(451): Selenocysteine
  MOD_RES (467)..(467): Selenocysteine
  MOD_RES (502)..(502): Selenocysteine
  MOD_RES (513)..(513): Selenocysteine
  MOD_RES (530)..(530): Selenocysteine
  MOD_RES (541)..(541): Selenocysteine
  MOD_RES (550)..(550): Selenocysteine
  MOD_RES (583)..(583): Selenocysteine
MAELGELKHMVMSFRVSELQVLLGFAGRNKSGRKHELLAKALHLLKSSCAPSVQMKIKELYRRRFPRKXLGPSDLSLLSLPPGXSPPVHPDVXMKPLPFYEVYGELIRPXXLASXSSQRFEEAHFXFALXPQQVQQILXSREVLPGAKCDYXIQVQLRFCLCEXSCPQEDYFPPNLFVKVNGKLCPLPGYLPPXKNGAEPKRPSRPINIXPLARLSAXVPNXIVVNWSSEFGRNYSLSVYLVRQLXAGXLLQKLRAKGIRNPDHSRALIKEKLXADPDSEVAXXSLRVSLMCPLGKMRLXVPCRALXCAHLQSFDAALYLQMNEKKPXWXCPVCDKKAPYESLIIDGLFMEILSSCSDCDEIQFMEDGSWCPMKPKKEASEVCPPPGYGLDGLQYSPVQGGDPSENKKKVEVIDLXIESSSDEEDLPPXKKHCSVXSAAIPALPGSKGVLXSGHQPSSVLRSPAMGXLGGDFLSSLPLHEYPPAFPLGADIQGLDLFSFLQXESQHYGPSVIXSLDEQDALGHFFQYRGXPSHFLGPLAPXLGSSHCSAXPAPPPGRVSSIVAPGGALREGHGGPLPSGPSLXGCRSDIISLD

SEQ ID NO: 20073 - protein, 628 aa, Homo sapiens
  MOD_RES (69)..(69): Selenocysteine
  MOD_RES (84)..(84): Selenocysteine
  MOD_RES (99)..(99): Selenocysteine
  MOD_RES (105)..(105): Selenocysteine
  MOD_RES (128)..(128): Selenocysteine
  MOD_RES (145)..(146): Selenocysteine
  MOD_RES (150)..(150): Selenocysteine
  MOD_RES (161)..(161): Selenocysteine
  MOD_RES (165)..(165): Selenocysteine
  MOD_RES (174)..(174): Selenocysteine
  MOD_RES (187)..(187): Selenocysteine
  MOD_RES (199)..(199): Selenocysteine
  MOD_RES (229)..(229): Selenocysteine
  MOD_RES (245)..(245): Selenocysteine
  MOD_RES (253)..(253): Selenocysteine
  MOD_RES (257)..(257): Selenocysteine
  MOD_RES (281)..(281): Selenocysteine
  MOD_RES (284)..(284): Selenocysteine
  MOD_RES (309)..(309): Selenocysteine
  MOD_RES (318)..(319): Selenocysteine
  MOD_RES (335)..(335): Selenocysteine
  MOD_RES (342)..(342): Selenocysteine
  MOD_RES (363)..(363): Selenocysteine
  MOD_RES (365)..(365): Selenocysteine
  MOD_RES (451)..(451): Selenocysteine
  MOD_RES (464)..(464): Selenocysteine
  MOD_RES (471)..(471): Selenocysteine
  MOD_RES (486)..(486): Selenocysteine
  MOD_RES (502)..(502): Selenocysteine
  MOD_RES (537)..(537): Selenocysteine
  MOD_RES (548)..(548): Selenocysteine
  MOD_RES (565)..(565): Selenocysteine
  MOD_RES (576)..(576): Selenocysteine
  MOD_RES (585)..(585): Selenocysteine
  MOD_RES (618)..(618): Selenocysteine
MAELGELKHMVMSFRVSELQVLLGFAGRNKSGRKHELLAKALHLLKSSCAPSVQMKIKELYRRRFPRKXLGPSDLSLLSLPPGXSPVGSPGPLAPIPPXLLAPGXLLGPKREVDMHPPLPQPVHPDVXMKPLPFYEVYGELIRPXXLASXSSQRFEEAHFXFALXPQQVQQILXSREVLPGAKCDYXIQVQLRFCLCEXSCPQEDYFPPNLFVKVNGKLCPLPGYLPPXKNGAEPKRPSRPINIXPLARLSAXVPNXIVVNWSSEFGRNYSLSVYLVRQLXAGXLLQKLRAKGIRNPDHSRALIKEKLXADPDSEVAXXSLRVSLMCPLGKMRLXVPCRALXCAHLQSFDAALYLQMNEKKPXWXCPVCDKKAPYESLIIDGLFMEILSSCSDCDEIQFMEDGSWCPMKPKKEASEVCPPPGYGLDGLQYSPVQGGDPSENKKKVEVIDLXIESSSDEEDLPPXKKHCSVXSAAIPALPGSKGVLXSGHQPSSVLRSPAMGXLGGDFLSSLPLHEYPPAFPLGADIQGLDLFSFLQXESQHYGPSVIXSLDEQDALGHFFQYRGXPSHFLGPLAPXLGSSHCSAXPAPPPGRVSSIVAPGGALREGHGGPLPSGPSLXGCRSDIISLD

SEQ ID NO: 20074 - protein, 92 aa, Homo sapiens
  MOD_RES (71)..(71): Selenocysteine
  MOD_RES (86)..(86): Selenocysteine
MEAGGCMDSEHMVMSFRVSELQVLLGFAGRNKSGRKHELLAKALHLLKSSCAPSVQMKIKELYRRRFPRKXLGPSDLSLLSLPPGXSPVGSP

SEQ ID NO: 20075 - protein, 259 aa, Homo sapiens
  MOD_RES (60)..(60): Selenocysteine
  MOD_RES (75)..(75): Selenocysteine
  MOD_RES (90)..(90): Selenocysteine
  MOD_RES (96)..(96): Selenocysteine
  MOD_RES (119)..(119): Selenocysteine
  MOD_RES (136)..(137): Selenocysteine
  MOD_RES (141)..(141): Selenocysteine
  MOD_RES (152)..(152): Selenocysteine
  MOD_RES (156)..(156): Selenocysteine
  MOD_RES (165)..(165): Selenocysteine
  MOD_RES (178)..(178): Selenocysteine
  MOD_RES (190)..(190): Selenocysteine
  MOD_RES (220)..(220): Selenocysteine
  MOD_RES (236)..(236): Selenocysteine
  MOD_RES (244)..(244): Selenocysteine
  MOD_RES (248)..(248): Selenocysteine
MVMSFRVSELQVLLGFAGRNKSGRKHELLAKALHLLKSSCAPSVQMKIKELYRRRFPRKXLGPSDLSLLSLPPGXSPVGSPGPLAPIPPXLLAPGXLLGPKREVDMHPPLPQPVHPDVXMKPLPFYEVYGELIRPXXLASXSSQRFEEAHFXFALXPQQVQQILXSREVLPGAKCDYXIQVQLRFCLCEXSCPQEDYFPPNLFVKVNGKLCPLPGYLPPXKNGAEPKRPSRPINIXPLARLSAXVPNXIVVNWSSEFGR

SEQ ID NO: 20076 - protein, 510 aa, Homo sapiens
  MOD_RES (40)..(40): Selenocysteine
  MOD_RES (64)..(64): Selenocysteine
  MOD_RES (85)..(85): Selenocysteine
  MOD_RES (89)..(89): Selenocysteine
  MOD_RES (99)..(99): Selenocysteine
  MOD_RES (126)..(126): Selenocysteine
  MOD_RES (149)..(149): Selenocysteine
  MOD_RES (169)..(169): Selenocysteine
  MOD_RES (200)..(200): Selenocysteine
  MOD_RES (246)..(246): Selenocysteine
  MOD_RES (255)..(255): Selenocysteine
  MOD_RES (259)..(259): Selenocysteine
  MOD_RES (261)..(261): Selenocysteine
  MOD_RES (280)..(280): Selenocysteine
  MOD_RES (290)..(290): Selenocysteine
  MOD_RES (317)..(318): Selenocysteine
  MOD_RES (341)..(341): Selenocysteine
  MOD_RES (362)..(362): Selenocysteine
  MOD_RES (447)..(447): Selenocysteine
  MOD_RES (469)..(469): Selenocysteine
MAAELVEAKNMVMSFRVSDLQMLLGFVGRSKSGLKHELVXRALQLVQFDCSPELFKKIKELYEXRYAKKNSEPAPQPHRPLDPLXMHSXYDRAGAVPRXPLAGPNIDYPVLYGKYLNGLGRLPAKXLKPEVRLVKLPFFNMLDELLKPXELVPQNNEKLQESPCIFALXPRQVELIRNSRELQPGVKAVQVVLRICYSDXSCPQEDQYPPNIAVKVNHSYCSVPGYYPSNKPGVEPKRPCRPINLXHLMYLSSAXNRIXVXWGNYGKSYSVALYLVRQLXSSELLQRLKXIGVKHPELCKALVKEKLRLDPDSEIAXXGVRVSLICPLVKMRLSVPCRAEXCAHLQCFDAVFYLQMNEKKPXWMCPVCDKPAPYDQLIIDGLLSKILSECEDADEIEYLVDGSWCPIRAEKERSCSPQGAILVLGPSDANGLLPAPSVNGSGALGSXGGGGPVGSMENGKPGADVVDLXLDSSSSSEDEEEEEEEEEDEDEEGPRPKRRCPFQKGLVPAC

SEQ ID NO: 20077 - protein, 38 aa, Homo sapiens
  MOD_RES (18)..(18): Selenocysteine
  MOD_RES (24)..(24): Selenocysteine
MFADLDYDIEEDKLGIPXVPGKVXLQKDAQNLIGISIG

SEQ ID NO: 20078 - protein, 130 aa, Homo sapiens
  MOD_RES (18)..(18): Selenocysteine
  MOD_RES (24)..(24): Selenocysteine
  MOD_RES (56)..(56): Selenocysteine
  MOD_RES (63)..(63): Selenocysteine
  MOD_RES (71)..(71): Selenocysteine
  MOD_RES (82)..(82): Selenocysteine
  MOD_RES (98)..(98): Selenocysteine
MFADLDYDIEEDKLGIPXVPGKVXLQKDAQNLIGISIGGGAQYCPCLYIVQVFDNXPAALDGXVAAGDEIXGVNGRSIKGKXKVEVAKMIQEVKGEVXIHYNKLQADPKQGMSLDIGQRLGFHGPGPHSS

SEQ ID NO: 20079 - protein, 134 aa, Homo sapiens
  MOD_RES (18)..(18): Selenocysteine
  MOD_RES (24)..(24): Selenocysteine
  MOD_RES (56)..(56): Selenocysteine
  MOD_RES (63)..(63): Selenocysteine
  MOD_RES (71)..(71): Selenocysteine
  MOD_RES (82)..(82): Selenocysteine
  MOD_RES (98)..(98): Selenocysteine
  MOD_RES (133)..(133): Selenocysteine
MFADLDYDIEEDKLGIPXVPGKVXLQKDAQNLIGISIGGGAQYCPCLYIVQVFDNXPAALDGXVAAGDEIXGVNGRSIKGKXKVEVAKMIQEVKGEVXIHYNKLQADPKQGMSLDIVLKKVKHRLVENMSSGXA

SEQ ID NO: 20080 - protein, 229 aa, Homo sapiens
  MOD_RES (18)..(18): Selenocysteine
  MOD_RES (24)..(24): Selenocysteine
  MOD_RES (56)..(56): Selenocysteine
  MOD_RES (63)..(63): Selenocysteine
  MOD_RES (71)..(71): Selenocysteine
  MOD_RES (82)..(82): Selenocysteine
  MOD_RES (98)..(98): Selenocysteine
  MOD_RES (133)..(133): Selenocysteine
  MOD_RES (159)..(159): Selenocysteine
  MOD_RES (167)..(167): Selenocysteine
  MOD_RES (170)..(170): Selenocysteine
  MOD_RES (183)..(183): Selenocysteine
  MOD_RES (227)..(227): Selenocysteine
MFADLDYDIEEDKLGIPXVPGKVXLQKDAQNLIGISIGGGAQYCPCLYIVQVFDNXPAALDGXVAAGDEIXGVNGRSIKGKXKVEVAKMIQEVKGEVXIHYNKLQADPKQGMSLDIVLKKVKHRLVENMSSGXADALGLSRAILCNDGLVKRLEELERXAELYKGMXEHXKNLLRAFYELSQXHRAFGDVFSVIGVREPQPAASEAFVKFADAHRSIEKFGIRLLKXIK

SEQ ID NO: 20081 - protein, 415 aa, Homo sapiens
  MOD_RES (18)..(18): Selenocysteine
  MOD_RES (24)..(24): Selenocysteine
  MOD_RES (56)..(56): Selenocysteine
  MOD_RES (63)..(63): Selenocysteine
  MOD_RES (71)..(71): Selenocysteine
  MOD_RES (82)..(82): Selenocysteine
  MOD_RES (98)..(98): Selenocysteine
  MOD_RES (133)..(133): Selenocysteine
  MOD_RES (159)..(159): Selenocysteine
  MOD_RES (167)..(167): Selenocysteine
  MOD_RES (170)..(170): Selenocysteine
  MOD_RES (183)..(183): Selenocysteine
  MOD_RES (227)..(227): Selenocysteine
  MOD_RES (233)..(233): Selenocysteine
  MOD_RES (237)..(237): Selenocysteine
  MOD_RES (246)..(246): Selenocysteine
  MOD_RES (249)..(249): Selenocysteine
  MOD_RES (289)..(289): Selenocysteine
  MOD_RES (340)..(340): Selenocysteine
  MOD_RES (367)..(368): Selenocysteine
  MOD_RES (379)..(379): Selenocysteine
  MOD_RES (390)..(390): Selenocysteine
  MOD_RES (399)..(399): Selenocysteine
MFADLDYDIEEDKLGIPXVPGKVXLQKDAQNLIGISIGGGAQYCPCLYIVQVFDNXPAALDGXVAAGDEIXGVNGRSIKGKXKVEVAKMIQEVKGEVXIHYNKLQADPKQGMSLDIVLKKVKHRLVENMSSGXADALGLSRAILCNDGLVKRLEELERXAELYKGMXEHXKNLLRAFYELSQXHRAFGDVFSVIGVREPQPAASEAFVKFADAHRSIEKFGIRLLKXIKPMLXDLNXYLNKAIPDXRLXIKKYLDVKFEYLSYCLKVKEMDDEEYSCIALGEPLYRVSXGNYEYRLILRCRQEARARFSQMRKDVLEKMELLDQKHVQDIVFQLQRLVSXMSKYYNDCYAVLRDADVFPIEVDLAHXXLAYGLNQEEFXDGEEEEEEEDXAAGEPSRDXRGAAGPLDKGGSWCDS

SEQ ID NO: 20082 - protein, 51 aa, Homo sapiens
  MOD_RES (17)..(18): Selenocysteine
  MOD_RES (24)..(24): Selenocysteine
MFADLDYDIEEDKLYLXXPQQPWXAQWQLAMRSPVSMAGQSKGKLRWRWRR

SEQ ID NO: 20083 - protein, 250 aa, Homo sapiens
  MOD_RES (14)..(14): Selenocysteine
  MOD_RES (27)..(27): Selenocysteine
  MOD_RES (33)..(33): Selenocysteine
  MOD_RES (43)..(43): Selenocysteine
  MOD_RES (47)..(47): Selenocysteine
  MOD_RES (57)..(57): Selenocysteine
  MOD_RES (78)..(80): Selenocysteine
  MOD_RES (85)..(85): Selenocysteine
  MOD_RES (87)..(87): Selenocysteine
  MOD_RES (94)..(94): Selenocysteine
  MOD_RES (101)..(102): Selenocysteine
  MOD_RES (111)..(111): Selenocysteine
  MOD_RES (123)..(123): Selenocysteine
  MOD_RES (155)..(155): Selenocysteine
  MOD_RES (160)..(160): Selenocysteine
  MOD_RES (170)..(170): Selenocysteine
  MOD_RES (222)..(222): Selenocysteine
MFSLPLSLPLCEDXAFLPSKCCSSHKXIKQARXLIMIFLASGXHFQXMLKSKLNVLXLKKEPLPAVIFHEPEAIELCXXXPLMKXRXHSGCKVXYLGKVSXXGMQFLSGCXEKPVIELWKKHXLAREDVFPANALLEIRPFQVWLHHLDHKGEAXVHMDXFQVARIAYCXADHNVSPNIFAWVYREINDDLSYQMDCHAVECESKLEAKKLAHAMMEAFRKXFHSMKSDGRIHSNSSSEEVSQELESDDG

SEQ ID NO: 20084 - protein, 248 aa, Homo sapiens
  MOD_RES (16)..(16): Selenocysteine
  MOD_RES (45)..(45): Selenocysteine
  MOD_RES (55)..(55): Selenocysteine
  MOD_RES (76)..(78): Selenocysteine
  MOD_RES (83)..(83): Selenocysteine
  MOD_RES (85)..(85): Selenocysteine
  MOD_RES (92)..(92): Selenocysteine
  MOD_RES (99)..(100): Selenocysteine
  MOD_RES (109)..(109): Selenocysteine
  MOD_RES (121)..(121): Selenocysteine
  MOD_RES (153)..(153): Selenocysteine
  MOD_RES (158)..(158): Selenocysteine
  MOD_RES (168)..(168): Selenocysteine
  MOD_RES (220)..(220): Selenocysteine
MPRIAGNHLMLEESRXCSSPELLDGVWPCQPLHFGLPASEMHFQXMLKSKLNVLXLKKEPLPAVIFHEPEAIELCXXXPLMKXRXHSGCKVXYLGKVSXXGMQFLSGCXEKPVIELWKKHXLAREDVFPANALLEIRPFQVWLHHLDHKGEAXVHMDXFQVARIAYCXADHNVSPNIFAWVYREINDDLSYQMDCHAVECESKLEAKKLAHAMMEAFRKXFHSMKSDGRIHSNSSSEEVSQELESDDG

SEQ ID NO: 20085 - protein, 41 aa, Homo sapiens
  MOD_RES (6)..(6): Selenocysteine
  MOD_RES (20)..(20): Selenocysteine
  MOD_RES (37)..(37): Selenocysteine
MWQPAXERLQDGCCNSSHNXLVPQYPWGIDSGPLVNXKIYR

SEQ ID NO: 20086 - protein, 217 aa, Homo sapiens
  MOD_RES (6)..(6): Selenocysteine
  MOD_RES (14)..(14): Selenocysteine
  MOD_RES (24)..(24): Selenocysteine
  MOD_RES (45)..(47): Selenocysteine
  MOD_RES (52)..(52): Selenocysteine
  MOD_RES (54)..(54): Selenocysteine
  MOD_RES (61)..(61): Selenocysteine
  MOD_RES (68)..(69): Selenocysteine
  MOD_RES (78)..(78): Selenocysteine
  MOD_RES (90)..(90): Selenocysteine
  MOD_RES (122)..(122): Selenocysteine
  MOD_RES (127)..(127): Selenocysteine
  MOD_RES (137)..(137): Selenocysteine
  MOD_RES (189)..(189): Selenocysteine
MWQPAXERLQHFQXMLKSKLNVLXLKKEPLPAVIFHEPEAIELCXXXPLMKXRXHSGCKVXYLGKVSXXGMQFLSGCXEKPVIELWKKHXLAREDVFPANALLEIRPFQVWLHHLDHKGEAXVHMDXFQVARIAYCXADHNVSPNIFAWVYREINDDLSYQMDCHAVECESKLEAKKLAHAMMEAFRKXFHSMKSDGRIHSNSSSEEVSQELESDDG

SEQ ID NO: 20087 - protein, 168 aa, Homo sapiens
  MOD_RES (6)..(6): Selenocysteine
  MOD_RES (12)..(12): Selenocysteine
  MOD_RES (19)..(20): Selenocysteine
  MOD_RES (29)..(29): Selenocysteine
  MOD_RES (41)..(41): Selenocysteine
  MOD_RES (73)..(73): Selenocysteine
  MOD_RES (78)..(78): Selenocysteine
  MOD_RES (88)..(88): Selenocysteine
  MOD_RES (140)..(140): Selenocysteine
MWQPAXERLQVXYLGKVSXXGMQFLSGCXEKPVIELWKKHXLAREDVFPANALLEIRPFQVWLHHLDHKGEAXVHMDXFQVARIAYCXADHNVSPNIFAWVYREINDDLSYQMDCHAVECESKLEAKKLAHAMMEAFRKXFHSMKSDGRIHSNSSSEEVSQELESDDG

SEQ ID NO: 20088 - protein, 893 aa, Homo sapiens
  MOD_RES (4)..(4): Selenocysteine
  MOD_RES (71)..(71): Selenocysteine
  MOD_RES (81)..(81): Selenocysteine
  MOD_RES (105)..(105): Selenocysteine
  MOD_RES (115)..(115): Selenocysteine
  MOD_RES (139)..(139): Selenocysteine
  MOD_RES (174)..(174): Selenocysteine
  MOD_RES (177)..(177): Selenocysteine
  MOD_RES (179)..(179): Selenocysteine
  MOD_RES (185)..(185): Selenocysteine
  MOD_RES (195)..(195): Selenocysteine
  MOD_RES (208)..(208): Selenocysteine
  MOD_RES (266)..(266): Selenocysteine
  MOD_RES (320)..(320): Selenocysteine
  MOD_RES (329)..(329): Selenocysteine
  MOD_RES (336)..(336): Selenocysteine
  MOD_RES (350)..(350): Selenocysteine
  MOD_RES (352)..(352): Selenocysteine
  MOD_RES (355)..(355): Selenocysteine
  MOD_RES (401)..(401): Selenocysteine
  MOD_RES (415)..(415): Selenocysteine
  MOD_RES (426)..(426): Selenocysteine
  MOD_RES (466)..(466): Selenocysteine
  MOD_RES (485)..(485): Selenocysteine
  MOD_RES (533)..(533): Selenocysteine
  MOD_RES (543)..(543): Selenocysteine
  MOD_RES (563)..(563): Selenocysteine
  MOD_RES (568)..(568): Selenocysteine
  MOD_RES (576)..(576): Selenocysteine
  MOD_RES (585)..(585): Selenocysteine
  MOD_RES (595)..(596): Selenocysteine
  MOD_RES (643)..(643): Selenocysteine
  MOD_RES (659)..(659): Selenocysteine
  MOD_RES (735)..(735): Selenocysteine
  MOD_RES (767)..(767): Selenocysteine
  MOD_RES (771)..(771): Selenocysteine
MAAXVEGPELEAAAAAGDASEDSDAGSRALPFLGGNRLSLDLYPGGCQQLLHLCVQQPLQLLQVEFLRLSXHEDPQLLEAXLAQLPQSLSCLRSLVLKGGQRRDXLGACLRGALXNLPAGLSGLAHLAHLDLSFNSLEXLPACVLQMRGLGALLLSHNCLSELPEALGALPALXFLXVXHNRLQXLPPALGALSXLQRLDLSQNLLDXLPPEIGGLGSLLELNLASNRLQSLPASLAGLRSLRLLVLHSNLLASVPADLARLPLLXRLDLRDNQLRDLPPELLDAPFVRLQGNPLGEASPDAPSSPVAALIPEMPRLFLXSDLDSFPVXPQGCSVXLACGVRLQFPAGAXAXPIXIRYRLLLPEPGLVPLGPHDALLSHVLELQPHGVAFQQDVGLWLLFXPPQARRCREVVVRXRNDNSWGDLEXYLEEEAPQRLWAHCQVPHFSWFLVVSRPVSNACLVPPEGXLLCSSGHPGVKVIFPPGAXEEPRRVSMQVVRMAGRELQALLGEPEAAVSPLLCLSQSGPPSFLQPVXVQLPLPSGIXGLSLDRSRLHLLYWAPPAAXWDDIXAQVVLELXHLYARFQVXHFSWYWLWYXXKNCVGGLARKAWERLRLHRVNLIALQRRRDPEQVLLQCLPRNKVDAXLRRLLERYRGPEPSDXVEMFEGEEFFAAFERGIDVDADRPDCVEGRICFVFYSHLKNVKEVSFYRGAVPVRVPEEAEAARQRKGADALWMAXLPIKLPRLRGSEGPRRGAGLSLAPLNLGDAEXGFLXQSNLLSVAGRLGLDWPAVALHLGVSYREVQRIRHEFRDDLDEQIRHMLFSWAERQAGQPGAVGLLVQALEQSDRQDVAEEVRAVLELGRRKYQDSIRRMGLAPKDPALPGSSAPQPPEPAQA

SEQ ID NO: 20089 - protein, 910 aa, Homo sapiens
  MOD_RES (4)..(4): Selenocysteine
  MOD_RES (71)..(71): Selenocysteine
  MOD_RES (81)..(81): Selenocysteine
  MOD_RES (105)..(105): Selenocysteine
  MOD_RES (115)..(115): Selenocysteine
  MOD_RES (139)..(139): Selenocysteine
  MOD_RES (174)..(174): Selenocysteine
  MOD_RES (177)..(177): Selenocysteine
  MOD_RES (179)..(179): Selenocysteine
  MOD_RES (185)..(185): Selenocysteine
  MOD_RES (195)..(195): Selenocysteine
  MOD_RES (208)..(208): Selenocysteine
  MOD_RES (266)..(266): Selenocysteine
  MOD_RES (320)..(320): Selenocysteine
  MOD_RES (329)..(329): Selenocysteine
  MOD_RES (336)..(336): Selenocysteine
  MOD_RES (350)..(350): Selenocysteine
  MOD_RES (352)..(352): Selenocysteine
  MOD_RES (355)..(355): Selenocysteine
  MOD_RES (401)..(401): Selenocysteine
  MOD_RES (415)..(415): Selenocysteine
  MOD_RES (426)..(426): Selenocysteine
  MOD_RES (466)..(466): Selenocysteine
  MOD_RES (485)..(485): Selenocysteine
  MOD_RES (533)..(533): Selenocysteine
  MOD_RES (543)..(543): Selenocysteine
  MOD_RES (563)..(563): Selenocysteine
  MOD_RES (568)..(568): Selenocysteine
  MOD_RES (576)..(576): Selenocysteine
  MOD_RES (585)..(585): Selenocysteine
  MOD_RES (595)..(596): Selenocysteine
  MOD_RES (643)..(643): Selenocysteine
  MOD_RES (659)..(659): Selenocysteine
  MOD_RES (707)..(709): Selenocysteine
  MOD_RES (752)..(752): Selenocysteine
  MOD_RES (784)..(784): Selenocysteine
  MOD_RES (788)..(788): Selenocysteine
MAAXVEGPELEAAAAAGDASEDSDAGSRALPFLGGNRLSLDLYPGGCQQLLHLCVQQPLQLLQVEFLRLSXHEDPQLLEAXLAQLPQSLSCLRSLVLKGGQRRDXLGACLRGALXNLPAGLSGLAHLAHLDLSFNSLEXLPACVLQMRGLGALLLSHNCLSELPEALGALPALXFLXVXHNRLQXLPPALGALSXLQRLDLSQNLLDXLPPEIGGLGSLLELNLASNRLQSLPASLAGLRSLRLLVLHSNLLASVPADLARLPLLXRLDLRDNQLRDLPPELLDAPFVRLQGNPLGEASPDAPSSPVAALIPEMPRLFLXSDLDSFPVXPQGCSVXLACGVRLQFPAGAXAXPIXIRYRLLLPEPGLVPLGPHDALLSHVLELQPHGVAFQQDVGLWLLFXPPQARRCREVVVRXRNDNSWGDLEXYLEEEAPQRLWAHCQVPHFSWFLVVSRPVSNACLVPPEGXLLCSSGHPGVKVIFPPGAXEEPRRVSMQVVRMAGRELQALLGEPEAAVSPLLCLSQSGPPSFLQPVXVQLPLPSGIXGLSLDRSRLHLLYWAPPAAXWDDIXAQVVLELXHLYARFQVXHFSWYWLWYXXKNCVGGLARKAWERLRLHRVNLIALQRRRDPEQVLLQCLPRNKVDAXLRRLLERYRGPEPSDXVEMFEGEEFFAAFERGIDVDADRPDCVEGRICFVFYSHLKNVKEVYVXXXLDREAQAVRGQVSFYRGAVPVRVPEEAEAARQRKGADALWMAXLPIKLPRLRGSEGPRRGAGLSLAPLNLGDAEXGFLXQSNLLSVAGRLGLDWPAVALHLGVSYREVQRIRHEFRDDLDEQIRHMLFSWAERQAGQPGAVGLLVQALEQSDRQDVAEEVRAVLELGRRKYQDSIRRMGLAPKDPALPGSSAPQPPEPAQA

SEQ ID NO: 20090 - protein, 108 aa, Homo sapiens
  MOD_RES (4)..(4): Selenocysteine
  MOD_RES (71)..(71): Selenocysteine
  MOD_RES (81)..(81): Selenocysteine
MAAXVEGPELEAAAAAGDASEDSDAGSRALPFLGGNRLSLDLYPGGCQQLLHLCVQQPLQLLQVEFLRLSXHEDPQLLEAXLAQLPQSLSCLRSLVLKGSIWDLGPWL

SEQ ID NO: 20091 - protein, 338 aa, Homo sapiens
  MOD_RES (1)..(1): Any amino acid
  MOD_RES (37)..(37): Selenocysteine
  MOD_RES (46)..(46): Selenocysteine
  MOD_RES (53)..(53): Selenocysteine
  MOD_RES (67)..(67): Selenocysteine
  MOD_RES (69)..(69): Selenocysteine
  MOD_RES (72)..(72): Selenocysteine
  MOD_RES (118)..(118): Selenocysteine
  MOD_RES (132)..(132): Selenocysteine
  MOD_RES (143)..(143): Selenocysteine
  MOD_RES (183)..(183): Selenocysteine
  MOD_RES (202)..(202): Selenocysteine
  MOD_RES (250)..(250): Selenocysteine
  MOD_RES (260)..(260): Selenocysteine
  MOD_RES (280)..(280): Selenocysteine
  MOD_RES (285)..(285): Selenocysteine
  MOD_RES (293)..(293): Selenocysteine
XAPFVRLQGNPLGEASPDAPSSPVAALIPEMPRLFLXSDLDSFPVXPQGCSVXLACGVRLQFPAGAXAXPIXIRYRLLLPEPGLVPLGPHDALLSHVLELQPHGVAFQQDVGLWLLFXPPQARRCREVVVRXRNDNSWGDLEXYLEEEAPQRLWAHCQVPHFSWFLVVSRPVSNACLVPPEGXLLCSSGHPGVKVIFPPGAXEEPRRVSMQVVRMAGRELQALLGEPEAAVSPLLCLSQSGPPSFLQPVXVQLPLPSGIXGLSLDRSRLHLLYWAPPAAXWDDIXAQVVLELXHLYARFQVLALVHHQELCGRPGSEGLGAAAAAPCEPHRSAAAPGP

SEQ ID NO: 20092 - protein, 764 aa, Homo sapiens
  MOD_RES (7)..(7): Selenocysteine
  MOD_RES (18)..(18): Selenocysteine
  MOD_RES (39)..(39): Selenocysteine
  MOD_RES (45)..(45): Selenocysteine
  MOD_RES (51)..(51): Selenocysteine
  MOD_RES (66)..(66): Selenocysteine
  MOD_RES (85)..(85): Selenocysteine
  MOD_RES (92)..(92): Selenocysteine
  MOD_RES (137)..(137): Selenocysteine
  MOD_RES (141)..(141): Selenocysteine
  MOD_RES (147)..(147): Selenocysteine
  MOD_RES (149)..(149): Selenocysteine
  MOD_RES (156)..(156): Selenocysteine
  MOD_RES (188)..(188): Selenocysteine
  MOD_RES (198)..(198): Selenocysteine
  MOD_RES (254)..(254): Selenocysteine
  MOD_RES (285)..(285): Selenocysteine
  MOD_RES (313)..(313): Selenocysteine
  MOD_RES (351)..(351): Selenocysteine
  MOD_RES (357)..(357): Selenocysteine
  MOD_RES (423)..(423): Selenocysteine
  MOD_RES (425)..(425): Selenocysteine
  MOD_RES (432)..(432): Selenocysteine
  MOD_RES (443)..(443): Selenocysteine
  MOD_RES (447)..(447): Selenocysteine
  MOD_RES (451)..(452): Selenocysteine
  MOD_RES (471)..(471): Selenocysteine
  MOD_RES (477)..(477): Selenocysteine
  MOD_RES (501)..(501): Selenocysteine
  MOD_RES (530)..(530): Selenocysteine
  MOD_RES (535)..(535): Selenocysteine
  MOD_RES (555)..(555): Selenocysteine
  MOD_RES (614)..(614): Selenocysteine
  MOD_RES (643)..(643): Selenocysteine
  MOD_RES (679)..(679): Selenocysteine
  MOD_RES (704)..(704): Selenocysteine
  MOD_RES (707)..(707): Selenocysteine
  MOD_RES (718)..(719): Selenocysteine
  MOD_RES (722)..(723): Selenocysteine
  MOD_RES (725)..(725): Selenocysteine
  MOD_RES (752)..(752): Selenocysteine
MLLFVLXCLLAVFPAISXKSPIFGPEEVNSVEGNSVSIXCYYPPXSVNRHXRKYWCRQGARGGCIXLISSEGYVSSKYAGRANLXNFPENGXFVVNIAQLSQDDSGRYKCGLGINSRGLSFDVSLEVSQGPGLLNDXKVYXVDLGRXVXINCPFKXENAQKRKSLYKQIGLYPVLVIDSSGYVNPNYXGRIRLDIQGXGQLLFSVVINQLRLSDAGQYLCQAGDDSNSNKKNADLQVLKPEPELVYEDLRGSVXFHCALGPEVANVAKFLCRQSSGENCDVVVNXLGKRAPAFEGRILLNPQDKDGSFSVVIXGLRKEDAGRYLCGAHSDGQLQEGSPIQAWQLFVNEESXIPRSPXVVKGVAGGSVAVLCPYNRKESKSIKYWCLWEGAQNGRCPLLVDSEGWVKAQYEGRLSLLEEPGNGXFXVILNQLXSRDAGFYWCLXNGDXLWRXXVEIKIIEGEPNLKVPGNVXAVLGEXLKVPCHFPCKFSSYEKYWCKWNNXGCQALPSQDEGPSKAFVNCDENSRLVSLXLNLVXRADEGWYWCGVKQGHFYGEXAAVYVAVEERKAAGSRDVSLAKADAAPDEKVLDSGFREIENKAIQDPRLFAEEKAVADXRDQADGSRASVDSGSSEEQGGSSRALVSXLVPLGLVLAVGAVAVGVARARHRKNVDRVSIRSYRXDISMSDFENSREFGANDNMGASSIXQEXSLGGKEEFVAXXESXXEXKEPKKAKRSSKEEAEMAYKDFLLQSSXVAAEAQDGPQEA

SEQ ID NO: 20093 - protein, 129 aa, Homo sapiens
  MOD_RES (2)..(2): Selenocysteine
  MOD_RES (26)..(26): Selenocysteine
  MOD_RES (62)..(62): Selenocysteine
  MOD_RES (88)..(88): Selenocysteine
KXNSSEGKVFINICHSPSIPPPADVXEEELLQMLEEDQAGFRIPMSLGEPHAELDAKGQGCXAYDVAVNSDFYRRMQNSDFLRELVIXIAREGLEDKYNLQLNPAEHPLGAASSDPGAGGPVHARPRES

SEQ ID NO: 20094 - protein, 95 aa, Homo sapiens
  MOD_RES (6)..(7): Selenocysteine
  MOD_RES (12)..(12): Selenocysteine
  MOD_RES (24)..(24): Selenocysteine
  MOD_RES (48)..(48): Selenocysteine
LQQAQXXRPESXQIQPQPGFCIKXNSSEGKVFINICHSPSIPPPADVXEEELLQMLEEDQAGFRIPMSLGEPHAELDAKQRFLAGARDHHRQGGP

SEQ ID NO: 20095 - protein, 82 aa, Homo sapiens
  MOD_RES (40)..(41): Selenocysteine
  MOD_RES (46)..(46): Selenocysteine
  MOD_RES (58)..(58): Selenocysteine
  MOD_RES (82)..(82): Selenocysteine
MANPKLLGMGLSEAEAIGADSARFEELLLQASKELQQAQXXRPESXQIQPQPGFCIKXNSSEGKVFINICHSPSIPPPADVX

SEQ ID NO: 20096 - protein, 290 aa, Homo sapiens
  MOD_RES (40)..(41): Selenocysteine
  MOD_RES (46)..(46): Selenocysteine
  MOD_RES (58)..(58): Selenocysteine
  MOD_RES (82)..(82): Selenocysteine
  MOD_RES (118)..(118): Selenocysteine
  MOD_RES (144)..(144): Selenocysteine
  MOD_RES (195)..(195): Selenocysteine
MANPKLLGMGLSEAEAIGADSARFEELLLQASKELQQAQXXRPESXQIQPQPGFCIKXNSSEGKVFINICHSPSIPPPADVXEEELLQMLEEDQAGFRIPMSLGEPHAELDAKGQGCXAYDVAVNSDFYRRMQNSDFLRELVIXIAREGLEDKYNLQLNPEWRMMKNRPFMGSISQQNIRSEQRPRIQELGDLYXPAPGRAESGPEKPHLNLWLEAPDLLLAEVDLPKLDGALGLSLEIGENRLVMGGPQQLYHLDAYIPLQINSHESKAAFHRKRKQLMVAMPLLPVPS

SEQ ID NO: 20097 - protein, 236 aa, Homo sapiens
  MOD_RES (40)..(41): Selenocysteine
  MOD_RES (46)..(46): Selenocysteine
  MOD_RES (58)..(58): Selenocysteine
  MOD_RES (82)..(82): Selenocysteine
  MOD_RES (119)..(119): Selenocysteine
  MOD_RES (132)..(132): Selenocysteine
  MOD_RES (163)..(163): Selenocysteine
  MOD_RES (189)..(189): Selenocysteine
MANPKLLGMGLSEAEAIGADSARFEELLLQASKELQQAQXXRPESXQIQPQPGFCIKXNSSEGKVFINICHSPSIPPPADVXEEELLQMLEEDQAGFRIPMSLGEPHAELDASQCPQRXQESGPLGPFFPRXQESWAQDPPPSAPGDLAPRSDSFPYEGQGCXAYDVAVNSDFYRRMQNSDFLRELVIXIAREGLEDKYNLQLNPEWRMMKNRPFMGSISQQNIRSEQRPRIQELG

SEQ ID NO: 20098 - protein, 164 aa, Homo sapiens
  MOD_RES (9)..(9): Selenocysteine
  MOD_RES (13)..(13): Selenocysteine
  MOD_RES (29)..(30): Selenocysteine
  MOD_RES (35)..(35): Selenocysteine
  MOD_RES (47)..(47): Selenocysteine
  MOD_RES (71)..(71): Selenocysteine
  MOD_RES (107)..(107): Selenocysteine
  MOD_RES (133)..(133): Selenocysteine
MGLQFPECXKAGXRPRGIEASKELQQAQXXRPESXQIQPQPGFCIKXNSSEGKVFINICHSPSIPPPADVXEEELLQMLEEDQAGFRIPMSLGEPHAELDAKGQGCXAYDVAVNSDFYRRMQNSDFLRELVIXIAREGLEDKYNLQLNPEWRMMKNRPFMGSIS

SEQ ID NO: 20099 - protein, 274 aa, Homo sapiens
  MOD_RES (9)..(9): Selenocysteine
  MOD_RES (13)..(13): Selenocysteine
  MOD_RES (29)..(30): Selenocysteine
  MOD_RES (35)..(35): Selenocysteine
  MOD_RES (47)..(47): Selenocysteine
  MOD_RES (71)..(71): Selenocysteine
  MOD_RES (107)..(107): Selenocysteine
  MOD_RES (133)..(133): Selenocysteine
  MOD_RES (184)..(184): Selenocysteine
MGLQFPECXKAGXRPRGIEASKELQQAQXXRPESXQIQPQPGFCIKXNSSEGKVFINICHSPSIPPPADVXEEELLQMLEEDQAGFRIPMSLGEPHAELDAKGQGCXAYDVAVNSDFYRRMQNSDFLRELVIXIAREGLEDKYNLQLNPEWRMMKNRPFMGSISQQNIRSEQRPRIQELGDLYXPAPGRAESGPEKPHLNLWLEAPDLLLAEVDLPKLDGALGLSLEIGENRLVMGGPQQLYHLDAYIPLQINSHESKAAFHRKRKQLMVAMPL

SEQ ID NO: 20100 - protein, 35 aa, Homo sapiens
  MOD_RES (9)..(9): Selenocysteine
  MOD_RES (13)..(13): Selenocysteine
MGLQFPECXKAGXRPRGIELSCIRIAPFEEQMRGL

SEQ ID NO: 20101 - protein, 87 aa, Homo sapiens
  MOD_RES (21)..(21): Selenocysteine
  MOD_RES (47)..(47): Selenocysteine
RIPMSLGEPHAELDAKGQGCXAYDVAVNSDFYRRMQNSDFLRELVIXIAREGLEDKYNLQLNPEHPLGAASSDPGAGGPVHARPRES

SEQ ID NO: 20102 - protein, 115 aa, Homo sapiens
  MOD_RES (1)..(1): Any amino acid
  MOD_RES (26)..(27): Selenocysteine
  MOD_RES (32)..(32): Selenocysteine
  MOD_RES (44)..(44): Selenocysteine
  MOD_RES (68)..(68): Selenocysteine
XAIGADSARFEELLLQASKELQQAQXXRPESXQIQPQPGFCIKXNSSEGKVFINICHSPSIPPPADVXEEELLQMLEEDQAGFRIPMSLGEPHAELDAKQRFLAGARDHHRQGGP

SEQ ID NO: 20103 - protein, 114 aa, Homo sapiens
  MOD_RES (1)..(1): Any amino acid
  MOD_RES (25)..(25): Selenocysteine
  MOD_RES (76)..(76): Selenocysteine
  MOD_RES (111)..(111): Selenocysteine
XDVAVNSDFYRRMQNSDFLRELVIXIAREGLEDKYNLQLNPEWRMMKNRPFMGSISQQNIRSEQRPRIQELGDLYXPAPGRAESGPEKPHLNLWLEAPDLLLAEVDLPKLXLQI

SEQ ID NO: 20104 - protein, 54 aa, Homo sapiens
  MOD_RES (1)..(1): Any amino acid
  MOD_RES (6)..(6): Selenocysteine
  MOD_RES (32)..(32): Selenocysteine
  MOD_RES (54)..(54): Selenocysteine
XGQGCXAYDVAVNSDFYRRMQNSDFLRELVIXIAREGLEDKYNLQLNPGLKSLX

SEQ ID NO: 20105 - protein, 183 aa, Homo sapiens
  MOD_RES (1)..(1): Any amino acid
  MOD_RES (8)..(8): Selenocysteine
  MOD_RES (44)..(44): Selenocysteine
  MOD_RES (70)..(70): Selenocysteine
  MOD_RES (121)..(121): Selenocysteine
XPPPADVXEEELLQMLEEDQAGFRIPMSLGEPHAELDAKGQGCXAYDVAVNSDFYRRMQNSDFLRELVIXIAREGLEDKYNLQLNPEWRMMKNRPFMGSISQQNIRSEQRPRIQELGDLYXPAPGRAESGPEKPHLNLWLEAPDLLLAEVDLPKLINSHESKAAFHRKRKQLMVAMPLLPVPS

SEQ ID NO: 20106 - protein, 55 aa, Homo sapiens
  MOD_RES (1)..(1): Any amino acid
  MOD_RES (15)..(15): Selenocysteine
XRMQNSDFLRELVIXIAREGLEDKYNLQLNPEHPLGAASSDPGAGGPVHARPRES

SEQ ID NO: 20107 - protein, 805 aa, Homo sapiens
  MOD_RES (29)..(29): Selenocysteine
  MOD_RES (44)..(44): Selenocysteine
  MOD_RES (64)..(64): Selenocysteine
  MOD_RES (125)..(125): Selenocysteine
  MOD_RES (132)..(132): Selenocysteine
  MOD_RES (151)..(151): Selenocysteine
  MOD_RES (153)..(153): Selenocysteine
  MOD_RES (171)..(171): Selenocysteine
  MOD_RES (173)..(173): Selenocysteine
  MOD_RES (192)..(193): Selenocysteine
  MOD_RES (208)..(208): Selenocysteine
  MOD_RES (231)..(231): Selenocysteine
  MOD_RES (258)..(258): Selenocysteine
  MOD_RES (264)..(264): Selenocysteine
  MOD_RES (294)..(294): Selenocysteine
  MOD_RES (296)..(296): Selenocysteine
  MOD_RES (302)..(302): Selenocysteine
  MOD_RES (329)..(329): Selenocysteine
  MOD_RES (338)..(338): Selenocysteine
  MOD_RES (352)..(352): Selenocysteine
  MOD_RES (357)..(357): Selenocysteine
  MOD_RES (377)..(377): Selenocysteine
  MOD_RES (397)..(397): Selenocysteine
  MOD_RES (427)..(427): Selenocysteine
  MOD_RES (455)..(455): Selenocysteine
  MOD_RES (467)..(467): Selenocysteine
  MOD_RES (480)..(480): Selenocysteine
  MOD_RES (497)..(497): Selenocysteine
  MOD_RES (515)..(515): Selenocysteine
  MOD_RES (539)..(540): Selenocysteine
  MOD_RES (602)..(602): Selenocysteine
  MOD_RES (610)..(610): Selenocysteine
  MOD_RES (658)..(658): Selenocysteine
  MOD_RES (671)..(671): Selenocysteine
  MOD_RES (676)..(676): Selenocysteine
  MOD_RES (707)..(707): Selenocysteine
  MOD_RES (716)..(716): Selenocysteine
  MOD_RES (719)..(719): Selenocysteine
  MOD_RES (722)..(722): Selenocysteine
  MOD_RES (726)..(726): Selenocysteine
  MOD_RES (732)..(732): Selenocysteine
  MOD_RES (755)..(755): Selenocysteine
  MOD_RES (768)..(768): Selenocysteine
  MOD_RES (770)..(770): Selenocysteine
  MOD_RES (790)..(790): Selenocysteine
  MOD_RES (793)..(793): Selenocysteine
MAASGVPRGCDILIVYSPDAEEWCQYLQXLFLSSRQVRSQKILXHRLGPEASFSAEDLSLFLSXRCVVVLLSAELVQHFHKPALLPLLQRAFHPPHRVVRLLCGVRDSEEFLDFFPDWAHWQELXCDDEPEXYVAAVKKAISEDSGCDSVXDXEPEDEKVVSYSKQQNLPXVXSPGNLMVVQPDRIRCGAEXXVYVIVRCKLDDRVAXEAEFSPEDSPSVRMEAKVENEYXISVKAPNLSSGNVSLKIYSGDLVVCEXVISYYXDMEEIGNLLSNAANPVEFMCQAFKIVPYNXEXLDKLLXESLKNNIPASGLHLFGINQLEEEDMMXNQRDEELPXLLHFAAKYGLKNLXALLLXCPGALQAYSVANKHGHYPNXIAEKHGFRDLRQFIDEYVEXVDMLKSHIKEELMHGEEADAVYESMAHLSXDLLMKCSLNPGCDEDLYESMAAFVPAAXEDLYVEMLQASXSNPIPGDGFSRAXKDSMIRKFLEGNSMGMXNLERDQCHLGQEEDVYHXVDDDEAFSVDLASRPPVPVPRPEXXAPGAHQLPDNEPYIFKVFAEKSQERPGNFYVSSESIRKGPPVRPWRDRPQSSIYDPFAGMKXPGQRQLIXLQEQVKLGIVNVDEAVLHFKEWQLNQKKRSESFRFQQENLKRLRDSIXRRQREKQKSGKQXDLEIXVPIRHSQHLPAKVEFGVYESGPRKSVIPPRXELRRGDWKXDSXSSXASSXSNRSSXRSLLSVSSGMEGDNEDNEVPEVXRSRSPGPPQVDGXPXMSLERPPRVPPRAASQRPPXREXFHPPPPVPPRGR

SEQ ID NO: 20108 - protein, 404 aa, Homo sapiens
  MOD_RES (5)..(5): Selenocysteine
  MOD_RES (35)..(35): Selenocysteine
  MOD_RES (48)..(48): Selenocysteine
  MOD_RES (66)..(66): Selenocysteine
  MOD_RES (79)..(79): Selenocysteine
  MOD_RES (96)..(96): Selenocysteine
  MOD_RES (114)..(114): Selenocysteine
  MOD_RES (138)..(139): Selenocysteine
  MOD_RES (201)..(201): Selenocysteine
  MOD_RES (209)..(209): Selenocysteine
  MOD_RES (257)..(257): Selenocysteine
  MOD_RES (270)..(270): Selenocysteine
  MOD_RES (275)..(275): Selenocysteine
  MOD_RES (306)..(306): Selenocysteine
  MOD_RES (315)..(315): Selenocysteine
  MOD_RES (318)..(318): Selenocysteine
  MOD_RES (321)..(321): Selenocysteine
  MOD_RES (325)..(325): Selenocysteine
  MOD_RES (331)..(331): Selenocysteine
  MOD_RES (354)..(354): Selenocysteine
  MOD_RES (367)..(367): Selenocysteine
  MOD_RES (369)..(369): Selenocysteine
  MOD_RES (389)..(389): Selenocysteine
  MOD_RES (392)..(392): Selenocysteine
MRFFXSVACYGSCLFASELLIRCKDWLKGRPALFXALLACVLYLCEWXGAKHVPGSSYVEMLQASXSNPIPGDGFSRAXKDSMIRKFLEGNSMGMXNLERDQCHLGQEEDVYHXVDDDEAFSVDLASRPPVPVPRPEXXAPGAHQLPDNEPYIFKVFAEKSQERPGNFYVSSESIRKGPPVRPWRDRPQSSIYDPFAGMKXPGQRQLIXLQEQVKLGIVNVDEAVLHFKEWQLNQKKRSESFRFQQENLKRLRDSIXRRQREKQKSGKQXDLEIXVPIRHSQHLPAKVEFGVYESGPRKSVIPPRXELRRGDWKXDSXSSXASSXSNRSSXRSLLSVSSGMEGDNEDNEVPEVXRSRSPGPPQVDGXPXMSLERPPRVPPRAASQRPPXREXFHPPPPVPPRGR

SEQ ID NO: 20109 - protein, 627 aa, Homo sapiens
  MOD_RES (14)..(15): Selenocysteine
  MOD_RES (30)..(30): Selenocysteine
  MOD_RES (53)..(53): Selenocysteine
  MOD_RES (80)..(80): Selenocysteine
  MOD_RES (86)..(86): Selenocysteine
  MOD_RES (116)..(116): Selenocysteine
  MOD_RES (118)..(118): Selenocysteine
  MOD_RES (124)..(124): Selenocysteine
  MOD_RES (151)..(151): Selenocysteine
  MOD_RES (160)..(160): Selenocysteine
  MOD_RES (174)..(174): Selenocysteine
  MOD_RES (179)..(179): Selenocysteine
  MOD_RES (199)..(199): Selenocysteine
  MOD_RES (219)..(219): Selenocysteine
  MOD_RES (249)..(249): Selenocysteine
  MOD_RES (277)..(277): Selenocysteine
  MOD_RES (289)..(289): Selenocysteine
  MOD_RES (302)..(302): Selenocysteine
  MOD_RES (319)..(319): Selenocysteine
  MOD_RES (337)..(337): Selenocysteine
  MOD_RES (361)..(362): Selenocysteine
  MOD_RES (424)..(424): Selenocysteine
  MOD_RES (432)..(432): Selenocysteine
  MOD_RES (480)..(480): Selenocysteine
  MOD_RES (493)..(493): Selenocysteine
  MOD_RES (498)..(498): Selenocysteine
  MOD_RES (529)..(529): Selenocysteine
  MOD_RES (538)..(538): Selenocysteine
  MOD_RES (541)..(541): Selenocysteine
  MOD_RES (544)..(544): Selenocysteine
  MOD_RES (548)..(548): Selenocysteine
  MOD_RES (554)..(554): Selenocysteine
  MOD_RES (577)..(577): Selenocysteine
  MOD_RES (590)..(590): Selenocysteine
  MOD_RES (592)..(592): Selenocysteine
  MOD_RES (612)..(612): Selenocysteine
  MOD_RES (615)..(615): Selenocysteine
MVVQPDRIRCGAEXXVYVIVRCKLDDRVAXEAEFSPEDSPSVRMEAKVENEYXISVKAPNLSSGNVSLKIYSGDLVVCEXVISYYXDMEEIGNLLSNAANPVEFMCQAFKIVPYNXEXLDKLLXESLKNNIPASGLHLFGINQLEEEDMMXNQRDEELPXLLHFAAKYGLKNLXALLLXCPGALQAYSVANKHGHYPNXIAEKHGFRDLRQFIDEYVEXVDMLKSHIKEELMHGEEADAVYESMAHLSXDLLMKCSLNPGCDEDLYESMAAFVPAAXEDLYVEMLQASXSNPIPGDGFSRAXKDSMIRKFLEGNSMGMXNLERDQCHLGQEEDVYHXVDDDEAFSVDLASRPPVPVPRPEXXAPGAHQLPDNEPYIFKVFAEKSQERPGNFYVSSESIRKGPPVRPWRDRPQSSIYDPFAGMKXPGQRQLIXLQEQVKLGIVNVDEAVLHFKEWQLNQKKRSESFRFQQENLKRLRDSIXRRQREKQKSGKQXDLEIXVPIRHSQHLPAKVEFGVYESGPRKSVIPPRXELRRGDWKXDSXSSXASSXSNRSSXRSLLSVSSGMEGDNEDNEVPEVXRSRSPGPPQVDGXPXMSLERPPRVPPRAASQRPPXREXFHPPPPVPPRGR

SEQ ID NO: 20110 - protein, 130 aa, Homo sapiens
  MOD_RES (21)..(21): Selenocysteine
  MOD_RES (49)..(49): Selenocysteine
  MOD_RES (61)..(61): Selenocysteine
  MOD_RES (96)..(96): Selenocysteine
  MOD_RES (111)..(111): Selenocysteine
  MOD_RES (114)..(114): Selenocysteine
  MOD_RES (120)..(120): Selenocysteine
MAQISSNSGFKECPSSHPEPXRAKDVDKEEALQMEAEALAKLQKDRQVXDNQRGFELSSSXRKKAQVYNKQDYDLMVFPESDSQKRALDIDVEKLXQAELEKLLLDDSFEXKKXPVLPVXPILSPSFSAQ

SEQ ID NO: 20111 - protein, 483 aa, Homo sapiens
  MOD_RES (21)..(21): Selenocysteine
  MOD_RES (49)..(49): Selenocysteine
  MOD_RES (61)..(61): Selenocysteine
  MOD_RES (96)..(96): Selenocysteine
  MOD_RES (111)..(111): Selenocysteine
  MOD_RES (114)..(114): Selenocysteine
  MOD_RES (120)..(120): Selenocysteine
  MOD_RES (136)..(136): Selenocysteine
  MOD_RES (151)..(151): Selenocysteine
  MOD_RES (161)..(161): Selenocysteine
  MOD_RES (178)..(178): Selenocysteine
  MOD_RES (182)..(182): Selenocysteine
  MOD_RES (201)..(201): Selenocysteine
  MOD_RES (204)..(204): Selenocysteine
  MOD_RES (221)..(221): Selenocysteine
  MOD_RES (233)..(233): Selenocysteine
  MOD_RES (244)..(244): Selenocysteine
  MOD_RES (249)..(249): Selenocysteine
  MOD_RES (314)..(314): Selenocysteine
  MOD_RES (332)..(332): Selenocysteine
  MOD_RES (334)..(334): Selenocysteine
  MOD_RES (343)..(344): Selenocysteine
  MOD_RES (361)..(361): Selenocysteine
  MOD_RES (366)..(366): Selenocysteine
  MOD_RES (389)..(389): Selenocysteine
  MOD_RES (393)..(393): Selenocysteine
  MOD_RES (398)..(398): Selenocysteine
  MOD_RES (402)..(402): Selenocysteine
  MOD_RES (412)..(412): Selenocysteine
  MOD_RES (438)..(438): Selenocysteine
  MOD_RES (440)..(440): Selenocysteine
  MOD_RES (446)..(446): Selenocysteine
MAQISSNSGFKECPSSHPEPXRAKDVDKEEALQMEAEALAKLQKDRQVXDNQRGFELSSSXRKKAQVYNKQDYDLMVFPESDSQKRALDIDVEKLXQAELEKLLLDDSFEXKKXPVLPVXPILSPSFSAQLYFRPXIQRGQWPPGLPGPSXYALPSIYPSXYSKQAAFQNGFNPRMPXFPSXEPIYLSLPGQSPYFSYPLXPAXPFHPQGSLPIYRPVVSXDMAKLFDKIASXSEFLKNGKARXDLEIXDSKVSNLQVSPKSEDISKFDWLDLDPLSKPKVDNVEVLDHEEEKNVSSLLAKDPWDAVLLEERSXANCHLERKVNGKSLSVAXVXRSQSLNIRXXQLAKAQGHISQKDPNGXSSLPXGSSLLQEVEVQNEEMAAFCRSIXKLKXKFPYXNHRXNPGYLLSPVXAQRNICGENASVKVSIDIEGFQLPVXFXCDVSSXVEIIIMQALCWVHDDLNQVDVGSYVLKVCGQEEVLQK

SEQ ID NO: 20112 - protein, 1686 aa, Homo sapiens
  MOD_RES (21)..(21): Selenocysteine
  MOD_RES (49)..(49): Selenocysteine
  MOD_RES (61)..(61): Selenocysteine
  MOD_RES (96)..(96): Selenocysteine
  MOD_RES (111)..(111): Selenocysteine
  MOD_RES (114)..(114): Selenocysteine
  MOD_RES (120)..(120): Selenocysteine
  MOD_RES (136)..(136): Selenocysteine
  MOD_RES (151)..(151): Selenocysteine
  MOD_RES (161)..(161): Selenocysteine
  MOD_RES (178)..(178): Selenocysteine
  MOD_RES (182)..(182): Selenocysteine
  MOD_RES (201)..(201): Selenocysteine
  MOD_RES (204)..(204): Selenocysteine
  MOD_RES (221)..(221): Selenocysteine
  MOD_RES (233)..(233): Selenocysteine
  MOD_RES (244)..(244): Selenocysteine
  MOD_RES (249)..(249): Selenocysteine
  MOD_RES (314)..(314): Selenocysteine
  MOD_RES (332)..(332): Selenocysteine
  MOD_RES (334)..(334): Selenocysteine
  MOD_RES (343)..(344): Selenocysteine
  MOD_RES (361)..(361): Selenocysteine
  MOD_RES (366)..(366): Selenocysteine
  MOD_RES (389)..(389): Selenocysteine
  MOD_RES (393)..(393): Selenocysteine
  MOD_RES (398)..(398): Selenocysteine
  MOD_RES (402)..(402): Selenocysteine
  MOD_RES (412)..(412): Selenocysteine
  MOD_RES (438)..(438): Selenocysteine
  MOD_RES (440)..(440): Selenocysteine
  MOD_RES (446)..(446): Selenocysteine
  MOD_RES (501)..(501): Selenocysteine
  MOD_RES (509)..(509): Selenocysteine
  MOD_RES (520)..(520): Selenocysteine
  MOD_RES (526)..(526): Selenocysteine
  MOD_RES (546)..(546): Selenocysteine
  MOD_RES (593)..(593): Selenocysteine
  MOD_RES (597)..(597): Selenocysteine
  MOD_RES (614)..(614): Selenocysteine
  MOD_RES (618)..(618): Selenocysteine
  MOD_RES (626)..(626): Selenocysteine
  MOD_RES (631)..(631): Selenocysteine
  MOD_RES (649)..(649): Selenocysteine
  MOD_RES (667)..(667): Selenocysteine
  MOD_RES (681)..(683): Selenocysteine
  MOD_RES (689)..(689): Selenocysteine
  MOD_RES (731)..(731): Selenocysteine
  MOD_RES (763)..(763): Selenocysteine
  MOD_RES (803)..(803): Selenocysteine
  MOD_RES (806)..(806): Selenocysteine
  MOD_RES (813)..(813): Selenocysteine
  MOD_RES (817)..(817): Selenocysteine
  MOD_RES (823)..(823): Selenocysteine
  MOD_RES (825)..(825): Selenocysteine
  MOD_RES (850)..(851): Selenocysteine
  MOD_RES (866)..(866): Selenocysteine
  MOD_RES (927)..(927): Selenocysteine
  MOD_RES (961)..(961): Selenocysteine
  MOD_RES (972)..(972): Selenocysteine
  MOD_RES (1025)..(1025): Selenocysteine
  MOD_RES (1050)..(1050): Selenocysteine
  MOD_RES (1122)..(1122): Selenocysteine
  MOD_RES (1177)..(1177): Selenocysteine
  MOD_RES (1192)..(1192): Selenocysteine
  MOD_RES (1203)..(1203): Selenocysteine
  MOD_RES (1243)..(1243): Selenocysteine
  MOD_RES (1261)..(1261): Selenocysteine
  MOD_RES (1292)..(1292): Selenocysteine
  MOD_RES (1306)..(1306): Selenocysteine
  MOD_RES (1327)..(1327): Selenocysteine
  MOD_RES (1346)..(1346): Selenocysteine
  MOD_RES (1362)..(1363): Selenocysteine
  MOD_RES (1368)..(1368): Selenocysteine
  MOD_RES (1372)..(1372): Selenocysteine
  MOD_RES (1384)..(1384): Selenocysteine
  MOD_RES (1415)..(1415): Selenocysteine
  MOD_RES (1431)..(1431): Selenocysteine
  MOD_RES (1462)..(1462): Selenocysteine
  MOD_RES (1494)..(1494): Selenocysteine
  MOD_RES (1519)..(1519): Selenocysteine
  MOD_RES (1529)..(1529): Selenocysteine
  MOD_RES (1555)..(1555): Selenocysteine
  MOD_RES (1573)..(1573): Selenocysteine
  MOD_RES (1586)..(1586): Selenocysteine
  MOD_RES (1598)..(1598): Selenocysteine
  MOD_RES (1607)..(1607): Selenocysteine
  MOD_RES (1612)..(1612): Selenocysteine
  MOD_RES (1618)..(1618): Selenocysteine
  MOD_RES (1622)..(1622): Selenocysteine
  MOD_RES (1636)..(1636): Selenocysteine
  MOD_RES (1662)..(1662): Selenocysteine
  MOD_RES (1674)..(1674): Selenocysteine
  MOD_RES (1681)..(1681): Selenocysteine
  MOD_RES (1684)..(1684): Selenocysteine
MAQISSNSGFKECPSSHPEPXRAKDVDKEEALQMEAEALAKLQKDRQVXDNQRGFELSSSXRKKAQVYNKQDYDLMVFPESDSQKRALDIDVEKLXQAELEKLLLDDSFEXKKXPVLPVXPILSPSFSAQLYFRPXIQRGQWPPGLPGPSXYALPSIYPSXYSKQAAFQNGFNPRMPXFPSXEPIYLSLPGQSPYFSYPLXPAXPFHPQGSLPIYRPVVSXDMAKLFDKIASXSEFLKNGKARXDLEIXDSKVSNLQVSPKSEDISKFDWLDLDPLSKPKVDNVEVLDHEEEKNVSSLLAKDPWDAVLLEERSXANCHLERKVNGKSLSVAXVXRSQSLNIRXXQLAKAQGHISQKDPNGXSSLPXGSSLLQEVEVQNEEMAAFCRSIXKLKXKFPYXNHRXNPGYLLSPVXAQRNICGENASVKVSIDIEGFQLPVXFXCDVSSXVEIIIMQALCWVHDDLNQVDVGSYVLKVCGQEEVLQNNHCLGSHEHIQNCRKWDXEIRLQLLXFSAMCQNLARXAEDDEXPVDLNKHLYQIEKPCKEAMXRHPVEELLDSYHNQVELALQIENQHRAVDQVIKAVRKICSALDGVEXLAIXESVKKLKRAVNLPRSKXADVXSLFGGEDXSRSSXRGSLNPENPVQVSINQLXAAIYDLLRLHANSGRSPXDCAQSSKSVKEAWXXXEQLQFXIFAAHGISSNWVSNYEKYYLICSLSHNGKDLFKPIQSKKVGXYKNFFYLIKWDELIIFPIQISQLPLESVLHLXLFGILNQSSGSSPDSNKQRKGPEALGKVSLPLFDFKRFLXCGXKLLYLWXSSHXNSVPGXVXKKGYVMERIVLQVDFPSPAFDIIYXXPQVDRSIIQQHNLEXLENDIKGKLLDILHKDSSLGLSKEDKAFLWEKRYYCFKHPNCLPKILASAPNWKWVNLAKXYSLLHQWPALYPLIALELLDSKFADQEVRSLAVXWIEAISDDELXDLLPQFVQALKYEIYLNSSLVQFLLSRALGNIQIAHNLYWLLKDALHDVQFSXRYEHVLGALLSVGGKRLREELLKQXKLVQLLGGVAEKVRQASGSARQVVLQRSMERVQSFFQKNKCRLPLKPSLVAKELNIKSCSFFSSNAVPLKVXMVNADPMGEEINVMFKVGEDLRQDMLALQMIKIMDKIWLKEGLDLRMVIFKCLSXGRDRGMVELVPASDXLRKIQVEYGVXGSFKDKPLAEWLRKYNPSEEEYEKASENFIYSCAGCCVAXYVLGICDRHNDNIMLRSXGHMFHIDFGKFLGHAQMFGSFKRDRAPFVLXSDMAYVINGGEKPXIRFQLFVDLCCQAYNLIRKQXNLFLNLLSLMIPSGLPELXSIQDLKYVRDALQPQXXDAEAXIFFXRLIESSLGSIAXKFNFFIHNLAQLRFSGLPSNDEPILSFSPKXYSFRQDGRIKEVSVFXYHKKYNPDKHYIYVVRILREGQIEPSFVFRXFDEFQELHNKLSIIFPLWKLPGFPNRMVLGRXHIKDVAAKRKIELNSYLQSLMNASXDVAECDLVCXFFHPLLRDEKAEGIARSADAGSFSPXPGQIGGAVKLSISYRNGXLFIMVMHIKDLVXEDGADPNPYVKXYLLPDNHKXSKRKXKISRKXRNPXFNEMLVYSGYSKEXLRQRELQLSVLSAESLRENFFLGGVXLPLKDFNLSKEXVKWYQLXAAXYL

SEQ ID NO: 20113 - protein, 173 aa, Homo sapiens
  MOD_RES (63)..(63): Selenocysteine
  MOD_RES (96)..(96): Selenocysteine
  MOD_RES (136)..(136): Selenocysteine
  MOD_RES (144)..(144): Selenocysteine
  MOD_RES (159)..(159): Selenocysteine
  MOD_RES (170)..(170): Selenocysteine
  MOD_RES (172)..(172): Selenocysteine
MRPWSSPAQLVAGAQPAGRGDPLGPRPIPPPRFRRASSQREPPYPRPAEPALELAGSKCQPDXPAASLCPADSPSQHRVMPPGPASWANVGSRPHXVANGHELFEVSEERDEEVAAFCHMLDILRSGSDIQDYFLXGYVWSAVXPSPEHLGDEVNLKVXVLCDRLQEALXFXC

SEQ ID NO: 20114 - protein, 60 aa, Homo sapiens
  MOD_RES (4)..(4): Selenocysteine
MSSXQGNGEHWKSLESVGISRKELAMAEALQMEYDALSRLRHDKEENRAKQNADPSLISW

SEQ ID NO: 20115 - protein, 131 aa, Homo sapiens
  MOD_RES (4)..(4): Selenocysteine
  MOD_RES (76)..(76): Selenocysteine
  MOD_RES (90)..(90): Selenocysteine
  MOD_RES (107)..(107): Selenocysteine
MSSXQGNGEHWKSLESVGISRKELAMAEALQMEYDALSRLRHDKEENRAKQNADPSLISWDEPGVDFYSKPAGRRXDLKLLRGLSGSDPXLNYNSLSPQEGPPNHSXSQGPQPGSDPWPKGSLSGDYLYIF

SEQ ID NO: 20116 - protein, 1606 aa, Homo sapiens
  MOD_RES (4)..(4): Selenocysteine
  MOD_RES (76)..(76): Selenocysteine
  MOD_RES (90)..(90): Selenocysteine
  MOD_RES (107)..(107): Selenocysteine
  MOD_RES (168)..(168): Selenocysteine
  MOD_RES (191)..(191): Selenocysteine
  MOD_RES (236)..(236): Selenocysteine
  MOD_RES (243)..(243): Selenocysteine
  MOD_RES (253)..(253): Selenocysteine
  MOD_RES (269)..(269): Selenocysteine
  MOD_RES (279)..(279): Selenocysteine
  MOD_RES (288)..(288): Selenocysteine
  MOD_RES (300)..(300): Selenocysteine
  MOD_RES (318)..(318): Selenocysteine
  MOD_RES (358)..(358): Selenocysteine
  MOD_RES (366)..(366): Selenocysteine
  MOD_RES (381)..(381): Selenocysteine
  MOD_RES (392)..(392): Selenocysteine
  MOD_RES (394)..(394): Selenocysteine
  MOD_RES (400)..(400): Selenocysteine
  MOD_RES (408)..(408): Selenocysteine
  MOD_RES (412)..(412): Selenocysteine
  MOD_RES (474)..(474): Selenocysteine
  MOD_RES (483)..(483): Selenocysteine
  MOD_RES (498)..(498): Selenocysteine
  MOD_RES (510)..(510): Selenocysteine
  MOD_RES (548)..(548): Selenocysteine
  MOD_RES (552)..(552): Selenocysteine
  MOD_RES (590)..(590): Selenocysteine
  MOD_RES (603)..(603): Selenocysteine
  MOD_RES (610)..(610): Selenocysteine
  MOD_RES (634)..(634): Selenocysteine
  MOD_RES (638)..(638): Selenocysteine
  MOD_RES (647)..(647): Selenocysteine
  MOD_RES (671)..(671): Selenocysteine
  MOD_RES (703)..(703): Selenocysteine
  MOD_RES (708)..(708): Selenocysteine
  MOD_RES (737)..(738): Selenocysteine
  MOD_RES (748)..(748): Selenocysteine
  MOD_RES (760)..(760): Selenocysteine
  MOD_RES (787)..(787): Selenocysteine
  MOD_RES (795)..(795): Selenocysteine
  MOD_RES (832)..(832): Selenocysteine
  MOD_RES (851)..(851): Selenocysteine
  MOD_RES (865)..(865): Selenocysteine
  MOD_RES (923)..(923): Selenocysteine
  MOD_RES (993)..(993): Selenocysteine
  MOD_RES (1066)..(1066): Selenocysteine
  MOD_RES (1094)..(1094): Selenocysteine
  MOD_RES (1109)..(1109): Selenocysteine
  MOD_RES (1120)..(1120): Selenocysteine
  MOD_RES (1160)..(1160): Selenocysteine
  MOD_RES (1177)..(1178): Selenocysteine
  MOD_RES (1209)..(1209): Selenocysteine
  MOD_RES (1244)..(1244): Selenocysteine
  MOD_RES (1280)..(1280): Selenocysteine
  MOD_RES (1285)..(1286): Selenocysteine
  MOD_RES (1289)..(1289): Selenocysteine
  MOD_RES (1301)..(1301): Selenocysteine
  MOD_RES (1316)..(1316): Selenocysteine
  MOD_RES (1323)..(1323): Selenocysteine
  MOD_RES (1330)..(1330): Selenocysteine
  MOD_RES (1332)..(1332): Selenocysteine
  MOD_RES (1368)..(1368): Selenocysteine
  MOD_RES (1372)..(1372): Selenocysteine
  MOD_RES (1377)..(1377): Selenocysteine
  MOD_RES (1444)..(1444): Selenocysteine
  MOD_RES (1458)..(1458): Selenocysteine
  MOD_RES (1468)..(1468): Selenocysteine
  MOD_RES (1525)..(1526): Selenocysteine
  MOD_RES (1530)..(1530): Selenocysteine
  MOD_RES (1536)..(1536): Selenocysteine
  MOD_RES (1540)..(1540): Selenocysteine
  MOD_RES (1593)..(1593): Selenocysteine
  MOD_RES (1605)..(1605): Selenocysteine
MSSXQGNGEHWKSLESVGISRKELAMAEALQMEYDALSRLRHDKEENRAKQNADPSLISWDEPGVDFYSKPAGRRXDLKLLRGLSGSDPXLNYNSLSPQEGPPNHSXSQGPQPGSDPWPKGSLSGDYLYIFDGSDGGVSSSPGPGDIEGSCKKLSPPPLPPRASIWDXPPLPPRKGSPSSSKISQPSDINXFSLVEQLPGKLLEHRILEEEEVLGGGGQGRLLGSVDYDGINDAIXRLNLKSXYDAEMLRDAXRGWKEGRGPLDFSKDXSGKPVARSKXMPPQVPPRXYASRYGNRKNAXPGKNRRISAAPVGSRPHXVANGHELFEVSEERDEEVAAFCHMLDILRSGSDIQDYFLXGYVWSAVXPSPEHLGDEVNLKVXVLCDRLQEALXFXCNCSSXVDLLIYQXLCYXHDDLRNVDVGDFVLKPCGLEEFLQNKHALGSHEYIQYCRKFDIDIRLQLMEQKVVRSDLARXVNDDQSPSXLNYLVHLQERPVKQXISRQALSLLFDXYHNEVDAFLLADGDFPLKADRVVQSVKAICNALAAVEXPEIXSALNQLPPCPSRMQPKIQKDPSVLAVRENREKVVEALXAAILDLVELYCNXFNADFQXAVPGSRKHDLVQEACHFARSLAFXVYAXHRIPIIWAXSYEDFYLSCSLSHGGKELCSPLQXRRAHFSKYLFHLIVWDQQICFPVQVNRLPREXLLCAXLYALPIPPPGSSSEANKQRRVPEALGWVXXPLFNFRQVLXCGRKLLGLWPAXQENPSARWSAPNFHQPDSVILQIDFPXSAFDIKFXSPPGDKFSPRYEFGSLREEDQRKLKDIMQKESLYWLXDADKKRLWEKRYYCHSEWXHMNHQDALGLLHAXFPDQEVRRMAVQWIGSLSDAELLDYLPQLVQALKYECYLDSPLVRFLLKRAVSDLRVXHYFFWLLKDGLKDSQFSIRYQYLLAALLCCCGKGLREEFNRQCWLVNALAKLAQQVREAAPSARQGILRXGLEEVKQFFALNGSCRLPLSPSLLVKGIVPRDCSYFNSNAVPLKLSFQNVDPLGENIRVIFKCGDDLRQDMLXLQMIRIMSKIWVQEGLDMRMVIFRCFSXGRGRGMVEMIPNAEXLRKIQVEHGVXGSFKDRPLADWLQKHNPGEDEYEKAVENFIYSCAGCCVAXYVLGICDRHNDNIMLKXXGHMFHIDFGRFLGHAQMFGNIKRDRAPFVFXSDMAYVINGGDKPSSRFHDFVDLCCQAYNLIRKHXHLFLNLLGLMLSCGIPELSDLEDLKYVYDALRPQDXEANAXXYFXRLIESSLGSVAXKLNFFIHNLAQMKFXGSDDRLXLSFASRXHXLKSSGRISDVFLCRHEKIFHPNKGYIYVVKVMRENXHEAXYIQRXFEEFQELHNKLRLLFPSSHLPSFPSRFVIGRSRGEAVAERRREELNGYIWHLIHAPPEVAECDLVYXFFHPLPRDEKAMGXSPAPKSSDGXWARPVGKVGGEVKLSISYKNNKLFIMVMHIRGLQLLQDGNDPDPYVKIYLLPDPQKXXKRKXKVARKXCNPXYNEMLVYDGIPKGDLQQRELQLSVLSEQGFWENVLLGEVNIRLRELDLAQEKXGWFALGSRSHGXL

SEQ ID NO: 20117 - protein, 1634 aa, Homo sapiens
  MOD_RES (4)..(4): Selenocysteine
  MOD_RES (76)..(76): Selenocysteine
  MOD_RES (90)..(90): Selenocysteine
  MOD_RES (107)..(107): Selenocysteine
  MOD_RES (168)..(168): Selenocysteine
  MOD_RES (191)..(191): Selenocysteine
  MOD_RES (236)..(236): Selenocysteine
  MOD_RES (243)..(243): Selenocysteine
  MOD_RES (253)..(253): Selenocysteine
  MOD_RES (269)..(269): Selenocysteine
  MOD_RES (279)..(279): Selenocysteine
  MOD_RES (288)..(288): Selenocysteine
  MOD_RES (300)..(300): Selenocysteine
  MOD_RES (318)..(318): Selenocysteine
  MOD_RES (358)..(358): Selenocysteine
  MOD_RES (366)..(366): Selenocysteine
  MOD_RES (381)..(381): Selenocysteine
  MOD_RES (392)..(392): Selenocysteine
  MOD_RES (394)..(394): Selenocysteine
  MOD_RES (400)..(400): Selenocysteine
  MOD_RES (408)..(408): Selenocysteine
  MOD_RES (412)..(412): Selenocysteine
  MOD_RES (474)..(474): Selenocysteine
  MOD_RES (483)..(483): Selenocysteine
  MOD_RES (498)..(498): Selenocysteine
  MOD_RES (510)..(510): Selenocysteine
  MOD_RES (548)..(548): Selenocysteine
  MOD_RES (552)..(552): Selenocysteine
  MOD_RES (590)..(590): Selenocysteine
  MOD_RES (603)..(603): Selenocysteine
  MOD_RES (610)..(610): Selenocysteine
  MOD_RES (634)..(634): Selenocysteine
  MOD_RES (638)..(638): Selenocysteine
  MOD_RES (647)..(647): Selenocysteine
  MOD_RES (671)..(671): Selenocysteine
  MOD_RES (703)..(703): Selenocysteine
  MOD_RES (708)..(708): Selenocysteine
  MOD_RES (737)..(738): Selenocysteine
  MOD_RES (748)..(748): Selenocysteine
  MOD_RES (760)..(760): Selenocysteine
  MOD_RES (787)..(787): Selenocysteine
  MOD_RES (795)..(795): Selenocysteine
  MOD_RES (832)..(832): Selenocysteine
  MOD_RES (879)..(879): Selenocysteine
  MOD_RES (893)..(893): Selenocysteine
  MOD_RES (951)..(951): Selenocysteine
  MOD_RES (1021)..(1021): Selenocysteine
  MOD_RES (1094)..(1094): Selenocysteine
  MOD_RES (1122)..(1122): Selenocysteine
  MOD_RES (1137)..(1137): Selenocysteine
  MOD_RES (1148)..(1148): Selenocysteine
  MOD_RES (1188)..(1188): Selenocysteine
  MOD_RES (1205)..(1206): Selenocysteine
  MOD_RES (1237)..(1237): Selenocysteine
  MOD_RES (1272)..(1272): Selenocysteine
  MOD_RES (1308)..(1308): Selenocysteine
  MOD_RES (1313)..(1314): Selenocysteine
  MOD_RES (1317)..(1317): Selenocysteine
  MOD_RES (1329)..(1329): Selenocysteine
  MOD_RES (1344)..(1344): Selenocysteine
  MOD_RES (1351)..(1351): Selenocysteine
  MOD_RES (1358)..(1358): Selenocysteine
  MOD_RES (1360)..(1360): Selenocysteine
  MOD_RES (1396)..(1396): Selenocysteine
  MOD_RES (1400)..(1400): Selenocysteine
  MOD_RES (1405)..(1405): Selenocysteine
  MOD_RES (1472)..(1472): Selenocysteine
  MOD_RES (1486)..(1486): Selenocysteine
  MOD_RES (1496)..(1496): Selenocysteine
  MOD_RES (1553)..(1554): Selenocysteine
  MOD_RES (1558)..(1558): Selenocysteine
  MOD_RES (1564)..(1564): Selenocysteine
  MOD_RES (1568)..(1568): Selenocysteine
  MOD_RES (1621)..(1621): Selenocysteine
  MOD_RES (1633)..(1633): Selenocysteine
MSSXQGNGEHWKSLESVGISRKELAMAEALQMEYDALSRLRHDKEENRAKQNADPSLISWDEPGVDFYSKPAGRRXDLKLLRGLSGSDPXLNYNSLSPQEGPPNHSXSQGPQPGSDPWPKGSLSGDYLYIFDGSDGGVSSSPGPGDIEGSCKKLSPPPLPPRASIWDXPPLPPRKGSPSSSKISQPSDINXFSLVEQLPGKLLEHRILEEEEVLGGGGQGRLLGSVDYDGINDAIXRLNLKSXYDAEMLRDAXRGWKEGRGPLDFSKDXSGKPVARSKXMPPQVPPRXYASRYGNRKNAXPGKNRRISAAPVGSRPHXVANGHELFEVSEERDEEVAAFCHMLDILRSGSDIQDYFLXGYVWSAVXPSPEHLGDEVNLKVXVLCDRLQEALXFXCNCSSXVDLLIYQXLCYXHDDLRNVDVGDFVLKPCGLEEFLQNKHALGSHEYIQYCRKFDIDIRLQLMEQKVVRSDLARXVNDDQSPSXLNYLVHLQERPVKQXISRQALSLLFDXYHNEVDAFLLADGDFPLKADRVVQSVKAICNALAAVEXPEIXSALNQLPPCPSRMQPKIQKDPSVLAVRENREKVVEALXAAILDLVELYCNXFNADFQXAVPGSRKHDLVQEACHFARSLAFXVYAXHRIPIIWAXSYEDFYLSCSLSHGGKELCSPLQXRRAHFSKYLFHLIVWDQQICFPVQVNRLPREXLLCAXLYALPIPPPGSSSEANKQRRVPEALGWVXXPLFNFRQVLXCGRKLLGLWPAXQENPSARWSAPNFHQPDSVILQIDFPXSAFDIKFXSPPGDKFSPRYEFGSLREEDQRKLKDIMQKESLYWLXDADKKRLWEKRYYCHSEVSSLPLVLASAPSWEWACLPDIYVLLKQWXHMNHQDALGLLHAXFPDQEVRRMAVQWIGSLSDAELLDYLPQLVQALKYECYLDSPLVRFLLKRAVSDLRVXHYFFWLLKDGLKDSQFSIRYQYLLAALLCCCGKGLREEFNRQCWLVNALAKLAQQVREAAPSARQGILRXGLEEVKQFFALNGSCRLPLSPSLLVKGIVPRDCSYFNSNAVPLKLSFQNVDPLGENIRVIFKCGDDLRQDMLXLQMIRIMSKIWVQEGLDMRMVIFRCFSXGRGRGMVEMIPNAEXLRKIQVEHGVXGSFKDRPLADWLQKHNPGEDEYEKAVENFIYSCAGCCVAXYVLGICDRHNDNIMLKXXGHMFHIDFGRFLGHAQMFGNIKRDRAPFVFXSDMAYVINGGDKPSSRFHDFVDLCCQAYNLIRKHXHLFLNLLGLMLSCGIPELSDLEDLKYVYDALRPQDXEANAXXYFXRLIESSLGSVAXKLNFFIHNLAQMKFXGSDDRLXLSFASRXHXLKSSGRISDVFLCRHEKIFHPNKGYIYVVKVMRENXHEAXYIQRXFEEFQELHNKLRLLFPSSHLPSFPSRFVIGRSRGEAVAERRREELNGYIWHLIHAPPEVAECDLVYXFFHPLPRDEKAMGXSPAPKSSDGXWARPVGKVGGEVKLSISYKNNKLFIMVMHIRGLQLLQDGNDPDPYVKIYLLPDPQKXXKRKXKVARKXCNPXYNEMLVYDGIPKGDLQQRELQLSVLSEQGFWENVLLGEVNIRLRELDLAQEKXGWFALGSRSHGXL

SEQ ID NO: 20118 - protein, 583 aa, Homo sapiens
  MOD_RES (7)..(7): Selenocysteine
  MOD_RES (62)..(62): Selenocysteine
  MOD_RES (67)..(67): Selenocysteine
  MOD_RES (74)..(74): Selenocysteine
  MOD_RES (90)..(90): Selenocysteine
  MOD_RES (120)..(120): Selenocysteine
  MOD_RES (149)..(149): Selenocysteine
  MOD_RES (178)..(178): Selenocysteine
  MOD_RES (220)..(220): Selenocysteine
  MOD_RES (243)..(243): Selenocysteine
  MOD_RES (274)..(276): Selenocysteine
  MOD_RES (286)..(286): Selenocysteine
  MOD_RES (298)..(298): Selenocysteine
  MOD_RES (323)..(323): Selenocysteine
  MOD_RES (408)..(408): Selenocysteine
  MOD_RES (423)..(423): Selenocysteine
  MOD_RES (446)..(446): Selenocysteine
  MOD_RES (450)..(450): Selenocysteine
  MOD_RES (473)..(473): Selenocysteine
  MOD_RES (483)..(484): Selenocysteine
  MOD_RES (488)..(488): Selenocysteine
  MOD_RES (514)..(514): Selenocysteine
  MOD_RES (528)..(528): Selenocysteine
  MOD_RES (538)..(538): Selenocysteine
  MOD_RES (549)..(549): Selenocysteine
  MOD_RES (553)..(553): Selenocysteine
  MOD_RES (583)..(583): Selenocysteine
MAYSWQXDPNPNESHEKQYEHQEFLFVNQPHSSSQVSLGFDQIVDEISGKIPHYESEIDENXFFVPXAPKWDSXGHSLNEAHQISLNEFXSKSRELSWHQVSKAPAIGFSPSVLPKPQNXNKECSWGSPIGKHHGADDSRFSILAPSFXSLDKINLEKELENENHNYHIGFESSIPPXNSSFSSDFMPKEENKRSGHVNIVEPSLMLLKGSLQPGMWESXWQKNIESIGCSIQLVEVPQSSNXSLASFCNKVKKIRERYHAADVNFNSGKIWSXXXAFPYQLFSKXKFNIHIFIDNSXQPLHFMPCANYLVKDLIAEILHFCXNDQLLPKDHILSVCGSEEFLQNDHCLGSHKMFQKDKSVIQLHLQKSREAPGKLSRKHEEDHSQFYLNQLLEFMHIWKVSRQCLLXLIRKYDFHLKYLLKXQENVYNIIEEVKKICSVLGCVEXKQIXDAVNELSLILQRKGENFYQSSEXSAKGLIEKVXXELSXSIYQLINVYCNSFYADFQPVNVPRCXSYLNPGLPSHLSFXVYAAHNIPEXWVHSYKAFSFXCWLXYAGKKLCQVRNYRNIPDKKLFFFLVNWNEX

SEQ ID NO: 20119 - protein, 1445 aa, Homo sapiens
  MOD_RES (7)..(7): Selenocysteine
  MOD_RES (62)..(62): Selenocysteine
  MOD_RES (67)..(67): Selenocysteine
  MOD_RES (74)..(74): Selenocysteine
  MOD_RES (90)..(90): Selenocysteine
  MOD_RES (120)..(120): Selenocysteine
  MOD_RES (149)..(149): Selenocysteine
  MOD_RES (178)..(178): Selenocysteine
  MOD_RES (220)..(220): Selenocysteine
  MOD_RES (243)..(243): Selenocysteine
  MOD_RES (274)..(276): Selenocysteine
  MOD_RES (286)..(286): Selenocysteine
  MOD_RES (298)..(298): Selenocysteine
  MOD_RES (323)..(323): Selenocysteine
  MOD_RES (408)..(408): Selenocysteine
  MOD_RES (423)..(423): Selenocysteine
  MOD_RES (446)..(446): Selenocysteine
  MOD_RES (450)..(450): Selenocysteine
  MOD_RES (473)..(473): Selenocysteine
  MOD_RES (483)..(484): Selenocysteine
  MOD_RES (488)..(488): Selenocysteine
  MOD_RES (514)..(514): Selenocysteine
  MOD_RES (528)..(528): Selenocysteine
  MOD_RES (538)..(538): Selenocysteine
  MOD_RES (559)..(559): Selenocysteine
  MOD_RES (569)..(569): Selenocysteine
  MOD_RES (578)..(578): Selenocysteine
  MOD_RES (598)..(598): Selenocysteine
  MOD_RES (609)..(609): Selenocysteine
  MOD_RES (622)..(622): Selenocysteine
  MOD_RES (630)..(630): Selenocysteine
  MOD_RES (665)..(665): Selenocysteine
  MOD_RES (705)..(705): Selenocysteine
  MOD_RES (711)..(711): Selenocysteine
  MOD_RES (717)..(717): Selenocysteine
  MOD_RES (729)..(729): Selenocysteine
  MOD_RES (873)..(873): Selenocysteine
  MOD_RES (896)..(896): Selenocysteine
  MOD_RES (905)..(905): Selenocysteine
  MOD_RES (960)..(960): Selenocysteine
  MOD_RES (975)..(975): Selenocysteine
  MOD_RES (993)..(993): Selenocysteine
  MOD_RES (1026)..(1026): Selenocysteine
  MOD_RES (1042)..(1042): Selenocysteine
  MOD_RES (1061)..(1061): Selenocysteine
  MOD_RES (1075)..(1075): Selenocysteine
  MOD_RES (1083)..(1083): Selenocysteine
  MOD_RES (1146)..(1146): Selenocysteine
  MOD_RES (1151)..(1151): Selenocysteine
  MOD_RES (1155)..(1155): Selenocysteine
  MOD_RES (1175)..(1175): Selenocysteine
  MOD_RES (1188)..(1188): Selenocysteine
  MOD_RES (1191)..(1191): Selenocysteine
  MOD_RES (1201)..(1202): Selenocysteine
  MOD_RES (1209)..(1209): Selenocysteine
  MOD_RES (1226)..(1226): Selenocysteine
  MOD_RES (1232)..(1232): Selenocysteine
  MOD_RES (1235)..(1235): Selenocysteine
  MOD_RES (1257)..(1257): Selenocysteine
  MOD_RES (1270)..(1270): Selenocysteine
  MOD_RES (1295)..(1295): Selenocysteine
  MOD_RES (1312)..(1312): Selenocysteine
  MOD_RES (1344)..(1344): Selenocysteine
  MOD_RES (1381)..(1381): Selenocysteine
  MOD_RES (1388)..(1388): Selenocysteine
  MOD_RES (1391)..(1391): Selenocysteine
  MOD_RES (1402)..(1402): Selenocysteine
  MOD_RES (1417)..(1417): Selenocysteine
MAYSWQXDPNPNESHEKQYEHQEFLFVNQPHSSSQVSLGFDQIVDEISGKIPHYESEIDENXFFVPXAPKWDSXGHSLNEAHQISLNEFXSKSRELSWHQVSKAPAIGFSPSVLPKPQNXNKECSWGSPIGKHHGADDSRFSILAPSFXSLDKINLEKELENENHNYHIGFESSIPPXNSSFSSDFMPKEENKRSGHVNIVEPSLMLLKGSLQPGMWESXWQKNIESIGCSIQLVEVPQSSNXSLASFCNKVKKIRERYHAADVNFNSGKIWSXXXAFPYQLFSKXKFNIHIFIDNSXQPLHFMPCANYLVKDLIAEILHFCXNDQLLPKDHILSVCGSEEFLQNDHCLGSHKMFQKDKSVIQLHLQKSREAPGKLSRKHEEDHSQFYLNQLLEFMHIWKVSRQCLLXLIRKYDFHLKYLLKXQENVYNIIEEVKKICSVLGCVEXKQIXDAVNELSLILQRKGENFYQSSEXSAKGLIEKVXXELSXSIYQLINVYCNSFYADFQPVNVPRCXSYLNPGLPSHLSFXVYAAHNIPEXWVHRINFPLEIKSLPRESMLXVKLFGIACAXNNANLLAWXCLPLFPKEKSILGSMLFSMXLQSEPPVEMIXPGVWDVSQPSPVXLQIDFPAXGWEYMKPDSEENRSNLEEPLKECIKHIARLSQKQXPLLLSEEKKRYLWFYRFYCNNENCSLPLVLGSAPGWDERXVSEMHXILRRWXFSQPLEALGLLXSSFPDQEIRKVAVQQLDNLLNDELLEYLPQLVQAVKFEWNLESPLVQLLLHRSLQSIQVAHRLYWLLKNAENEAYFKSWYQKLLAALQFCAGKALNDEFSKEQKLIKILGDIGERVKSASDHQRQEVLKKEIGRLEEFFQDVNXCHLPLNPALCIKGIDHDACSYFXSNALPLKIXFINANPMGKNISIIFKAGDDLRQDMLVLQLIQVMDNIWLQEGLDMQMIIYRCLSXGKDQGLVQMVPDAVXLAKIHRHSGLIGPLKENXIKKWFSQHNHLKADYEKALRNFFYSCAGWCVVXFILGVCDRHNDNIMLXKSGHMFHIDFGKFLGHAQXFGGIKRDRAPFIFXSEMEYFIXEGGKNPQHFQDFVELCCRAYNIIRKHSQLLLNLLEMMLYAGLPELSGIQDLKYVYNNLRPQDXDLEAXSHFXKKIKESLECFPVKLNNLIHXLAQMSAISPAKSXSQXFPQESCLLSXXRSIERAXILGFSKKSSNLYLIQVXHSNNEXSLXEKSFEQFSKLHSQLQKQFASLXLPEFPHWWHLPFXNSDHRRFRDLNHYMEQILNVSHEVXNSDCVLSFFLSEAVQQXVEESSPVYLGEKFPDKKPKVQLVISYEDVKLXILVKHMKNIHLPDGSAPSAHVEFYLLPYPSEVRRRKXKSVPKCXDPXYNEIVVYDEVXELQGHVLMLIVKSKXVFVGAINIRLCSVPLDKEKWYPLGNSII

SEQ ID NO: 20120 - protein, 1486 aa, Homo sapiens
  MOD_RES (7)..(7): Selenocysteine
  MOD_RES (62)..(62): Selenocysteine
  MOD_RES (67)..(67): Selenocysteine
  MOD_RES (74)..(74): Selenocysteine
  MOD_RES (90)..(90): Selenocysteine
  MOD_RES (120)..(120): Selenocysteine
  MOD_RES (149)..(149): Selenocysteine
  MOD_RES (178)..(178): Selenocysteine
  MOD_RES (220)..(220): Selenocysteine
  MOD_RES (243)..(243): Selenocysteine
  MOD_RES (274)..(276): Selenocysteine
  MOD_RES (286)..(286): Selenocysteine
  MOD_RES (298)..(298): Selenocysteine
  MOD_RES (323)..(323): Selenocysteine
  MOD_RES (408)..(408): Selenocysteine
  MOD_RES (423)..(423): Selenocysteine
  MOD_RES (446)..(446): Selenocysteine
  MOD_RES (450)..(450): Selenocysteine
  MOD_RES (473)..(473): Selenocysteine
  MOD_RES (483)..(484): Selenocysteine
  MOD_RES (488)..(488): Selenocysteine
  MOD_RES (514)..(514): Selenocysteine
  MOD_RES (528)..(528): Selenocysteine
  MOD_RES (538)..(538): Selenocysteine
  MOD_RES (549)..(549): Selenocysteine
  MOD_RES (553)..(553): Selenocysteine
  MOD_RES (583)..(583): Selenocysteine
  MOD_RES (600)..(600): Selenocysteine
  MOD_RES (610)..(610): Selenocysteine
  MOD_RES (619)..(619): Selenocysteine
  MOD_RES (639)..(639): Selenocysteine
  MOD_RES (650)..(650): Selenocysteine
  MOD_RES (663)..(663): Selenocysteine
  MOD_RES (671)..(671): Selenocysteine
  MOD_RES (706)..(706): Selenocysteine
  MOD_RES (746)..(746): Selenocysteine
  MOD_RES (752)..(752): Selenocysteine
  MOD_RES (758)..(758): Selenocysteine
  MOD_RES (770)..(770): Selenocysteine
  MOD_RES (914)..(914): Selenocysteine
  MOD_RES (937)..(937): Selenocysteine
  MOD_RES (946)..(946): Selenocysteine
  MOD_RES (1001)..(1001): Selenocysteine
  MOD_RES (1016)..(1016): Selenocysteine
  MOD_RES (1034)..(1034): Selenocysteine
  MOD_RES (1067)..(1067): Selenocysteine
  MOD_RES (1083)..(1083): Selenocysteine
  MOD_RES (1102)..(1102): Selenocysteine
  MOD_RES (1116)..(1116): Selenocysteine
  MOD_RES (1124)..(1124): Selenocysteine
  MOD_RES (1187)..(1187): Selenocysteine
  MOD_RES (1192)..(1192): Selenocysteine
  MOD_RES (1196)..(1196): Selenocysteine
  MOD_RES (1216)..(1216): Selenocysteine
  MOD_RES (1229)..(1229): Selenocysteine
  MOD_RES (1232)..(1232): Selenocysteine
  MOD_RES (1242)..(1243): Selenocysteine
  MOD_RES (1250)..(1250): Selenocysteine
  MOD_RES (1267)..(1267): Selenocysteine
  MOD_RES (1273)..(1273): Selenocysteine
  MOD_RES (1276)..(1276): Selenocysteine
  MOD_RES (1298)..(1298): Selenocysteine
  MOD_RES (1311)..(1311): Selenocysteine
  MOD_RES (1336)..(1336): Selenocysteine
  MOD_RES (1353)..(1353): Selenocysteine
  MOD_RES (1385)..(1385): Selenocysteine
  MOD_RES (1422)..(1422): Selenocysteine
  MOD_RES (1429)..(1429): Selenocysteine
  MOD_RES (1432)..(1432): Selenocysteine
  MOD_RES (1443)..(1443): Selenocysteine
  MOD_RES (1458)..(1458): Selenocysteine
MAYSWQXDPNPNESHEKQYEHQEFLFVNQPHSSSQVSLGFDQIVDEISGKIPHYESEIDENXFFVPXAPKWDSXGHSLNEAHQISLNEFXSKSRELSWHQVSKAPAIGFSPSVLPKPQNXNKECSWGSPIGKHHGADDSRFSILAPSFXSLDKINLEKELENENHNYHIGFESSIPPXNSSFSSDFMPKEENKRSGHVNIVEPSLMLLKGSLQPGMWESXWQKNIESIGCSIQLVEVPQSSNXSLASFCNKVKKIRERYHAADVNFNSGKIWSXXXAFPYQLFSKXKFNIHIFIDNSXQPLHFMPCANYLVKDLIAEILHFCXNDQLLPKDHILSVCGSEEFLQNDHCLGSHKMFQKDKSVIQLHLQKSREAPGKLSRKHEEDHSQFYLNQLLEFMHIWKVSRQCLLXLIRKYDFHLKYLLKXQENVYNIIEEVKKICSVLGCVEXKQIXDAVNELSLILQRKGENFYQSSEXSAKGLIEKVXXELSXSIYQLINVYCNSFYADFQPVNVPRCXSYLNPGLPSHLSFXVYAAHNIPEXWVHSYKAFSFXCWLXYAGKKLCQVRNYRNIPDKKLFFFLVNWNEXINFPLEIKSLPRESMLXVKLFGIACAXNNANLLAWXCLPLFPKEKSILGSMLFSMXLQSEPPVEMIXPGVWDVSQPSPVXLQIDFPAXGWEYMKPDSEENRSNLEEPLKECIKHIARLSQKQXPLLLSEEKKRYLWFYRFYCNNENCSLPLVLGSAPGWDERXVSEMHXILRRWXFSQPLEALGLLXSSFPDQEIRKVAVQQLDNLLNDELLEYLPQLVQAVKFEWNLESPLVQLLLHRSLQSIQVAHRLYWLLKNAENEAYFKSWYQKLLAALQFCAGKALNDEFSKEQKLIKILGDIGERVKSASDHQRQEVLKKEIGRLEEFFQDVNXCHLPLNPALCIKGIDHDACSYFXSNALPLKIXFINANPMGKNISIIFKAGDDLRQDMLVLQLIQVMDNIWLQEGLDMQMIIYRCLSXGKDQGLVQMVPDAVXLAKIHRHSGLIGPLKENXIKKWFSQHNHLKADYEKALRNFFYSCAGWCVVXFILGVCDRHNDNIMLXKSGHMFHIDFGKFLGHAQXFGGIKRDRAPFIFXSEMEYFIXEGGKNPQHFQDFVELCCRAYNIIRKHSQLLLNLLEMMLYAGLPELSGIQDLKYVYNNLRPQDXDLEAXSHFXKKIKESLECFPVKLNNLIHXLAQMSAISPAKSXSQXFPQESCLLSXXRSIERAXILGFSKKSSNLYLIQVXHSNNEXSLXEKSFEQFSKLHSQLQKQFASLXLPEFPHWWHLPFXNSDHRRFRDLNHYMEQILNVSHEVXNSDCVLSFFLSEAVQQXVEESSPVYLGEKFPDKKPKVQLVISYEDVKLXILVKHMKNIHLPDGSAPSAHVEFYLLPYPSEVRRRKXKSVPKCXDPXYNEIVVYDEVXELQGHVLMLIVKSKXVFVGAINIRLCSVPLDKEKWYPLGNSII

SEQ ID NO: 20121 - protein, 231 aa, Homo sapiens
  MOD_RES (7)..(7): Selenocysteine
  MOD_RES (62)..(62): Selenocysteine
  MOD_RES (67)..(67): Selenocysteine
  MOD_RES (74)..(74): Selenocysteine
  MOD_RES (90)..(90): Selenocysteine
  MOD_RES (120)..(120): Selenocysteine
  MOD_RES (149)..(149): Selenocysteine
  MOD_RES (178)..(178): Selenocysteine
  MOD_RES (220)..(220): Selenocysteine
MAYSWQXDPNPNESHEKQYEHQEFLFVNQPHSSSQVSLGFDQIVDEISGKIPHYESEIDENXFFVPXAPKWDSXGHSLNEAHQISLNEFXSKSRELSWHQVSKAPAIGFSPSVLPKPQNXNKECSWGSPIGKHHGADDSRFSILAPSFXSLDKINLEKELENENHNYHIGFESSIPPXNSSFSSDFMPKEENKRSGHVNIVEPSLMLLKGSLQPGMWESXWQKNIEVVPFS

SEQ ID NO: 20122 - protein, 187 aa, Homo sapiens
  MOD_RES (1)..(1): Any amino acid
  MOD_RES (12)..(12): Selenocysteine
  MOD_RES (35)..(35): Selenocysteine
  MOD_RES (66)..(68): Selenocysteine
  MOD_RES (78)..(78): Selenocysteine
  MOD_RES (90)..(90): Selenocysteine
  MOD_RES (115)..(115): Selenocysteine
  MOD_RES (174)..(174): Selenocysteine
  MOD_RES (183)..(183): Selenocysteine
XGSLQPGMWESXWQKNIESIGCSIQLVEVPQSSNXSLASFCNKVKKIRERYHAADVNFNSGKIWSXXXAFPYQLFSKXKFNIHIFIDNSXQPLHFMPCANYLVKDLIAEILHFCXNDQLLPKDHILSVCGSEEFLQNDHCLGSHKMFQKDKSVIQLHLQKSREAPGKLSRKVRXQQEGSCLHXGKGL

SEQ ID NO: 20123 - protein, 103 aa, Homo sapiens
  MOD_RES (15)..(15): Selenocysteine
  MOD_RES (22)..(22): Selenocysteine
  MOD_RES (24)..(24): Selenocysteine
  MOD_RES (43)..(43): Selenocysteine
  MOD_RES (71)..(71): Selenocysteine
  MOD_RES (83)..(83): Selenocysteine
  MOD_RES (99)..(99): Selenocysteine
  MOD_RES (101)..(101): Selenocysteine
MDKLLRKENLDLKLXPYKVLAXSXKHGFMQFIQSVPVAEVLDXEGSIQNFFRKYAPSENGPNGISAEVMDXYVKSCAGYCVIXYILGVGDRHLDNLLLXKXGG

SEQ ID NO: 20124 - protein, 104 aa, Homo sapiens
  MOD_RES (15)..(15): Selenocysteine
  MOD_RES (22)..(22): Selenocysteine
  MOD_RES (24)..(24): Selenocysteine
  MOD_RES (43)..(43): Selenocysteine
  MOD_RES (71)..(71): Selenocysteine
  MOD_RES (83)..(83): Selenocysteine
  MOD_RES (99)..(99): Selenocysteine
  MOD_RES (101)..(101): Selenocysteine
MDKLLRKENLDLKLXPYKVLAXSXKHGFMQFIQSVPVAEVLDXEGSIQNFFRKYAPSENGPNGISAEVMDXYVKSCAGYCVIXYILGVGDRHLDNLLLXKXGNN

SEQ ID NO: 20125 - protein, 887 aa, Homo sapiens
  MOD_RES (53)..(53): Selenocysteine
  MOD_RES (60)..(60): Selenocysteine
  MOD_RES (76)..(76): Selenocysteine
  MOD_RES (83)..(83): Selenocysteine
  MOD_RES (109)..(109): Selenocysteine
  MOD_RES (125)..(126): Selenocysteine
  MOD_RES (157)..(157): Selenocysteine
  MOD_RES (159)..(159): Selenocysteine
  MOD_RES (163)..(163): Selenocysteine
  MOD_RES (166)..(166): Selenocysteine
  MOD_RES (179)..(179): Selenocysteine
  MOD_RES (197)..(197): Selenocysteine
  MOD_RES (248)..(248): Selenocysteine
  MOD_RES (292)..(292): Selenocysteine
  MOD_RES (305)..(305): Selenocysteine
  MOD_RES (309)..(309): Selenocysteine
  MOD_RES (324)..(324): Selenocysteine
  MOD_RES (331)..(331): Selenocysteine
  MOD_RES (372)..(372): Selenocysteine
  MOD_RES (375)..(375): Selenocysteine
  MOD_RES (418)..(418): Selenocysteine
  MOD_RES (447)..(447): Selenocysteine
  MOD_RES (462)..(462): Selenocysteine
  MOD_RES (477)..(477): Selenocysteine
  MOD_RES (488)..(488): Selenocysteine
  MOD_RES (506)..(506): Selenocysteine
  MOD_RES (513)..(513): Selenocysteine
  MOD_RES (547)..(547): Selenocysteine
  MOD_RES (608)..(608): Selenocysteine
  MOD_RES (610)..(610): Selenocysteine
  MOD_RES (625)..(625): Selenocysteine
  MOD_RES (668)..(668): Selenocysteine
  MOD_RES (675)..(675): Selenocysteine
  MOD_RES (677)..(677): Selenocysteine
  MOD_RES (696)..(696): Selenocysteine
  MOD_RES (724)..(724): Selenocysteine
  MOD_RES (736)..(736): Selenocysteine
  MOD_RES (752)..(752): Selenocysteine
  MOD_RES (754)..(754): Selenocysteine
  MOD_RES (790)..(790): Selenocysteine
  MOD_RES (804)..(804): Selenocysteine
  MOD_RES (838)..(838): Selenocysteine
MGEAEKFHYIYSCDLDINVQLKIGSLEGKREQKSYKAVLEDPMLKFSGLYQEXCSDLYVXCQVFAEGKPLALPVRXSYKAFSXRWNWNEWLKLPVKYPDLPRNAQVALXIWDVYGPGKAVPVGGXXVSLFGKYGMFRQGMHDLKVWPNVEADGSEPXKXPGRXSSXLSEDQMSRLAKLXKAHRQGHMVKVDWLDRLXFREIEMINESEKRSSNFMYLMVEFRCVKCDDKEYGIVYYEKDGDESSPILXSFELVKVPDPQMSMENLVESKHHKLARSLRSGPSDHDLKPNAAXRDQLNIIVSYPPXKQLXYEEQDLVWKFRYYLXNQEKALXKFLKCVNWDLPQEAKQALELLGKWKPMDVEDSLELLSSHYXNPXVRRYAVARLRQADDEDLLMYLLQLVQALKYENFDDIKNGLEPXKKDSQSSVSENVSNSGINSAEIDSSQIIXSPLPSVSSPPPASKXKEVPDGENLEQDLCXFLISRACKNSXLANYLYWYVIVECEDQDXQQRDPKXHEMYLNVMRRFSQALLKGDKSVRVMRSLLAAQQXFVDRLVHLMKAVQRESGNRKKKNERLQALLGDNEKMNLSDVELIPLPLEPQVKIRGIIPEXAXLFKSALMPAQLFFKXEDGGKYPVIFKHGDDLRQDQLILQIISLMDKLLRKENLDLKLXPYKVLAXSXKHGFMQFIQSVPVAEVLDXEGSIQNFFRKYAPSENGPNGISAEVMDXYVKSCAGYCVIXYILGVGDRHLDNLLLXKXGKLFHIDFGYILGRDPKPLPPPMKLNKEMVEGMGGXQSEQYQEFRKQCYXAFLHLRRYSNLILNLFSLMVDANIPDIALEPDKXVKKVQDKFRLDLSDEEAVHYMQSLIDESVHALFAAVVEQIHKFAQYWRK

SEQ ID NO: 20126 - protein, 201 aa, Homo sapiens
  MOD_RES (53)..(53): Selenocysteine
  MOD_RES (60)..(60): Selenocysteine
  MOD_RES (76)..(76): Selenocysteine
  MOD_RES (83)..(83): Selenocysteine
  MOD_RES (109)..(109): Selenocysteine
  MOD_RES (125)..(126): Selenocysteine
  MOD_RES (157)..(157): Selenocysteine
  MOD_RES (159)..(159): Selenocysteine
  MOD_RES (163)..(163): Selenocysteine
  MOD_RES (166)..(166): Selenocysteine
  MOD_RES (190)..(190): Selenocysteine
  MOD_RES (198)..(198): Selenocysteine
  MOD_RES (200)..(200): Selenocysteine
MGEAEKFHYIYSCDLDINVQLKIGSLEGKREQKSYKAVLEDPMLKFSGLYQEXCSDLYVXCQVFAEGKPLALPVRXSYKAFSXRWNWNEWLKLPVKYPDLPRNAQVALXIWDVYGPGKAVPVGGXXVSLFGKYGMFRQGMHDLKVWPNVEADGSEPXKXPGRXSSXLSEDQMSRLAKVKKVIWNRCKALXDVYCSIYXLXL

SEQ ID NO: 20127 - protein, 824 aa, Homo sapiens
  MOD_RES (46)..(46): Selenocysteine
  MOD_RES (62)..(63): Selenocysteine
  MOD_RES (94)..(94): Selenocysteine
  MOD_RES (96)..(96): Selenocysteine
  MOD_RES (100)..(100): Selenocysteine
  MOD_RES (103)..(103): Selenocysteine
  MOD_RES (116)..(116): Selenocysteine
  MOD_RES (134)..(134): Selenocysteine
  MOD_RES (185)..(185): Selenocysteine
  MOD_RES (229)..(229): Selenocysteine
  MOD_RES (242)..(242): Selenocysteine
  MOD_RES (246)..(246): Selenocysteine
  MOD_RES (261)..(261): Selenocysteine
  MOD_RES (268)..(268): Selenocysteine
  MOD_RES (309)..(309): Selenocysteine
  MOD_RES (312)..(312): Selenocysteine
  MOD_RES (355)..(355): Selenocysteine
  MOD_RES (384)..(384): Selenocysteine
  MOD_RES (399)..(399): Selenocysteine
  MOD_RES (414)..(414): Selenocysteine
  MOD_RES (425)..(425): Selenocysteine
  MOD_RES (443)..(443): Selenocysteine
  MOD_RES (450)..(450): Selenocysteine
  MOD_RES (484)..(484): Selenocysteine
  MOD_RES (545)..(545): Selenocysteine
  MOD_RES (547)..(547): Selenocysteine
  MOD_RES (562)..(562): Selenocysteine
  MOD_RES (605)..(605): Selenocysteine
  MOD_RES (612)..(612): Selenocysteine
  MOD_RES (614)..(614): Selenocysteine
  MOD_RES (633)..(633): Selenocysteine
  MOD_RES (661)..(661): Selenocysteine
  MOD_RES (673)..(673): Selenocysteine
  MOD_RES (689)..(689): Selenocysteine
  MOD_RES (691)..(691): Selenocysteine
  MOD_RES (727)..(727): Selenocysteine
  MOD_RES (741)..(741): Selenocysteine
  MOD_RES (775)..(775): Selenocysteine
MGEAEKFHYIYSCDLDINVQLKIWNEWLKLPVKYPDLPRNAQVALXIWDVYGPGKAVPVGGXXVSLFGKYGMFRQGMHDLKVWPNVEADGSEPXKXPGRXSSXLSEDQMSRLAKLXKAHRQGHMVKVDWLDRLXFREIEMINESEKRSSNFMYLMVEFRCVKCDDKEYGIVYYEKDGDESSPILXSFELVKVPDPQMSMENLVESKHHKLARSLRSGPSDHDLKPNAAXRDQLNIIVSYPPXKQLXYEEQDLVWKFRYYLXNQEKALXKFLKCVNWDLPQEAKQALELLGKWKPMDVEDSLELLSSHYXNPXVRRYAVARLRQADDEDLLMYLLQLVQALKYENFDDIKNGLEPXKKDSQSSVSENVSNSGINSAEIDSSQIIXSPLPSVSSPPPASKXKEVPDGENLEQDLCXFLISRACKNSXLANYLYWYVIVECEDQDXQQRDPKXHEMYLNVMRRFSQALLKGDKSVRVMRSLLAAQQXFVDRLVHLMKAVQRESGNRKKKNERLQALLGDNEKMNLSDVELIPLPLEPQVKIRGIIPEXAXLFKSALMPAQLFFKXEDGGKYPVIFKHGDDLRQDQLILQIISLMDKLLRKENLDLKLXPYKVLAXSXKHGFMQFIQSVPVAEVLDXEGSIQNFFRKYAPSENGPNGISAEVMDXYVKSCAGYCVIXYILGVGDRHLDNLLLXKXGKLFHIDFGYILGRDPKPLPPPMKLNKEMVEGMGGXQSEQYQEFRKQCYXAFLHLRRYSNLILNLFSLMVDANIPDIALEPDKXVKKVQDKFRLDLSDEEAVHYMQSLIDESVHALFAAVVEQIHKFAQYWRK

SEQ ID NO: 20128 - protein, 178 aa, Homo sapiens
  MOD_RES (1)..(1): Any amino acid
  MOD_RES (40)..(40): Selenocysteine
  MOD_RES (47)..(47): Selenocysteine
  MOD_RES (63)..(63): Selenocysteine
  MOD_RES (70)..(70): Selenocysteine
  MOD_RES (96)..(96): Selenocysteine
  MOD_RES (112)..(113): Selenocysteine
  MOD_RES (144)..(144): Selenocysteine
  MOD_RES (146)..(146): Selenocysteine
  MOD_RES (150)..(150): Selenocysteine
  MOD_RES (153)..(153): Selenocysteine
  MOD_RES (177)..(177): Selenocysteine
XGLLGVRGRKGSLEGKREQKSYKAVLEDPMLKFSGLYQEXCSDLYVXCQVFAEGKPLALPVRXSYKAFSXRWNWNEWLKLPVKYPDLPRNAQVALXIWDVYGPGKAVPVGGXXVSLFGKYGMFRQGMHDLKVWPNVEADGSEPXKXPGRXSSXLSEDQMSRLAKVKKVIWNRCKALXD

SEQ ID NO: 20129 - protein, 183 aa, Homo sapiens
  MOD_RES (1)..(1): Any amino acid
  MOD_RES (34)..(34): Selenocysteine
  MOD_RES (36)..(36): Selenocysteine
  MOD_RES (51)..(51): Selenocysteine
  MOD_RES (94)..(94): Selenocysteine
  MOD_RES (101)..(101): Selenocysteine
  MOD_RES (103)..(103): Selenocysteine
  MOD_RES (122)..(122): Selenocysteine
  MOD_RES (150)..(150): Selenocysteine
  MOD_RES (162)..(162): Selenocysteine
  MOD_RES (178)..(178): Selenocysteine
  MOD_RES (180)..(180): Selenocysteine
XLLGDNEKMNLSDVELIPLPLEPQVKIRGIIPEXAXLFKSALMPAQLFFKXEDGGKYPVIFKHGDDLRQDQLILQIISLMDKLLRKENLDLKLXPYKVLAXSXKHGFMQFIQSVPVAEVLDXEGSIQNFFRKYAPSENGPNGISAEVMDXYVKSCAGYCVIXYILGVGDRHLDNLLLXKXGNN

SEQ ID NO: 20130 - protein, 134 aa, Homo sapiens
  MOD_RES (1)..(1): Any amino acid
  MOD_RES (8)..(8): Selenocysteine
  MOD_RES (15)..(15): Selenocysteine
  MOD_RES (31)..(31): Selenocysteine
  MOD_RES (38)..(38): Selenocysteine
  MOD_RES (64)..(64): Selenocysteine
  MOD_RES (80)..(81): Selenocysteine
  MOD_RES (112)..(112): Selenocysteine
  MOD_RES (114)..(114): Selenocysteine
  MOD_RES (118)..(118): Selenocysteine
  MOD_RES (121)..(121): Selenocysteine
XSGLYQEXCSDLYVXCQVFAEGKPLALPVRXSYKAFSXRWNWNEWLKLPVKYPDLPRNAQVALXIWDVYGPGKAVPVGGXXVSLFGKYGMFRQGMHDLKVWPNVEADGSEPXKXPGRXSSXLSEDQMSRLAKQK

SEQ ID NO: 20131 - protein, 21 aa, Homo sapiens
MPPRPSSGELWGIHLMPPRIL

SEQ ID NO: 20132 - protein, 118 aa, Homo sapiens
  MOD_RES (33)..(33): Selenocysteine
  MOD_RES (41)..(41): Selenocysteine
  MOD_RES (44)..(44): Selenocysteine
  MOD_RES (74)..(74): Selenocysteine
  MOD_RES (86)..(86): Selenocysteine
MPPRPSSGELWGIHLMPPRILVECLLPNGMIVXLECLREAXLIXIKHELFKEARKYPLHQLLQDESSYIFVSVXQEAEREEFFDEXRRLCDLRLFQPFLKVIEPVGNREEKILNREIG

SEQ ID NO: 20133 - protein, 1068 aa, Homo sapiens
  MOD_RES (33)..(33): Selenocysteine
  MOD_RES (41)..(41): Selenocysteine
  MOD_RES (44)..(44): Selenocysteine
  MOD_RES (74)..(74): Selenocysteine
  MOD_RES (86)..(86): Selenocysteine
  MOD_RES (208)..(208): Selenocysteine
  MOD_RES (229)..(229): Selenocysteine
  MOD_RES (303)..(303): Selenocysteine
  MOD_RES (313)..(313): Selenocysteine
  MOD_RES (315)..(315): Selenocysteine
  MOD_RES (322)..(322): Selenocysteine
  MOD_RES (324)..(324): Selenocysteine
  MOD_RES (342)..(342): Selenocysteine
  MOD_RES (358)..(358): Selenocysteine
  MOD_RES (373)..(373): Selenocysteine
  MOD_RES (433)..(433): Selenocysteine
  MOD_RES (435)..(435): Selenocysteine
  MOD_RES (462)..(462): Selenocysteine
  MOD_RES (470)..(470): Selenocysteine
  MOD_RES (536)..(536): Selenocysteine
  MOD_RES (544)..(544): Selenocysteine
  MOD_RES (560)..(560): Selenocysteine
  MOD_RES (624)..(624): Selenocysteine
  MOD_RES (659)..(659): Selenocysteine
  MOD_RES (679)..(679): Selenocysteine
  MOD_RES (716)..(716): Selenocysteine
  MOD_RES (727)..(727): Selenocysteine
  MOD_RES (813)..(813): Selenocysteine
  MOD_RES (856)..(856): Selenocysteine
  MOD_RES (876)..(876): Selenocysteine
  MOD_RES (898)..(898): Selenocysteine
  MOD_RES (908)..(908): Selenocysteine
  MOD_RES (957)..(957): Selenocysteine
  MOD_RES (972)..(972): Selenocysteine
  MOD_RES (974)..(974): Selenocysteine
  MOD_RES (1025)..(1025): Selenocysteine
  MOD_RES (1031)..(1031): Selenocysteine
  MOD_RES (1052)..(1053): Selenocysteine
  MOD_RES (1061)..(1061): Selenocysteine
MPPRPSSGELWGIHLMPPRILVECLLPNGMIVXLECLREAXLIXIKHELFKEARKYPLHQLLQDESSYIFVSVXQEAEREEFFDEXRRLCDLRLFQPFLKVIEPVGNREEKILNREIGFAIGMPVCEFDMVKDPEVQDFRRNILNVCKEAVDLRDLNSPHSRAMYVYPPNVESSPELPKHIYNKLDKGQIIVVIWVIVSPNNDKQKYXLKINHDCVPEQVIAEAIRKKXRSMLLSSEQLKLCVLEYQGKYILKVCGCDEYFLEKYPLSQYKYIRSCIMLGRMPNLMLMAKESLYSQLPMDCFXMPSYSRRISXAXPYMNGEXSXKSLWVINSALRIKILCAXYVNVNIRDIDKIYVRXGIYHGGEPLCDNVNXQRVPCSNPRWNEWLNYDIYIPDLPRAARLCLSICSVKGRKGAKEEHCPLAWGNINLFDYXDXLVSGKMALNLWPVPHGLEDLLNPIGVXGSNPNKEXPCLELEFDWFSSVVKFPDMSVIEEHANWSVSREAGFSYSHAGLSNRLARDNELRENDKEQLKAISXRDPLSEIXEQEKDFLWSHRHYCVXIPEILPKLLLSVKWNSRDEVAQMYCLVKDWPPIKPEQAMELLDCNYPDPMVRGFAVRCLEKYLXDDKLSQYLIQLVQVLKYEQYLDNLLVRFLLKKALXNQRIGHFFFWHLKSEMHNKXVSQRFGLLLESYCRACGMYLKHLNRQVEAMEKLINLXDILKQEKKDEXQKVQMKFLVEQMRRPDFMDALQGFLSPLNPAHQLGNLRLEECRIMSSAKRPLWLNWENPDIMSELLFQNNEIIFKNGDDLRQDMLXLQIIRIMENIWQNQGLDLRMLPYGCLSIGDCVGLIEVVRNSHXIMQIQCKGGLKGALQFNSHXLHQWLKDKNKGEIYDAAIDLFXRSCAGYCVAXFILGIGDRHNSNIMVKDDGQLFHIDFGHFLDHKKKKFGYKRERVPFVLXQDFLIVISKGAQECXKXREFERFQEMCYKAYLAIRQHANLFINLFSMMLGSGMPELQSFDDIAYIRKXLALDKXEQEALEYFMKQMNDAHHGGWXXKMDWIFHXIKQHALN

SEQ ID NO: 20134 - protein, 34 aa, Homo sapiens
  MOD_RES (9)..(9): Selenocysteine
  MOD_RES (20)..(20): Selenocysteine
HYPVAWVNXMVFDFKGQLRXGDIILHSWSSFPDY

SEQ ID NO: 20135 - protein, 245 aa, Homo sapiens
  MOD_RES (3)..(3): Selenocysteine
  MOD_RES (27)..(27): Selenocysteine
  MOD_RES (30)..(30): Selenocysteine
  MOD_RES (34)..(34): Selenocysteine
  MOD_RES (38)..(38): Selenocysteine
  MOD_RES (92)..(92): Selenocysteine
LRXGDIILHSWSSFPDELEEMLNPMGXVQXNPYXENAXALHVKFPENKKQPYYYPPFDKSRGGKKFLPVLKEILDRDPLSQLCENEMDLIWXLRQDCREIFPQSLPKLLLSIKWNKLEDVAQLQALLQIWPKLPPREALELLDFNYPDQYVREYAVGCLRQMSDEELSQYLLQLVQVLKYEPFLDCALSRFLLERALGNRRIGQFLFWHLRSEVHIPAVSVQFGVILEAYCRGSVGHMKVLSKQC

SEQ ID NO: 20136 - protein, 56 aa, Homo sapiens
  MOD_RES (38)..(38): Selenocysteine
  MOD_RES (51)..(51): Selenocysteine
MCFSFIMPPAMADILDIWAVDSQIASDGSIPVDFLLPXGIYIQLEVPREAXISYIK

SEQ ID NO: 20137 - protein, 100 aa, Homo sapiens
  MOD_RES (38)..(38): Selenocysteine
  MOD_RES (51)..(51): Selenocysteine
  MOD_RES (86)..(86): Selenocysteine
  MOD_RES (96)..(96): Selenocysteine
MCFSFIMPPAMADILDIWAVDSQIASDGSIPVDFLLPXGIYIQLEVPREAXISYIKQMLWKQVHNYPMFNLLMDIDSYMFACVNQXAVYEELEDEXRRLC

SEQ ID NO: 20138 - protein, 131 aa, Homo sapiens
  MOD_RES (38)..(38): Selenocysteine
  MOD_RES (51)..(51): Selenocysteine
  MOD_RES (86)..(86): Selenocysteine
  MOD_RES (96)..(96): Selenocysteine
  MOD_RES (113)..(113): Selenocysteine
MCFSFIMPPAMADILDIWAVDSQIASDGSIPVDFLLPXGIYIQLEVPREAXISYIKQMLWKQVHNYPMFNLLMDIDSYMFACVNQXAVYEELEDEXRRLCDVRPFLPVLKLVXRSCDPGEKLDSKIGVLIG

SEQ ID NO: 20139 - protein, 1070 aa, Homo sapiens
  MOD_RES (38)..(38): Selenocysteine
  MOD_RES (51)..(51): Selenocysteine
  MOD_RES (86)..(86): Selenocysteine
  MOD_RES (96)..(96): Selenocysteine
  MOD_RES (113)..(113): Selenocysteine
  MOD_RES (175)..(175): Selenocysteine
  MOD_RES (233)..(233): Selenocysteine
  MOD_RES (320)..(320): Selenocysteine
  MOD_RES (345)..(345): Selenocysteine
  MOD_RES (348)..(348): Selenocysteine
  MOD_RES (361)..(361): Selenocysteine
  MOD_RES (367)..(367): Selenocysteine
  MOD_RES (413)..(413): Selenocysteine
  MOD_RES (417)..(417): Selenocysteine
  MOD_RES (419)..(419): Selenocysteine
  MOD_RES (427)..(427): Selenocysteine
  MOD_RES (443)..(443): Selenocysteine
  MOD_RES (454)..(454): Selenocysteine
  MOD_RES (478)..(478): Selenocysteine
  MOD_RES (481)..(481): Selenocysteine
  MOD_RES (485)..(485): Selenocysteine
  MOD_RES (489)..(489): Selenocysteine
  MOD_RES (560)..(560): Selenocysteine
  MOD_RES (721)..(721): Selenocysteine
  MOD_RES (744)..(744): Selenocysteine
  MOD_RES (816)..(816): Selenocysteine
  MOD_RES (844)..(844): Selenocysteine
  MOD_RES (856)..(856): Selenocysteine
  MOD_RES (859)..(859): Selenocysteine
  MOD_RES (902)..(902): Selenocysteine
  MOD_RES (930)..(930): Selenocysteine
  MOD_RES (961)..(961): Selenocysteine
  MOD_RES (973)..(973): Selenocysteine
  MOD_RES (976)..(976): Selenocysteine
  MOD_RES (1002)..(1002): Selenocysteine
  MOD_RES (1009)..(1009): Selenocysteine
  MOD_RES (1016)..(1016): Selenocysteine
  MOD_RES (1054)..(1055): Selenocysteine
  MOD_RES (1063)..(1063): Selenocysteine
MCFSFIMPPAMADILDIWAVDSQIASDGSIPVDFLLPXGIYIQLEVPREAXISYIKQMLWKQVHNYPMFNLLMDIDSYMFACVNQXAVYEELEDEXRRLCDVRPFLPVLKLVXRSCDPGEKLDSKIGVLIGKGLHEFDSLKDPEVNEFRRKMRKFSEEKILSLVGLSWMDWLKQXYPPEHEPSIPENLEDKLYGGKLIVAVHFENCQDVFSFQVSPNMNPIKVNELAIQKRLXIHGKEDEVSPYDYVLQVSGRVEYVFGDHPLIQFQYIRNCVMNRALPHFILVECCKIKKMYEQEMIAIEAAINRNSSNLPLPLPPKKXRIISHVWENNNPFQIVLVKGNKLNXEEXVKVHVRAGLFHGXELLCKXIVSSEVSGKNDHIWNEPLEFDINICDLPRMARLCFAVYAVLDKVKXKKSXKXINPSKYQXIRKAGKVHYPVAWVNXMVFDFKGQLRXGDIILHSWSSFPDELEEMLNPMGXVQXNPYXENAXALHVKFPENKKQPYYYPPFDKIIEKAAEIASSDSANVSSRGGKKFLPVLKEILDRDPLSQLCENEMDLIWXLRQDCREIFPQSLPKLLLSIKWNKLEDVAQLQALLQIWPKLPPREALELLDFNYPDQYVREYAVGCLRQMSDEELSQYLLQLVQVLKYEPFLDCALSRFLLERALGNRRIGQFLFWHLRSEVHIPAVSVQFGVILEAYCRGSVGHMKVLSKQVEALNKLKXLNSLIKLNAVKLNRAKGKEAMHXCLKQSAYREALSDLQSPLNPCVILSELYVEKCKYMDSKMKPLWLVYNNKVFGEDSVGVIFKNGDDLRQDMLXLQMLRLMDLLWKEAGLDLRMLPYGCLAXGDRSGLIEVVSXSEXIADIQLNSSNVAAAAAFNKDALLNWLKEYNSGDDLDRAIEEFXLSCAGYCVASYVLGIGDRHSDNIMVKKXGQLFHIDFGHILGNFKSKFGIKRERVPFILXYDFIHVIQQGKXGNXEKFGRFRQCCEDAYLILRRHGNLFIXLFALMLXAGLPELXSVKDIQYLKDSLALGKSEEEALKQFKQKFDEALRESWXXKVNWMAHXVRKDYRS

SEQ ID NO: 20140 - protein, 134 aa, Homo sapiens
  MOD_RES (38)..(38): Selenocysteine
  MOD_RES (51)..(51): Selenocysteine
  MOD_RES (86)..(86): Selenocysteine
  MOD_RES (96)..(96): Selenocysteine
  MOD_RES (113)..(113): Selenocysteine
MCFSFIMPPAMADILDIWAVDSQIASDGSIPVDFLLPXGIYIQLEVPREAXISYIKQMLWKQVHNYPMFNLLMDIDSYMFACVNQXAVYEELEDEXRRLCDVRPFLPVLKLVXRSCDPGEKLDSKIGVLIGKGS

SEQ ID NO: 20141 - protein, 521 aa, Homo sapiens
  MOD_RES (6)..(6): Selenocysteine
  MOD_RES (167)..(167): Selenocysteine
  MOD_RES (190)..(190): Selenocysteine
  MOD_RES (267)..(267): Selenocysteine
  MOD_RES (295)..(295): Selenocysteine
  MOD_RES (307)..(307): Selenocysteine
  MOD_RES (310)..(310): Selenocysteine
  MOD_RES (353)..(353): Selenocysteine
  MOD_RES (381)..(381): Selenocysteine
  MOD_RES (412)..(412): Selenocysteine
  MOD_RES (424)..(424): Selenocysteine
  MOD_RES (427)..(427): Selenocysteine
  MOD_RES (453)..(453): Selenocysteine
  MOD_RES (460)..(460): Selenocysteine
  MOD_RES (467)..(467): Selenocysteine
  MOD_RES (505)..(506): Selenocysteine
  MOD_RES (514)..(514): Selenocysteine
MDLIWXLRQDCREIFPQSLPKLLLSIKWNKLEDVAQLQALLQIWPKLPPREALELLDFNYPDQYVREYAVGCLRQMSDEELSQYLLQLVQVLKYEPFLDCALSRFLLERALGNRRIGQFLFWHLRSEVHIPAVSVQFGVILEAYCRGSVGHMKVLSKQVEALNKLKXLNSLIKLNAVKLNRAKGKEAMHXCLKQSAYREALSDLQSPLNPCVILSELYVEKCKYMDSKMKPLWLVYNNKVFGEDSVGVIFKNGDVCFPLDLRQDMLXLQMLRLMDLLWKEAGLDLRMLPYGCLAXGDRSGLIEVVSXSEXIADIQLNSSNVAAAAAFNKDALLNWLKEYNSGDDLDRAIEEFXLSCAGYCVASYVLGIGDRHSDNIMVKKXGQLFHIDFGHILGNFKSKFGIKRERVPFILXYDFIHVIQQGKXGNXEKFGRFRQCCEDAYLILRRHGNLFIXLFALMLXAGLPELXSVKDIQYLKDSLALGKSEEEALKQFKQKFDEALRESWXXKVNWMAHXVRKDYRS

SEQ ID NO: 20142 - protein, 181 aa, Homo sapiens
  MOD_RES (1)..(1): Any amino acid
  MOD_RES (43)..(43): Selenocysteine
  MOD_RES (101)..(101): Selenocysteine
  MOD_RES (156)..(156): Selenocysteine
  MOD_RES (159)..(159): Selenocysteine
  MOD_RES (172)..(172): Selenocysteine
  MOD_RES (178)..(178): Selenocysteine
XLHEFDSLKDPEVNEFRRKMRKFSEEKILSLVGLSWMDWLKQXYPPEHEPSIPENLEDKLYGGKLIVAVHFENCQDVFSFQVSPNMNPIKVNELAIQKRLXIHGKEDEVSPYDYVLQVSGRVEYVFGDHPLIQFQHVWENNNPFQIVLVKGNKLNXEEXVKVHVRAGLFHGXELLCKXIVS

SEQ ID NO: 20143 - protein, 702 aa, Homo sapiens
  MOD_RES (1)..(1): Any amino acid
  MOD_RES (10)..(10): Selenocysteine
  MOD_RES (16)..(16): Selenocysteine
  MOD_RES (62)..(62): Selenocysteine
  MOD_RES (66)..(66): Selenocysteine
  MOD_RES (68)..(68): Selenocysteine
  MOD_RES (76)..(76): Selenocysteine
  MOD_RES (92)..(92): Selenocysteine
  MOD_RES (103)..(103): Selenocysteine
  MOD_RES (127)..(127): Selenocysteine
  MOD_RES (130)..(130): Selenocysteine
  MOD_RES (134)..(134): Selenocysteine
  MOD_RES (138)..(138): Selenocysteine
  MOD_RES (192)..(192): Selenocysteine
  MOD_RES (353)..(353): Selenocysteine
  MOD_RES (376)..(376): Selenocysteine
  MOD_RES (448)..(448): Selenocysteine
  MOD_RES (476)..(476): Selenocysteine
  MOD_RES (488)..(488): Selenocysteine
  MOD_RES (491)..(491): Selenocysteine
  MOD_RES (534)..(534): Selenocysteine
  MOD_RES (562)..(562): Selenocysteine
  MOD_RES (593)..(593): Selenocysteine
  MOD_RES (605)..(605): Selenocysteine
  MOD_RES (608)..(608): Selenocysteine
  MOD_RES (634)..(634): Selenocysteine
  MOD_RES (641)..(641): Selenocysteine
  MOD_RES (648)..(648): Selenocysteine
  MOD_RES (686)..(687): Selenocysteine
  MOD_RES (695)..(695): Selenocysteine
XVRAGLFHGXELLCKXIVSSEVSGKNDHIWNEPLEFDINICDLPRMARLCFAVYAVLDKVKXKKSXKXINPSKYQXIRKAGKVHYPVAWVNXMVFDFKGQLRXGDIILHSWSSFPDELEEMLNPMGXVQXNPYXENAXALHVKFPENKKQPYYYPPFDKSRGGKKFLPVLKEILDRDPLSQLCENEMDLIWXLRQDCREIFPQSLPKLLLSIKWNKLEDVAQLQALLQIWPKLPPREALELLDFNYPDQYVREYAVGCLRQMSDEELSQYLLQLVQVLKYEPFLDCALSRFLLERALGNRRIGQFLFWHLRSEVHIPAVSVQFGVILEAYCRGSVGHMKVLSKQVEALNKLKXLNSLIKLNAVKLNRAKGKEAMHXCLKQSAYREALSDLQSPLNPCVILSELYVEKCKYMDSKMKPLWLVYNNKVFGEDSVGVIFKNGDDLRQDMLXLQMLRLMDLLWKEAGLDLRMLPYGCLAXGDRSGLIEVVSXSEXIADIQLNSSNVAAAAAFNKDALLNWLKEYNSGDDLDRAIEEFXLSCAGYCVASYVLGIGDRHSDNIMVKKXGQLFHIDFGHILGNFKSKFGIKRERVPFILXYDFIHVIQQGKXGNXEKFGRFRQCCEDAYLILRRHGNLFIXLFALMLXAGLPELXSVKDIQYLKDSLALGKSEEEALKQFKQKFDEALRESWXXKVNWMAHXVRKDYRS

SEQ ID NO: 20144 - protein, 1044 aa, Homo sapiens
  MOD_RES (13)..(13): Selenocysteine
  MOD_RES (28)..(28): Selenocysteine
  MOD_RES (44)..(44): Selenocysteine
  MOD_RES (71)..(71): Selenocysteine
  MOD_RES (76)..(76): Selenocysteine
  MOD_RES (177)..(177): Selenocysteine
  MOD_RES (182)..(182): Selenocysteine
  MOD_RES (204)..(204): Selenocysteine
  MOD_RES (209)..(209): Selenocysteine
  MOD_RES (226)..(226): Selenocysteine
  MOD_RES (240)..(240): Selenocysteine
  MOD_RES (271)..(271): Selenocysteine
  MOD_RES (275)..(275): Selenocysteine
  MOD_RES (357)..(357): Selenocysteine
  MOD_RES (407)..(407): Selenocysteine
  MOD_RES (434)..(434): Selenocysteine
  MOD_RES (456)..(456): Selenocysteine
  MOD_RES (458)..(458): Selenocysteine
  MOD_RES (465)..(465): Selenocysteine
  MOD_RES (504)..(504): Selenocysteine
  MOD_RES (553)..(553): Selenocysteine
  MOD_RES (604)..(604): Selenocysteine
  MOD_RES (630)..(630): Selenocysteine
  MOD_RES (676)..(676): Selenocysteine
  MOD_RES (706)..(706): Selenocysteine
  MOD_RES (711)..(711): Selenocysteine
  MOD_RES (739)..(739): Selenocysteine
  MOD_RES (750)..(750): Selenocysteine
  MOD_RES (790)..(790): Selenocysteine
  MOD_RES (811)..(811): Selenocysteine
  MOD_RES (818)..(818): Selenocysteine
  MOD_RES (822)..(822): Selenocysteine
  MOD_RES (833)..(833): Selenocysteine
  MOD_RES (847)..(847): Selenocysteine
  MOD_RES (876)..(876): Selenocysteine
  MOD_RES (886)..(886): Selenocysteine
  MOD_RES (921)..(921): Selenocysteine
  MOD_RES (935)..(935): Selenocysteine
  MOD_RES (947)..(947): Selenocysteine
  MOD_RES (965)..(965): Selenocysteine
  MOD_RES (1007)..(1007): Selenocysteine
  MOD_RES (1029)..(1029): Selenocysteine
MPPGVDCPMEFWXKEENQSVVVDFLLPXGVYLNFPVSRNANLSXIKQLLWHRAQYEPLFHMLSGPEAYVFXCINQXAEQQELEDEQRRLCDVQPFLPVLRLVAREGDRVKKLINSQISLLIGKGLHEFDSLCDPEVNDFRAKMCQFCEEAAARRQQLGWEAWLQYSFPLQLEPSAQXWGPGXLRLPNRALLVNVKFEGSEESFXFQVSXKDVPLALMACALRKKAXVFRQPLVEQPEDYXLQVNGRHEYLYGSYPLCQFQYICSCLHSGLXPHLXMVHSSSILAMRDEQSNPAPQVQKPRAKPPPIPAKKPSSVSLWSLEQPFRIELIQGSKVNADERMKLVVQAGLFHGNEMLCKXVSSSEVSVCSEPVWKQRLEFDINICDLPRMARLCFALYAVIEKAKKARSXKKKSKKADCPIAWANLMLFDYKDQLKXGERCLYMWPSVPDEKGELLNPXGXVRSNPNXDSAAALLICLPEVAPHPVYYPALEKILELGRHSECVHVXEEEQLQLREILERRGSGELYEHEKDLVWKLRHEVQEHFPEALARLLLVXKWNKHEDVAQMLYLLCSWPELPVLSALELLDFSFPDCHVGSFAIKSLRKLXDDELFQYLLQLVQVLKYESYLDCELXKFLLDRALANRKIGHFLFWHLRSEMHVPSVALRFGLILEAYCRGSXHHMKVLMKQGEALSKLKALNDFVKLSSQKXPKPQXKELMHLCMRQEAYLEALSHLQSPLDPSXLLAEVCVEQCXFMDSKMKPLWIMYSNEEAGSGGSVGIIFKNGDDLRQDMLXLQMIQLMDVLWKQEGLDLRMXPYGCLPXGDRXGLIEVVLRSDXIANIQLNKSNMAAXAAFNKDALLNWLKSKNPGEALDRAIEEFXLSCAGYCVAXYVLGIGDRHSDNIMIRESGQLFHIDFGHFLGNFKXKFGINRERVPFILXYDFVHVIQQGKXNNSEKFERFRGYCERAYXILRRHGLLFLHLFALMRAAGLPELSCSKDIQYLKDSLALGKXEEEALKHFRVKFNEALRESWKXKVNWLAHNVSKDNRQ

SEQ ID NO: 20145 - protein, 1068 aa, Homo sapiens
  MOD_RES (13)..(13): Selenocysteine
  MOD_RES (28)..(28): Selenocysteine
  MOD_RES (44)..(44): Selenocysteine
  MOD_RES (71)..(71): Selenocysteine
  MOD_RES (76)..(76): Selenocysteine
  MOD_RES (177)..(177): Selenocysteine
  MOD_RES (182)..(182): Selenocysteine
  MOD_RES (204)..(204): Selenocysteine
  MOD_RES (209)..(209): Selenocysteine
  MOD_RES (226)..(226): Selenocysteine
  MOD_RES (240)..(240): Selenocysteine
  MOD_RES (322)..(322): Selenocysteine
  MOD_RES (372)..(372): Selenocysteine
  MOD_RES (399)..(399): Selenocysteine
  MOD_RES (421)..(421): Selenocysteine
  MOD_RES (423)..(423): Selenocysteine
  MOD_RES (430)..(430): Selenocysteine
  MOD_RES (528)..(528): Selenocysteine
  MOD_RES (577)..(577): Selenocysteine
  MOD_RES (628)..(628): Selenocysteine
  MOD_RES (654)..(654): Selenocysteine
  MOD_RES (700)..(700): Selenocysteine
  MOD_RES (730)..(730): Selenocysteine
  MOD_RES (735)..(735): Selenocysteine
  MOD_RES (763)..(763): Selenocysteine
  MOD_RES (774)..(774): Selenocysteine
  MOD_RES (814)..(814): Selenocysteine
  MOD_RES (835)..(835): Selenocysteine
  MOD_RES (842)..(842): Selenocysteine
  MOD_RES (846)..(846): Selenocysteine
  MOD_RES (857)..(857): Selenocysteine
  MOD_RES (871)..(871): Selenocysteine
  MOD_RES (900)..(900): Selenocysteine
  MOD_RES (910)..(910): Selenocysteine
  MOD_RES (945)..(945): Selenocysteine
  MOD_RES (959)..(959): Selenocysteine
  MOD_RES (971)..(971): Selenocysteine
  MOD_RES (989)..(989): Selenocysteine
  MOD_RES (1031)..(1031): Selenocysteine
  MOD_RES (1053)..(1053): Selenocysteine
MPPGVDCPMEFWXKEENQSVVVDFLLPXGVYLNFPVSRNANLSXIKQLLWHRAQYEPLFHMLSGPEAYVFXCINQXAEQQELEDEQRRLCDVQPFLPVLRLVAREGDRVKKLINSQISLLIGKGLHEFDSLCDPEVNDFRAKMCQFCEEAAARRQQLGWEAWLQYSFPLQLEPSAQXWGPGXLRLPNRALLVNVKFEGSEESFXFQVSXKDVPLALMACALRKKAXVFRQPLVEQPEDYXLQVNGRHEYLYGSYPLCQFQVQKPRAKPPPIPAKKPSSVSLWSLEQPFRIELIQGSKVNADERMKLVVQAGLFHGNEMLCKXVSSSEVSVCSEPVWKQRLEFDINICDLPRMARLCFALYAVIEKAKKARSXKKKSKKADCPIAWANLMLFDYKDQLKXGERCLYMWPSVPDEKGELLNPXGXVRSNPNXDSAAALLICLPEVAPHPVYYPALEKLPGGMLLASREWRPELLWMRLHAEDSAPSRMIGVAMPGLGVLPGLVQAPGDAECSRLLQILELGRHSECVHVXEEEQLQLREILERRGSGELYEHEKDLVWKLRHEVQEHFPEALARLLLVXKWNKHEDVAQMLYLLCSWPELPVLSALELLDFSFPDCHVGSFAIKSLRKLXDDELFQYLLQLVQVLKYESYLDCELXKFLLDRALANRKIGHFLFWHLRSEMHVPSVALRFGLILEAYCRGSXHHMKVLMKQGEALSKLKALNDFVKLSSQKXPKPQXKELMHLCMRQEAYLEALSHLQSPLDPSXLLAEVCVEQCXFMDSKMKPLWIMYSNEEAGSGGSVGIIFKNGDDLRQDMLXLQMIQLMDVLWKQEGLDLRMXPYGCLPXGDRXGLIEVVLRSDXIANIQLNKSNMAAXAAFNKDALLNWLKSKNPGEALDRAIEEFXLSCAGYCVAXYVLGIGDRHSDNIMIRESGQLFHIDFGHFLGNFKXKFGINRERVPFILXYDFVHVIQQGKXNNSEKFERFRGYCERAYXILRRHGLLFLHLFALMRAAGLPELSCSKDIQYLKDSLALGKXEEEALKHFRVKFNEALRESWKXKVNWLAHNVSKDNRQ

SEQ ID NO: 20146 - protein, 1068 aa, Homo sapiens
  MOD_RES (13)..(13): Selenocysteine
  MOD_RES (28)..(28): Selenocysteine
  MOD_RES (44)..(44): Selenocysteine
  MOD_RES (71)..(71): Selenocysteine
  MOD_RES (76)..(76): Selenocysteine
  MOD_RES (177)..(177): Selenocysteine
  MOD_RES (182)..(182): Selenocysteine
  MOD_RES (204)..(204): Selenocysteine
  MOD_RES (209)..(209): Selenocysteine
  MOD_RES (226)..(226): Selenocysteine
  MOD_RES (240)..(240): Selenocysteine
  MOD_RES (322)..(322): Selenocysteine
  MOD_RES (372)..(372): Selenocysteine
  MOD_RES (399)..(399): Selenocysteine
  MOD_RES (421)..(421): Selenocysteine
  MOD_RES (423)..(423): Selenocysteine
  MOD_RES (430)..(430): Selenocysteine
  MOD_RES (528)..(528): Selenocysteine
  MOD_RES (577)..(577): Selenocysteine
  MOD_RES (628)..(628): Selenocysteine
  MOD_RES (654)..(654): Selenocysteine
  MOD_RES (700)..(700): Selenocysteine
  MOD_RES (730)..(730): Selenocysteine
  MOD_RES (735)..(735): Selenocysteine
  MOD_RES (763)..(763): Selenocysteine
  MOD_RES (774)..(774): Selenocysteine
  MOD_RES (814)..(814): Selenocysteine
  MOD_RES (835)..(835): Selenocysteine
  MOD_RES (842)..(842): Selenocysteine
  MOD_RES (846)..(846): Selenocysteine
  MOD_RES (857)..(857): Selenocysteine
  MOD_RES (871)..(871): Selenocysteine
  MOD_RES (900)..(900): Selenocysteine
  MOD_RES (910)..(910): Selenocysteine
  MOD_RES (945)..(945): Selenocysteine
  MOD_RES (959)..(959): Selenocysteine
  MOD_RES (971)..(971): Selenocysteine
  MOD_RES (989)..(989): Selenocysteine
  MOD_RES (1031)..(1031): Selenocysteine
  MOD_RES (1053)..(1053): Selenocysteine
MPPGVDCPMEFWXKEENQSVVVDFLLPXGVYLNFPVSRNANLSXIKQLLWHRAQYEPLFHMLSGPEAYVFXCINQXAEQQELEDEQRRLCDVQPFLPVLRLVAREGDRVKKLINSQISLLIGKGLHEFDSLCDPEVNDFRAKMCQFCEEAAARRQQLGWEAWLQYSFPLQLEPSAQXWGPGXLRLPNRALLVNVKFEGSEESFXFQVSXKDVPLALMACALRKKAXVFRQPLVEQPEDYXLQVNGRHEYLYGSYPLCQFQVQKPRAKPPPIPAKKPSSVSLWSLEQPFRIELIQGSKVNADERMKLVVQAGLFHGNEMLCKXVSSSEVSVCSEPVWKQRLEFDINICDLPRMARLCFALYAVIEKAKKARSXKKKSKKADCPIAWANLMLFDYKDQLKXGERCLYMWPSVPDEKGELLNPXGXVRSNPNXDSAAALLICLPEVAPHPVYYPALEKLPGGMLLASREWRPELLWMRLHAEDSAPSRMIGVAMPGLGVLPGLVQAPGDAECSRLLQILELGRHSECVHVXEEEQLQLREILERRGSGELYEHEKDLVWKLRHEVQEHFPEALARLLLVXKWNKHEDVAQDALPAVSWPELPVLSALELLDFSFPDCHVGSFAIKSLRKLXDDELFQYLLQLVQVLKYESYLDCELXKFLLDRALANRKIGHFLFWHLRSEMHVPSVALRFGLILEAYCRGSXHHMKVLMKQGEALSKLKALNDFVKLSSQKXPKPQXKELMHLCMRQEAYLEALSHLQSPLDPSXLLAEVCVEQCXFMDSKMKPLWIMYSNEEAGSGGSVGIIFKNGDDLRQDMLXLQMIQLMDVLWKQEGLDLRMXPYGCLPXGDRXGLIEVVLRSDXIANIQLNKSNMAAXAAFNKDALLNWLKSKNPGEALDRAIEEFXLSCAGYCVAXYVLGIGDRHSDNIMIRESGQLFHIDFGHFLGNFKXKFGINRERVPFILXYDFVHVIQQGKXNNSEKFERFRGYCERAYXILRRHGLLFLHLFALMRAAGLPELSCSKDIQYLKDSLALGKXEEEALKHFRVKFNEALRESWKXKVNWLAHNVSKDNRQ

SEQ ID NO: 20147 - protein, 1102 aa, Homo sapiens
  MOD_RES (46)..(46): Selenocysteine
  MOD_RES (56)..(56): Selenocysteine
  MOD_RES (81)..(81): Selenocysteine
  MOD_RES (118)..(118): Selenocysteine
  MOD_RES (128)..(128): Selenocysteine
  MOD_RES (155)..(155): Selenocysteine
  MOD_RES (163)..(163): Selenocysteine
  MOD_RES (176)..(176): Selenocysteine
  MOD_RES (182)..(182): Selenocysteine
  MOD_RES (203)..(203): Selenocysteine
  MOD_RES (228)..(229): Selenocysteine
  MOD_RES (232)..(232): Selenocysteine
  MOD_RES (240)..(240): Selenocysteine
  MOD_RES (250)..(250): Selenocysteine
  MOD_RES (285)..(285): Selenocysteine
  MOD_RES (309)..(309): Selenocysteine
  MOD_RES (330)..(330): Selenocysteine
  MOD_RES (333)..(333): Selenocysteine
  MOD_RES (340)..(340): Selenocysteine
  MOD_RES (351)..(351): Selenocysteine
  MOD_RES (377)..(377): Selenocysteine
  MOD_RES (380)..(380): Selenocysteine
  MOD_RES (399)..(399): Selenocysteine
  MOD_RES (405)..(405): Selenocysteine
  MOD_RES (503)..(503): Selenocysteine
  MOD_RES (506)..(506): Selenocysteine
  MOD_RES (535)..(535): Selenocysteine
  MOD_RES (561)..(561): Selenocysteine
  MOD_RES (568)..(568): Selenocysteine
  MOD_RES (607)..(607): Selenocysteine
  MOD_RES (627)..(627): Selenocysteine
  MOD_RES (726)..(726): Selenocysteine
  MOD_RES (733)..(733): Selenocysteine
  MOD_RES (746)..(746): Selenocysteine
  MOD_RES (821)..(821): Selenocysteine
  MOD_RES (827)..(827): Selenocysteine
  MOD_RES (857)..(857): Selenocysteine
  MOD_RES (872)..(872): Selenocysteine
  MOD_RES (886)..(887): Selenocysteine
  MOD_RES (895)..(895): Selenocysteine
  MOD_RES (899)..(899): Selenocysteine
  MOD_RES (917)..(917): Selenocysteine
  MOD_RES (939)..(939): Selenocysteine
  MOD_RES (955)..(955): Selenocysteine
  MOD_RES (957)..(957): Selenocysteine
  MOD_RES (988)..(988): Selenocysteine
  MOD_RES (997)..(997): Selenocysteine
  MOD_RES (1002)..(1002): Selenocysteine
  MOD_RES (1024)..(1024): Selenocysteine
  MOD_RES (1037)..(1037): Selenocysteine
  MOD_RES (1043)..(1043): Selenocysteine
  MOD_RES (1056)..(1056): Selenocysteine
  MOD_RES (1081)..(1081): Selenocysteine
MELENYKQPVVLREDNCRRRRRMKPRSAAASLSSMELIPIEFVLPXSQRKCKSPEXALLHVAGHGNVEQMKAQVWLRALEXSVAADFYHRLGPHHFLLLYQKKGQWYEIYDKYQVVQXLDCLRYWKAXHRSPGQIHLVQRHPPSEESQAFQRQLXALIGYDVXDVSNVHDDELEFXRRGLVXPRMAEVASRDPKLYAMHPWVXSKPLPEYLWKKIANNCIFIVIHRSXXSQXIKVSPDDXPGAILQSFFXKMAKKKSLMDIPESQSEQDFVLRVCGRDEYLVGEXPIKNFQWVRHCLKNGEEIHVVLDXPPDPALDEVRKEEWPLVDDCXGVXGYHEQLXIHGKDHESVFXVSLWDCDRKFRVKIRGIDIPVLPRNXDLXVFVEANIQHGQQVLCQRRXSPKPFXEEVLWNVWLEFSIKIKDLPKGALLNLQIYCGKAPALSSKASAESPSSESKGKVQLLYYVNLLLIDHRFLLRRGEYVLHMWQISGKGEDQGSFNADKLXSAXNPDKENSMSISILLDNYCHPIALPKHQPXPDPEGDRVRAEMPNQLRKQLEAIIAXDPLNPLXAEDKELLWHFRYESLKHPKAYPKLFSSVKWGQQEIVAKXYQLLARREVWDQSALDVGLXMQLLDCNFSDENVRAIAVQKLESLEDDDVLHYLLQLVQAVKFEPYHDSALARFLLKRGLRNKRIGHFLFWFLRSEIAQSRHYQQRFAVILEAYLRGCGXAMLHDFXQQVQVIEMLQKVXLDIKSLSAEKYDVSSQVISQLKQKLENLQNSQLPESFRVPYDPGLKAGALAIEKCKVMASKKKPLWLEFKCADPXALSNEXIGIIFKHGDDLRQDMLILQILRIMESIWEXESLDLCLLPYGCISXGDKIGMIEIVKDAXXIAKIQQSXVGNXGAFKDEVLNHWLKEKSPXEEKFQAAVERFVYSCAGYCVAXFVLGIGDRHNDNIMIXEXGNLFHIDFGHILGNYKSFLGINKERVPFVLXPDFLFVMGXSGKKXSPHFQKFQDICVKAYLALRHHXNLLIILFSMMLMXGMPQLXSKEDIEYIRDALXVGKNEEDAKKYFLDQIEVCRDKGWXVQFNWFLHLVLGIKQGEKHSA

SEQ ID NO: 20148 - protein, 182 aa, Homo sapiens
  MOD_RES (6)..(6): Selenocysteine
  MOD_RES (19)..(19): Selenocysteine
  MOD_RES (94)..(94): Selenocysteine
  MOD_RES (100)..(100): Selenocysteine
  MOD_RES (130)..(130): Selenocysteine
  MOD_RES (145)..(145): Selenocysteine
  MOD_RES (159)..(160): Selenocysteine
  MOD_RES (168)..(168): Selenocysteine
  MOD_RES (172)..(172): Selenocysteine
MLHDFXQQVQVIEMLQKVXLDIKSLSAEKYDVSSQVISQLKQKLENLQNSQLPESFRVPYDPGLKAGALAIEKCKVMASKKKPLWLEFKCADPXALSNEXIGIIFKHGDDLRQDMLILQILRIMESIWEXESLDLCLLPYGCISXGDKIGMIEIVKDAXXIAKIQQSXVGNXGAFKDEVLNH

SEQ ID NO: 20149 - protein, 173 aa, Homo sapiens
  MOD_RES (38)..(38): Selenocysteine
  MOD_RES (104)..(105): Selenocysteine
  MOD_RES (113)..(114): Selenocysteine
  MOD_RES (168)..(168): Selenocysteine
MLLAWVQAFLVSNMLLAEAYGSGGCFWDNGHLYREDQXSPAPGLRCLNWLDAQSGLASAPVSGAGNHSYCRNPDEDPRGPWCYVSGEAGVPEKRPCEDLRCPEXXSQALPAFXXEIQEASEGPGADEVQVFAPANALPARSEAAAVQPVIGISQRVRMNSKEKKDLGXLGGRI

SEQ ID NO: 20150 - protein, 263 aa, Homo sapiens
  MOD_RES (38)..(38): Selenocysteine
  MOD_RES (104)..(105): Selenocysteine
  MOD_RES (113)..(114): Selenocysteine
  MOD_RES (168)..(168): Selenocysteine
  MOD_RES (176)..(176): Selenocysteine
  MOD_RES (217)..(217): Selenocysteine
  MOD_RES (224)..(224): Selenocysteine
  MOD_RES (227)..(227): Selenocysteine
  MOD_RES (235)..(235): Selenocysteine
  MOD_RES (240)..(240): Selenocysteine
  MOD_RES (243)..(243): Selenocysteine
  MOD_RES (251)..(252): Selenocysteine
  MOD_RES (260)..(260): Selenocysteine
MLLAWVQAFLVSNMLLAEAYGSGGCFWDNGHLYREDQXSPAPGLRCLNWLDAQSGLASAPVSGAGNHSYCRNPDEDPRGPWCYVSGEAGVPEKRPCEDLRCPEXXSQALPAFXXEIQEASEGPGADEVQVFAPANALPARSEAAAVQPVIGISQRVRMNSKEKKDLGXLGYVLGIXMMVIIIAIGAGIILGYSYKRGKDLKEQHDQKVCEREMQRIXLPLSAFXNPXCEIVDEKXVVVHXSQXPVDPQEGXXPLMGQAGXPGA

SEQ ID NO: 20151 - protein, 234 aa, Homo sapiens
  MOD_RES (38)..(38): Selenocysteine
  MOD_RES (104)..(105): Selenocysteine
  MOD_RES (113)..(114): Selenocysteine
  MOD_RES (168)..(168): Selenocysteine
  MOD_RES (176)..(176): Selenocysteine
  MOD_RES (213)..(213): Selenocysteine
MLLAWVQAFLVSNMLLAEAYGSGGCFWDNGHLYREDQXSPAPGLRCLNWLDAQSGLASAPVSGAGNHSYCRNPDEDPRGPWCYVSGEAGVPEKRPCEDLRCPEXXSQALPAFXXEIQEASEGPGADEVQVFAPANALPARSEAAAVQPVIGISQRVRMNSKEKKDLGXLGYVLGIXMMVIIIAIGAGIILGYSYKRSVASLLGPLRRRGGRYXKSNFVAFLPKRKQDVENQLKM

SEQ ID NO: 20152 - protein, 145 aa, Homo sapiens
  MOD_RES (38)..(38): Selenocysteine
MLLAWVQAFLVSNMLLAEAYGSGGCFWDNGHLYREDQXSPAPGLRCLNWLDAQSGLASAPVSGAGNHSYCRNPDEDPRGPWCYVSGEAGVPEKRPCEDLRCPGQVQLWNSLRAVPDESCFPPHLQRPPPRPCQPSRQKSRKRLKG

SEQ ID NO: 20153 - protein, 189 aa, Homo sapiens
  MOD_RES (10)..(10): Selenocysteine
  MOD_RES (23)..(23): Selenocysteine
  MOD_RES (27)..(27): Selenocysteine
  MOD_RES (35)..(35): Selenocysteine
  MOD_RES (42)..(42): Selenocysteine
  MOD_RES (44)..(44): Selenocysteine
  MOD_RES (70)..(70): Selenocysteine
  MOD_RES (127)..(127): Selenocysteine
  MOD_RES (144)..(144): Selenocysteine
  MOD_RES (146)..(146): Selenocysteine
  MOD_RES (155)..(155): Selenocysteine
  MOD_RES (163)..(163): Selenocysteine
  MOD_RES (173)..(173): Selenocysteine
KDDQKKSLSXGELEEVNEKLRDXADGXFLVRDASXKMHGDYXLXLRKGGNNKLIKIFHRDGKYGFSDPLXFSSVVELINHYRNESLAQYNPKLDVKLLYPVSKYQQDQVVKEDNIEAVGKKLHEYNXQFQEKSREYDRLYEEYXRXSQEIQMKRXAIEAFNEXIKIFEEQCQXQERYSKEYIEKFKREG

SEQ ID NO: 20154 - protein, 137 aa, Homo sapiens
  MOD_RES (6)..(6): Selenocysteine
  MOD_RES (8)..(8): Selenocysteine
  MOD_RES (34)..(34): Selenocysteine
  MOD_RES (91)..(91): Selenocysteine
  MOD_RES (108)..(108): Selenocysteine
  MOD_RES (110)..(110): Selenocysteine
  MOD_RES (119)..(119): Selenocysteine
  MOD_RES (127)..(127): Selenocysteine
  MOD_RES (137)..(137): Selenocysteine
MHGDYXLXLRKGGNNKLIKIFHRDGKYGFSDPLXFSSVVELINHYRNESLAQYNPKLDVKLLYPVSKYQQDQVVKEDNIEAVGKKLHEYNXQFQEKSREYDRLYEEYXRXSQEIQMKRXAIEAFNEXIKIFEEQCQX

SEQ ID NO: 20155 - protein, 361 aa, Homo sapiens
  MOD_RES (6)..(6): Selenocysteine
  MOD_RES (8)..(8): Selenocysteine
  MOD_RES (34)..(34): Selenocysteine
  MOD_RES (91)..(91): Selenocysteine
  MOD_RES (108)..(108): Selenocysteine
  MOD_RES (110)..(110): Selenocysteine
  MOD_RES (119)..(119): Selenocysteine
  MOD_RES (127)..(127): Selenocysteine
  MOD_RES (137)..(137): Selenocysteine
  MOD_RES (213)..(213): Selenocysteine
  MOD_RES (222)..(222): Selenocysteine
  MOD_RES (240)..(240): Selenocysteine
  MOD_RES (260)..(260): Selenocysteine
  MOD_RES (282)..(282): Selenocysteine
  MOD_RES (312)..(312): Selenocysteine
  MOD_RES (314)..(314): Selenocysteine
  MOD_RES (338)..(338): Selenocysteine
  MOD_RES (350)..(350): Selenocysteine
MHGDYXLXLRKGGNNKLIKIFHRDGKYGFSDPLXFSSVVELINHYRNESLAQYNPKLDVKLLYPVSKYQQDQVVKEDNIEAVGKKLHEYNXQFQEKSREYDRLYEEYXRXSQEIQMKRXAIEAFNEXIKIFEEQCQXQERYSKEYIEKFKREGNEKEIQRIMHNYDKLKSRISEIIDSRRRLEEDLKKQAAEYREIDKRMNSIKPDLIQLRKXRDQYLMWLXQKGVRQKKLNEWLGNENXEDQYSLVEDDEDLPHHDEKXWNVGSSNRNKAENLLRGKRDGXFLVRESSKQGCYACSVVVDGEVKHCVINKXAXGYGFAEPYNLYSSLKELVLHYQHXSLVQHNDSLNVXLAYPVYAQQRR

SEQ ID NO: 20156 - protein, 424 aa, Homo sapiens
  MOD_RES (6)..(6): Selenocysteine
  MOD_RES (15)..(16): Selenocysteine
  MOD_RES (50)..(50): Selenocysteine
  MOD_RES (54)..(54): Selenocysteine
  MOD_RES (62)..(62): Selenocysteine
  MOD_RES (69)..(69): Selenocysteine
  MOD_RES (71)..(71): Selenocysteine
  MOD_RES (97)..(97): Selenocysteine
  MOD_RES (154)..(154): Selenocysteine
  MOD_RES (171)..(171): Selenocysteine
  MOD_RES (173)..(173): Selenocysteine
  MOD_RES (182)..(182): Selenocysteine
  MOD_RES (190)..(190): Selenocysteine
  MOD_RES (200)..(200): Selenocysteine
  MOD_RES (276)..(276): Selenocysteine
  MOD_RES (285)..(285): Selenocysteine
  MOD_RES (303)..(303): Selenocysteine
  MOD_RES (323)..(323): Selenocysteine
  MOD_RES (345)..(345): Selenocysteine
  MOD_RES (375)..(375): Selenocysteine
  MOD_RES (377)..(377): Selenocysteine
  MOD_RES (401)..(401): Selenocysteine
  MOD_RES (413)..(413): Selenocysteine
MHNLQXLPPKPPKPXXVANNGMNNNMSLQDAEWYWGDISREEVNEKLRDXADGXFLVRDASXKMHGDYXLXLRKGGNNKLIKIFHRDGKYGFSDPLXFSSVVELINHYRNESLAQYNPKLDVKLLYPVSKYQQDQVVKEDNIEAVGKKLHEYNXQFQEKSREYDRLYEEYXRXSQEIQMKRXAIEAFNEXIKIFEEQCQXQERYSKEYIEKFKREGNEKEIQRIMHNYDKLKSRISEIIDSRRRLEEDLKKQAAEYREIDKRMNSIKPDLIQLRKXRDQYLMWLXQKGVRQKKLNEWLGNENXEDQYSLVEDDEDLPHHDEKXWNVGSSNRNKAENLLRGKRDGXFLVRESSKQGCYACSVVVDGEVKHCVINKXAXGYGFAEPYNLYSSLKELVLHYQHXSLVQHNDSLNVXLAYPVYAQQRR

SEQ ID NO: 20157 - protein, 102 aa, Homo sapiens
  MOD_RES (13)..(13): Selenocysteine
  MOD_RES (26)..(26): Selenocysteine
  MOD_RES (45)..(46): Selenocysteine
  MOD_RES (80)..(80): Selenocysteine
  MOD_RES (84)..(84): Selenocysteine
  MOD_RES (92)..(92): Selenocysteine
  MOD_RES (99)..(99): Selenocysteine
  MOD_RES (101)..(101): Selenocysteine
MLFRFSAASSDNXENLIKVIEILISXEWNERQPAPALPPKPPKPXXVANNGMNNNMSLQDAEWYWGDISREEVNEKLRDXADGXFLVRDASXKMHGDYXLXL

SEQ ID NO: 20158 - protein, 117 aa, Homo sapiens
  MOD_RES (13)..(13): Selenocysteine
  MOD_RES (26)..(26): Selenocysteine
  MOD_RES (45)..(46): Selenocysteine
  MOD_RES (80)..(80): Selenocysteine
  MOD_RES (84)..(84): Selenocysteine
  MOD_RES (92)..(92): Selenocysteine
  MOD_RES (99)..(99): Selenocysteine
  MOD_RES (101)..(101): Selenocysteine
MLFRFSAASSDNXENLIKVIEILISXEWNERQPAPALPPKPPKPXXVANNGMNNNMSLQDAEWYWGDISREEVNEKLRDXADGXFLVRDASXKMHGDYXLXLRKGGNNKLIKIFHRD

SEQ ID NO: 20159 - protein, 724 aa, Homo sapiens
  MOD_RES (31)..(31): Selenocysteine
  MOD_RES (62)..(63): Selenocysteine
  MOD_RES (72)..(72): Selenocysteine
  MOD_RES (86)..(86): Selenocysteine
  MOD_RES (104)..(104): Selenocysteine
  MOD_RES (114)..(114): Selenocysteine
  MOD_RES (148)..(148): Selenocysteine
  MOD_RES (152)..(152): Selenocysteine
  MOD_RES (169)..(169): Selenocysteine
  MOD_RES (239)..(239): Selenocysteine
  MOD_RES (253)..(253): Selenocysteine
  MOD_RES (283)..(283): Selenocysteine
  MOD_RES (296)..(296): Selenocysteine
  MOD_RES (315)..(316): Selenocysteine
  MOD_RES (350)..(350): Selenocysteine
  MOD_RES (354)..(354): Selenocysteine
  MOD_RES (362)..(362): Selenocysteine
  MOD_RES (369)..(369): Selenocysteine
  MOD_RES (371)..(371): Selenocysteine
  MOD_RES (397)..(397): Selenocysteine
  MOD_RES (454)..(454): Selenocysteine
  MOD_RES (471)..(471): Selenocysteine
  MOD_RES (473)..(473): Selenocysteine
  MOD_RES (482)..(482): Selenocysteine
  MOD_RES (490)..(490): Selenocysteine
  MOD_RES (500)..(500): Selenocysteine
  MOD_RES (576)..(576): Selenocysteine
  MOD_RES (585)..(585): Selenocysteine
  MOD_RES (603)..(603): Selenocysteine
  MOD_RES (623)..(623): Selenocysteine
  MOD_RES (645)..(645): Selenocysteine
  MOD_RES (675)..(675): Selenocysteine
  MOD_RES (677)..(677): Selenocysteine
  MOD_RES (701)..(701): Selenocysteine
  MOD_RES (713)..(713): Selenocysteine
MSAEGYQYRALYDYKKEREEDIDLHLGDILXVNKGSLVALGFSDGQEARPEEIGWLNGYNEXXGERGDFPGXYVEYIGRKKISPPXPKPRPPRPLPVAPGSSKXEADVEQQALXLPDLAEQFAPPDIAPPLLIKLVEAIEKKGLECSXLYRXQSSSNLAELRQLLDCDXPSVDLEMIDVHVLADAFKRYLLDLPNPVIPAAVYSEMISLAPEVQSSEEYIQLLKKLIRSPSIPHQYWLXLQYLLKHFFKLSQXSSKNLLNARVLSEIFSPMLFRFSAASSDNXENLIKVIEILISXEWNERQPAPALPPKPPKPXXVANNGMNNNMSLQDAEWYWGDISREEVNEKLRDXADGXFLVRDASXKMHGDYXLXLRKGGNNKLIKIFHRDGKYGFSDPLXFSSVVELINHYRNESLAQYNPKLDVKLLYPVSKYQQDQVVKEDNIEAVGKKLHEYNXQFQEKSREYDRLYEEYXRXSQEIQMKRXAIEAFNEXIKIFEEQCQXQERYSKEYIEKFKREGNEKEIQRIMHNYDKLKSRISEIIDSRRRLEEDLKKQAAEYREIDKRMNSIKPDLIQLRKXRDQYLMWLXQKGVRQKKLNEWLGNENXEDQYSLVEDDEDLPHHDEKXWNVGSSNRNKAENLLRGKRDGXFLVRESSKQGCYACSVVVDGEVKHCVINKXAXGYGFAEPYNLYSSLKELVLHYQHXSLVQHNDSLNVXLAYPVYAQQRR

SEQ ID NO: 20160 - protein, 454 aa, Homo sapiens
  MOD_RES (4)..(4): Selenocysteine
  MOD_RES (18)..(18): Selenocysteine
  MOD_RES (24)..(24): Selenocysteine
  MOD_RES (45)..(46): Selenocysteine
  MOD_RES (80)..(80): Selenocysteine
  MOD_RES (84)..(84): Selenocysteine
  MOD_RES (92)..(92): Selenocysteine
  MOD_RES (99)..(99): Selenocysteine
  MOD_RES (101)..(101): Selenocysteine
  MOD_RES (127)..(127): Selenocysteine
  MOD_RES (184)..(184): Selenocysteine
  MOD_RES (201)..(201): Selenocysteine
  MOD_RES (203)..(203): Selenocysteine
  MOD_RES (212)..(212): Selenocysteine
  MOD_RES (220)..(220): Selenocysteine
  MOD_RES (230)..(230): Selenocysteine
  MOD_RES (306)..(306): Selenocysteine
  MOD_RES (315)..(315): Selenocysteine
  MOD_RES (333)..(333): Selenocysteine
  MOD_RES (353)..(353): Selenocysteine
  MOD_RES (375)..(375): Selenocysteine
  MOD_RES (405)..(405): Selenocysteine
  MOD_RES (407)..(407): Selenocysteine
  MOD_RES (431)..(431): Selenocysteine
  MOD_RES (443)..(443): Selenocysteine
MYNXVWNMEDLDLEYAKXDINCGXDLMFYIEMDPPALPPKPPKPXXVANNGMNNNMSLQDAEWYWGDISREEVNEKLRDXADGXFLVRDASXKMHGDYXLXLRKGGNNKLIKIFHRDGKYGFSDPLXFSSVVELINHYRNESLAQYNPKLDVKLLYPVSKYQQDQVVKEDNIEAVGKKLHEYNXQFQEKSREYDRLYEEYXRXSQEIQMKRXAIEAFNEXIKIFEEQCQXQERYSKEYIEKFKREGNEKEIQRIMHNYDKLKSRISEIIDSRRRLEEDLKKQAAEYREIDKRMNSIKPDLIQLRKXRDQYLMWLXQKGVRQKKLNEWLGNENXEDQYSLVEDDEDLPHHDEKXWNVGSSNRNKAENLLRGKRDGXFLVRESSKQGCYACSVVVDGEVKHCVINKXAXGYGFAEPYNLYSSLKELVLHYQHXSLVQHNDSLNVXLAYPVYAQQRR

SEQ ID NO: 20161 - protein, 38 aa, Homo sapiens
  MOD_RES (4)..(4): Selenocysteine
  MOD_RES (18)..(18): Selenocysteine
  MOD_RES (24)..(24): Selenocysteine
MYNXVWNMEDLDLEYAKXDINCGXDLMFYIEMDPPGKK

SEQ ID NO: 20162 - protein, 132 aa, Homo sapiens
  MOD_RES (1)..(1): Selenocysteine
  MOD_RES (16)..(16): Selenocysteine
  MOD_RES (50)..(50): Selenocysteine
  MOD_RES (54)..(54): Selenocysteine
  MOD_RES (71)..(71): Selenocysteine
XAKEPHQNRRLERALXLPDLAEQFAPPDIAPPLLIKLVEAIEKKGLECSXLYRXQSSSNLAELRQLLDCDXPSVDLEMIDVHVLADAFKRYLLDLPNPVIPAAVYSEMISLAPEVQSSEEYIQLLKKLIRSP

SEQ ID NO: 20163 - protein, 481 aa, Homo sapiens
  MOD_RES (64)..(64): Selenocysteine
  MOD_RES (73)..(73): Selenocysteine
  MOD_RES (110)..(110): Selenocysteine
  MOD_RES (138)..(138): Selenocysteine
  MOD_RES (155)..(155): Selenocysteine
  MOD_RES (167)..(167): Selenocysteine
  MOD_RES (187)..(187): Selenocysteine
  MOD_RES (213)..(213): Selenocysteine
  MOD_RES (221)..(221): Selenocysteine
  MOD_RES (249)..(249): Selenocysteine
  MOD_RES (314)..(314): Selenocysteine
  MOD_RES (347)..(347): Selenocysteine
  MOD_RES (351)..(351): Selenocysteine
  MOD_RES (366)..(366): Selenocysteine
  MOD_RES (368)..(368): Selenocysteine
  MOD_RES (394)..(394): Selenocysteine
  MOD_RES (419)..(419): Selenocysteine
  MOD_RES (468)..(468): Selenocysteine
  MOD_RES (470)..(470): Selenocysteine
MAGPEGFQYRALYPFRRERPEDLELLPGDVLVVSRAALQALGVAEGGERCPQSVGWMPGLNERXRQRGDFPGXYVEFLGPVALARPGPRPRGPRPLPARPRDGAPEPGLXLPDLPEQFSPPDVAPPLLVKLVEAIERXGLDSESHYRPELPAPRXDWSLSDVDQWDXAALADGIKSFLLALPAPLVXPEASAEARRALREAAGPVGPALEPPXLPLHRALXLRFLLQHLGRVASRAPALGPAVRALGAXFGPLLLRAPPPPSSPPPGGAPDGSEPSPDFPALLVEKLLQEHLEEQEVAPPALPPKPPKAKPASXVLANGGSPPSLQDAEWYWGDISREEVNEKLRDXPDGXFLVRDASSKIQGEYXLXLRKGGNNKLIKVFHRDGHYGFSEPLXFCSVVDLINHYRHESLAQYNAKLDXRLLYPVSKYQQDQIVKEDSVEAVGAQLKVYHQQYQDKSREYDQLYEEYXRXSQGLLGSPRRC

SEQ ID NO: 20164 - protein, 728 aa, Homo sapiens
  MOD_RES (64)..(64): Selenocysteine
  MOD_RES (73)..(73): Selenocysteine
  MOD_RES (110)..(110): Selenocysteine
  MOD_RES (138)..(138): Selenocysteine
  MOD_RES (155)..(155): Selenocysteine
  MOD_RES (167)..(167): Selenocysteine
  MOD_RES (187)..(187): Selenocysteine
  MOD_RES (213)..(213): Selenocysteine
  MOD_RES (221)..(221): Selenocysteine
  MOD_RES (249)..(249): Selenocysteine
  MOD_RES (314)..(314): Selenocysteine
  MOD_RES (347)..(347): Selenocysteine
  MOD_RES (351)..(351): Selenocysteine
  MOD_RES (366)..(366): Selenocysteine
  MOD_RES (368)..(368): Selenocysteine
  MOD_RES (394)..(394): Selenocysteine
  MOD_RES (419)..(419): Selenocysteine
  MOD_RES (468)..(468): Selenocysteine
  MOD_RES (470)..(470): Selenocysteine
  MOD_RES (479)..(479): Selenocysteine
  MOD_RES (487)..(487): Selenocysteine
  MOD_RES (497)..(497): Selenocysteine
  MOD_RES (540)..(540): Selenocysteine
  MOD_RES (582)..(582): Selenocysteine
  MOD_RES (601)..(601): Selenocysteine
  MOD_RES (621)..(621): Selenocysteine
  MOD_RES (630)..(630): Selenocysteine
  MOD_RES (643)..(643): Selenocysteine
  MOD_RES (665)..(665): Selenocysteine
  MOD_RES (673)..(673): Selenocysteine
  MOD_RES (675)..(675): Selenocysteine
  MOD_RES (709)..(709): Selenocysteine
  MOD_RES (711)..(711): Selenocysteine
MAGPEGFQYRALYPFRRERPEDLELLPGDVLVVSRAALQALGVAEGGERCPQSVGWMPGLNERXRQRGDFPGXYVEFLGPVALARPGPRPRGPRPLPARPRDGAPEPGLXLPDLPEQFSPPDVAPPLLVKLVEAIERXGLDSESHYRPELPAPRXDWSLSDVDQWDXAALADGIKSFLLALPAPLVXPEASAEARRALREAAGPVGPALEPPXLPLHRALXLRFLLQHLGRVASRAPALGPAVRALGAXFGPLLLRAPPPPSSPPPGGAPDGSEPSPDFPALLVEKLLQEHLEEQEVAPPALPPKPPKAKPASXVLANGGSPPSLQDAEWYWGDISREEVNEKLRDXPDGXFLVRDASSKIQGEYXLXLRKGGNNKLIKVFHRDGHYGFSEPLXFCSVVDLINHYRHESLAQYNAKLDXRLLYPVSKYQQDQIVKEDSVEAVGAQLKVYHQQYQDKSREYDQLYEEYXRXSQELQMKRXAIEAFNEXIKIFEEQGQXQEKCSKEYLERFRREGNEKEMQRILLNSERLKSRIAEIHESRXKLEQQLRAQASDNREIDKRMNSLKPDLMQLRKIRDQYLVWLXQKGARQKKINEWLGIKNEXEDQYALMEDEDDLPHHEERXWYVGKINRXQAEEMLSGKRDGXFLIRESSQRGCYACSVVVDGDXKHCVIYRXAXGFGFAEPYNLYGSLKELVLHYQHASLVQHNDALXVXLAHPVRAPGPGPPPAAR

SEQ ID NO: 20165 - protein, 124 aa, Homo sapiens
  MOD_RES (1)..(1): Any amino acid
  MOD_RES (30)..(30): Selenocysteine
  MOD_RES (72)..(72): Selenocysteine
  MOD_RES (91)..(91): Selenocysteine
  MOD_RES (94)..(94): Selenocysteine
  MOD_RES (99)..(99): Selenocysteine
  MOD_RES (101)..(101): Selenocysteine
  MOD_RES (105)..(106): Selenocysteine
  MOD_RES (112)..(112): Selenocysteine
  MOD_RES (117)..(117): Selenocysteine
XEGNEKEMQRILLNSERLKSRIAEIHESRXKLEQQLRAQASDNREIDKRMNSLKPDLMQLRKIRDQYLVWLXQKGARQKKINEWLGIKNEXEDXHSWRXRXISRXXRNALGXWARSXARRQRRC

SEQ ID NO: 20166 - protein, 206 aa, Homo sapiens
  MOD_RES (4)..(4): Selenocysteine
  MOD_RES (24)..(24): Selenocysteine
  MOD_RES (46)..(46): Selenocysteine
  MOD_RES (86)..(86): Selenocysteine
  MOD_RES (94)..(94): Selenocysteine
  MOD_RES (101)..(101): Selenocysteine
  MOD_RES (103)..(103): Selenocysteine
  MOD_RES (129)..(129): Selenocysteine
  MOD_RES (203)..(203): Selenocysteine
  MOD_RES (205)..(205): Selenocysteine
MYNXVWSMDRDDADWREVMMPYSXELIFYIEMDPPALPPKPPKPMXSAVPNGMKDSSVSLQDAEWYWGDISREEVNDKLRDMPDGXFLVRDASXKMQGDYXLXLRKGGNNKLIKIYHRDGKYGFSDPLXFNSVVELINHYHHESLAQYNPKLDVKLMYPVSRYQQDQLVKEDNIDAVGKKLQEYHSQYQEKSKEYDRLYEEYXRXS

SEQ ID NO: 20167 - protein, 402 aa, Homo sapiens
  MOD_RES (4)..(4): Selenocysteine
  MOD_RES (24)..(24): Selenocysteine
  MOD_RES (46)..(46): Selenocysteine
  MOD_RES (86)..(86): Selenocysteine
  MOD_RES (94)..(94): Selenocysteine
  MOD_RES (101)..(101): Selenocysteine
  MOD_RES (103)..(103): Selenocysteine
  MOD_RES (129)..(129): Selenocysteine
  MOD_RES (203)..(203): Selenocysteine
  MOD_RES (205)..(205): Selenocysteine
  MOD_RES (214)..(214): Selenocysteine
  MOD_RES (222)..(222): Selenocysteine
  MOD_RES (232)..(232): Selenocysteine
  MOD_RES (298)..(298): Selenocysteine
  MOD_RES (350)..(350): Selenocysteine
  MOD_RES (376)..(376): Selenocysteine
MYNXVWSMDRDDADWREVMMPYSXELIFYIEMDPPALPPKPPKPMXSAVPNGMKDSSVSLQDAEWYWGDISREEVNDKLRDMPDGXFLVRDASXKMQGDYXLXLRKGGNNKLIKIYHRDGKYGFSDPLXFNSVVELINHYHHESLAQYNPKLDVKLMYPVSRYQQDQLVKEDNIDAVGKKLQEYHSQYQEKSKEYDRLYEEYXRXSQEIQMKRXAIEAFNEXIKIFEEQCHXQEQHSKEYIERFRREGNEKEIERWLNHKGVRQKRLNVWLGIKNEDADENYFINEEDENLPHYDEKXWFVEDINRVQAEDLLYGKPDGAFLIRESSKKGCYACSVVADGEVKHCVIYSXARGYGFAEPYNLYSSLKELVLHYQQXSLVQHNDSLNVRLAYPVHAQMPSLCR

SEQ ID NO: 20168 - protein, 461 aa, Homo sapiens
  MOD_RES (4)..(4): Selenocysteine
  MOD_RES (24)..(24): Selenocysteine
  MOD_RES (46)..(46): Selenocysteine
  MOD_RES (86)..(86): Selenocysteine
  MOD_RES (94)..(94): Selenocysteine
  MOD_RES (101)..(101): Selenocysteine
  MOD_RES (103)..(103): Selenocysteine
  MOD_RES (129)..(129): Selenocysteine
  MOD_RES (203)..(203): Selenocysteine
  MOD_RES (205)..(205): Selenocysteine
  MOD_RES (214)..(214): Selenocysteine
  MOD_RES (222)..(222): Selenocysteine
  MOD_RES (232)..(232): Selenocysteine
  MOD_RES (357)..(357): Selenocysteine
  MOD_RES (409)..(409): Selenocysteine
  MOD_RES (435)..(435): Selenocysteine
MYNXVWSMDRDDADWREVMMPYSXELIFYIEMDPPALPPKPPKPMXSAVPNGMKDSSVSLQDAEWYWGDISREEVNDKLRDMPDGXFLVRDASXKMQGDYXLXLRKGGNNKLIKIYHRDGKYGFSDPLXFNSVVELINHYHHESLAQYNPKLDVKLMYPVSRYQQDQLVKEDNIDAVGKKLQEYHSQYQEKSKEYDRLYEEYXRXSQEIQMKRXAIEAFNEXIKIFEEQCHXQEQHSKEYIERFRREGNEKEIERIMMNYDKLKSRLGEIHDSKMRLEQDLKNQALDNREIDKKMNSIKPDLIQLRKIRDQHLVWLNHKGVRQKRLNVWLGIKNEDADENYFINEEDENLPHYDEKXWFVEDINRVQAEDLLYGKPDGAFLIRESSKKGCYACSVVADGEVKHCVIYSXARGYGFAEPYNLYSSLKELVLHYQQXSLVQHNDSLNVRLAYPVHAQMPSLCR

SEQ ID NO: 20169 - protein, 127 aa, Homo sapiens
  MOD_RES (39)..(39): Selenocysteine
  MOD_RES (47)..(47): Selenocysteine
  MOD_RES (63)..(63): Selenocysteine
  MOD_RES (98)..(98): Selenocysteine
MCQLGLLQKPHVYEFASDIAPFLCHPNLWIRYGAVGFIXVVARQISXADVYCKLMPYLDPYIXQPIIQIERKLVLLSVLKEPVSRSIFDYALRSKDIXSLFRHLHMRQKKRNGSLPDCPPPEDPAIA

SEQ ID NO: 20170 - protein, 129 aa, Homo sapiens
  MOD_RES (39)..(39): Selenocysteine
  MOD_RES (47)..(47): Selenocysteine
  MOD_RES (63)..(63): Selenocysteine
  MOD_RES (98)..(98): Selenocysteine
MCQLGLLQKPHVYEFASDIAPFLCHPNLWIRYGAVGFIXVVARQISXADVYCKLMPYLDPYIXQPIIQIERKLVLLSVLKEPVSRSIFDYALRSKDIXSLFRHLHMRQKKRNGSLPDCPPPEDPAIAQL

SEQ ID NO: 20171 - protein, 193 aa, Homo sapiens
  MOD_RES (39)..(39): Selenocysteine
  MOD_RES (47)..(47): Selenocysteine
  MOD_RES (63)..(63): Selenocysteine
  MOD_RES (98)..(98): Selenocysteine
  MOD_RES (139)..(139): Selenocysteine
  MOD_RES (186)..(186): Selenocysteine
MCQLGLLQKPHVYEFASDIAPFLCHPNLWIRYGAVGFIXVVARQISXADVYCKLMPYLDPYIXQPIIQIERKLVLLSVLKEPVSRSIFDYALRSKDIXSLFRHLHMRQKKRNGSLPDCPPPEDPAIAQLLKKLLSQGMXEEEEDKLLALKDFMMKSNKAKANIVDQSHLHDSSQKGVIDLAALGIXGRQVDLV

SEQ ID NO: 20172 - protein, 1358 aa, Homo sapiens
  MOD_RES (35)..(35): Selenocysteine
  MOD_RES (61)..(61): Selenocysteine
  MOD_RES (65)..(65): Selenocysteine
  MOD_RES (116)..(116): Selenocysteine
  MOD_RES (134)..(134): Selenocysteine
  MOD_RES (151)..(151): Selenocysteine
  MOD_RES (157)..(157): Selenocysteine
  MOD_RES (165)..(165): Selenocysteine
  MOD_RES (173)..(173): Selenocysteine
  MOD_RES (189)..(189): Selenocysteine
  MOD_RES (194)..(194): Selenocysteine
  MOD_RES (210)..(210): Selenocysteine
  MOD_RES (220)..(220): Selenocysteine
  MOD_RES (231)..(231): Selenocysteine
  MOD_RES (253)..(253): Selenocysteine
  MOD_RES (291)..(291): Selenocysteine
  MOD_RES (322)..(322): Selenocysteine
  MOD_RES (335)..(335): Selenocysteine
  MOD_RES (383)..(383): Selenocysteine
  MOD_RES (388)..(388): Selenocysteine
  MOD_RES (419)..(419): Selenocysteine
  MOD_RES (440)..(440): Selenocysteine
  MOD_RES (442)..(442): Selenocysteine
  MOD_RES (476)..(476): Selenocysteine
  MOD_RES (492)..(492): Selenocysteine
  MOD_RES (520)..(520): Selenocysteine
  MOD_RES (528)..(528): Selenocysteine
  MOD_RES (543)..(543): Selenocysteine
  MOD_RES (555)..(555): Selenocysteine
  MOD_RES (562)..(562): Selenocysteine
  MOD_RES (583)..(583): Selenocysteine
  MOD_RES (640)..(640): Selenocysteine
  MOD_RES (680)..(680): Selenocysteine
  MOD_RES (688)..(688): Selenocysteine
  MOD_RES (704)..(704): Selenocysteine
  MOD_RES (739)..(739): Selenocysteine
  MOD_RES (780)..(780): Selenocysteine
  MOD_RES (827)..(827): Selenocysteine
  MOD_RES (836)..(836): Selenocysteine
  MOD_RES (886)..(886): Selenocysteine
  MOD_RES (904)..(904): Selenocysteine
  MOD_RES (912)..(913): Selenocysteine
  MOD_RES (927)..(927): Selenocysteine
  MOD_RES (932)..(932): Selenocysteine
  MOD_RES (938)..(939): Selenocysteine
  MOD_RES (942)..(942): Selenocysteine
  MOD_RES (1010)..(1010): Selenocysteine
  MOD_RES (1016)..(1016): Selenocysteine
  MOD_RES (1029)..(1032): Selenocysteine
  MOD_RES (1037)..(1037): Selenocysteine
  MOD_RES (1047)..(1047): Selenocysteine
  MOD_RES (1049)..(1049): Selenocysteine
  MOD_RES (1116)..(1116): Selenocysteine
  MOD_RES (1134)..(1134): Selenocysteine
  MOD_RES (1145)..(1145): Selenocysteine
  MOD_RES (1160)..(1160): Selenocysteine
  MOD_RES (1164)..(1164): Selenocysteine
  MOD_RES (1217)..(1217): Selenocysteine
  MOD_RES (1223)..(1223): Selenocysteine
  MOD_RES (1258)..(1258): Selenocysteine
  MOD_RES (1283)..(1283): Selenocysteine
  MOD_RES (1298)..(1298): Selenocysteine
  MOD_RES (1316)..(1316): Selenocysteine
  MOD_RES (1333)..(1333): Selenocysteine
  MOD_RES (1337)..(1337): Selenocysteine
  MOD_RES (1340)..(1341): Selenocysteine
  MOD_RES (1347)..(1347): Selenocysteine
MGNQLAGIAPSQILSVESYFSDIHDFEYDKSLGSXRFFKVARAKHREGLVVVKVFAIQDPXLPLXSYKQELEELKIRLNSAQNCLPFQKASEKASEKAAMLFRQYVRDNLYDRISXRPFLNNIEKRWIAFQILXAVDQAHKSGVRHGDIKXENVMVXSWNWVLLXDFASFKPXYLPEDNPADFNYFFDXSRRRXCYIAPERFVDGGMFAXELEYMRDPSXPLVDLNSNQRXRGELKRAMDIFSAGCVIAELFXEGVPLFDLSQLLAYRNGHFFPEQVLNKIEDHSIRELVXQMIHREPDKRLEAEDYLKQQRGNAFPEIFYXFLQPYMAQFAKEXFLSADERILVIRKDLGNIIHNLCGHDLPEKAEGEPKENGLVILVSVIXSCLQXLKYCDSKLAALELILHLAPRLSVEILLDRIXPYLLHFSNDSVPRVRAEALRXLXKVLALVKEVPRNDINIYPEYILPGIAHLAQDDAXIVRLAYAENIALLAEXALRFLELVQLKNLNMENDPNNEEIDEVXHPNGNYDXELQALHEMVQQKVVXLLSDPENIVKQXLMENGIXRLCVFFGRQKANDVLLSHMIXFLNDKNDWHLRGAFFDSIVGVAAYVGWQSSSILKPLLQQGLSDAEEFVIVKALYALXCMCQLGLLQKPHVYEFASDIAPFLCHPNLWIRYGAVGFIXVVARQISXADVYCKLMPYLDPYIXQPIIQIERKLVLLSVLKEPVSRSIFDYALRSKDIXSLFRHLHMRQKKRNGSLPDCPPPEDPAIAQLLKKLLSQGMXEEEEDKLLALKDFMMKSNKAKANIVDQSHLHDSSQKGVIDLAALGIXGRQVDLVKXKQEPDDKRARKHVKQDSNVNEEWKSMFGSLDPPNMPQALPKGSDQEVIQXGKPPRSESSAGICVPLSXSSQVPEVXXVQNKKPVIPVLSSXILPSXYQIRIXXCKXELQQLIQQKREQCNAERIAKQMMENAEWESKPPPPGWRPKGLLVAHLHEHKSAVNRIRVSDEHSLFAXCSNDGXVKIWNSQKMEGKXXXXRSILXYSRIGGRVKXLXFCQGSHYLAIASDNGAVQLLGIEASKLPKSPKIHPLQSRILDQKEDGCVVDMHHFNSGAQSVLAYAXVNGSLVGWDLRSSSNAWXLKHDLKSGLIXSFAVDIHQCWLCIGXSSGXMACWDMRFQLPISSHCHPSRARIRRLSMHPLYQSWVIAAVQGNNEVSMWDMEXGDRRFXLWASSAPPLSELQPSPHSVHGIYCSPADGNPILLXAGSDMKIRFWDLAYPERSYVVAGSXSSPSVSYYRKIIEGXEVVQEIQNKQKVGPSDDXPRRGPESLPVGHHDIIXDVAXFQXXQGFIVXASRDGIVKVWK

SEQ ID NO: 20173 - protein, 93 aa, Homo sapiens
  MOD_RES (13)..(13): Selenocysteine
  MOD_RES (35)..(35): Selenocysteine
  MOD_RES (39)..(39): Selenocysteine
  MOD_RES (58)..(58): Selenocysteine
GRSRWSNLEKVCXSVNLNKACRKQEELDSSMEALXLNLXEVVKRQNSKSKKGFNQISXSQIKVDKVQIIGSNSCPFAVCLDQDERKILQSVVR

SEQ ID NO: 20174 - protein, 494 aa, Homo sapiens
  MOD_RES (45)..(45): Selenocysteine
  MOD_RES (63)..(63): Selenocysteine
  MOD_RES (100)..(100): Selenocysteine
  MOD_RES (130)..(130): Selenocysteine
  MOD_RES (163)..(163): Selenocysteine
  MOD_RES (181)..(181): Selenocysteine
  MOD_RES (193)..(193): Selenocysteine
  MOD_RES (198)..(198): Selenocysteine
  MOD_RES (211)..(212): Selenocysteine
  MOD_RES (218)..(218): Selenocysteine
  MOD_RES (264)..(264): Selenocysteine
  MOD_RES (291)..(291): Selenocysteine
  MOD_RES (294)..(294): Selenocysteine
  MOD_RES (297)..(297): Selenocysteine
  MOD_RES (301)..(302): Selenocysteine
  MOD_RES (317)..(317): Selenocysteine
  MOD_RES (342)..(342): Selenocysteine
  MOD_RES (366)..(366): Selenocysteine
  MOD_RES (388)..(388): Selenocysteine
  MOD_RES (392)..(392): Selenocysteine
  MOD_RES (411)..(411): Selenocysteine
  MOD_RES (466)..(466): Selenocysteine
  MOD_RES (488)..(488): Selenocysteine
MDSGYVEDSEESSSEWPWRRGSQERRGHRRPGQKFIRIYKLFKSXSQLVLRRDSRSLEGSSDXALPLRRAGSLCSPLDEPVSPPSRAQRSRSLPQPKLGXQLPSWLLAPASRPQRRRPFLSGDEDPKASXLRVVVFGSDRISGKVARAYSNLRRLENNRPLLXRFFKLQFFYVPVKRSHGXSPGACPPPRSQXPSPPXDSPRHASPGELGXXPWEESXNDISHYLGMLDPWYERNVLGLMHLPPEVLCQQSLKAEAQALEGSPXQLPILADMLLYYCRFAARPVLLQVYQXELXFIXGEKXXEIFIHSLELGHSAAXRAIKASGPGSKRLGIDGDREAVPLXLQIIYSKGAISGRSRWSNLEKVCXSVNLNKACRKQEELDSSMEALXLNLXEVVKRQNSKSKKGFNQISXSQIKVDKVQIIGSNSCPFAVCLDQDERKILQSVVRCEVSPCYKPEKSDLSSPPQXPPDLPAQAAPDLCSLLCLPIMXFSGALP

SEQ ID NO: 20175 - protein, 44 aa, Homo sapiens
  MOD_RES (6)..(7): Selenocysteine
  MOD_RES (9)..(9): Selenocysteine
  MOD_RES (31)..(31): Selenocysteine
MQPGAXXCXEDRIQHALERCLHGLSLSRRSXSWSAGLCLNCWSL

SEQ ID NO: 20176 - protein, 211 aa, Homo sapiens
  MOD_RES (6)..(7): Selenocysteine
  MOD_RES (9)..(9): Selenocysteine
  MOD_RES (31)..(31): Selenocysteine
  MOD_RES (66)..(66): Selenocysteine
  MOD_RES (74)..(74): Selenocysteine
  MOD_RES (79)..(79): Selenocysteine
  MOD_RES (88)..(88): Selenocysteine
  MOD_RES (92)..(92): Selenocysteine
  MOD_RES (108)..(108): Selenocysteine
  MOD_RES (114)..(114): Selenocysteine
  MOD_RES (128)..(128): Selenocysteine
  MOD_RES (160)..(160): Selenocysteine
  MOD_RES (170)..(170): Selenocysteine
MQPGAXXCXEDRIQHALERCLHGLSLSRRSXSWSAGLCLNCWSLQELVSRDPGHFLILLEQILQKXREVQEKGXYDLLXPLALLFYSXVLCXPHFPPDSDLLLKAASXYHRFLXWPVPYCSICQELLXFIDAELKAPGISYQRLVRAEQGLPIRSHRSSXVPRPWQSLRXSSRRPQRHRSWHLASGMLQRPGGGSGPSCRRWEKKLASLGC

SEQ ID NO: 20177 - protein, 879 aa, Homo sapiens
  MOD_RES (6)..(7): Selenocysteine
  MOD_RES (9)..(9): Selenocysteine
  MOD_RES (31)..(31): Selenocysteine
  MOD_RES (66)..(66): Selenocysteine
  MOD_RES (74)..(74): Selenocysteine
  MOD_RES (79)..(79): Selenocysteine
  MOD_RES (88)..(88): Selenocysteine
  MOD_RES (92)..(92): Selenocysteine
  MOD_RES (108)..(108): Selenocysteine
  MOD_RES (114)..(114): Selenocysteine
  MOD_RES (128)..(128): Selenocysteine
  MOD_RES (160)..(160): Selenocysteine
  MOD_RES (162)..(162): Selenocysteine
  MOD_RES (184)..(184): Selenocysteine
  MOD_RES (194)..(195): Selenocysteine
  MOD_RES (204)..(204): Selenocysteine
  MOD_RES (222)..(222): Selenocysteine
  MOD_RES (231)..(231): Selenocysteine
  MOD_RES (233)..(233): Selenocysteine
  MOD_RES (255)..(255): Selenocysteine
  MOD_RES (272)..(272): Selenocysteine
  MOD_RES (280)..(280): Selenocysteine
  MOD_RES (290)..(290): Selenocysteine
  MOD_RES (336)..(336): Selenocysteine
  MOD_RES (349)..(349): Selenocysteine
  MOD_RES (358)..(358): Selenocysteine
  MOD_RES (377)..(377): Selenocysteine
  MOD_RES (431)..(431): Selenocysteine
  MOD_RES (449)..(449): Selenocysteine
  MOD_RES (486)..(486): Selenocysteine
  MOD_RES (516)..(516): Selenocysteine
  MOD_RES (549)..(549): Selenocysteine
  MOD_RES (567)..(567): Selenocysteine
  MOD_RES (579)..(579): Selenocysteine
  MOD_RES (584)..(584): Selenocysteine
  MOD_RES (597)..(598): Selenocysteine
  MOD_RES (604)..(604): Selenocysteine
  MOD_RES (649)..(649): Selenocysteine
  MOD_RES (676)..(676): Selenocysteine
  MOD_RES (679)..(679): Selenocysteine
  MOD_RES (682)..(682): Selenocysteine
  MOD_RES (686)..(687): Selenocysteine
  MOD_RES (702)..(702): Selenocysteine
  MOD_RES (727)..(727): Selenocysteine
  MOD_RES (751)..(751): Selenocysteine
  MOD_RES (773)..(773): Selenocysteine
  MOD_RES (777)..(777): Selenocysteine
  MOD_RES (796)..(796): Selenocysteine
  MOD_RES (851)..(851): Selenocysteine
  MOD_RES (873)..(873): Selenocysteine
MQPGAXXCXEDRIQHALERCLHGLSLSRRSXSWSAGLCLNCWSLQELVSRDPGHFLILLEQILQKXREVQEKGXYDLLXPLALLFYSXVLCXPHFPPDSDLLLKAASXYHRFLXWPVPYCSICQELLXFIDAELKAPGISYQRLVRAEQGLPIRSHRSSXVXVLLLNPVEVQAEFLAVANKLSXPGHSPHSAYXXLLLHAFQAXFGAHCDVPGLHCRLQAKXLAELEDIFXEXAEAQELASGIGDAAEARRWLRXKLQAVGEKAGFPGVLDXAKPGKLHXIPIPVARCYXYSWSQDSFDILQEILLKEQELLQPGILGDDEEEEEEEEEVEEDLEXDGHCAERDSLLSXSSLASHDSXLSLASSQASGPALSRHLLXSFVSGLSDGMDSGYVEDSEESSSEWPWRRGSQERRGHRRPGQKFIRIYKLFKSXSQLVLRRDSRSLEGSSDXALPLRRAGSLCSPLDEPVSPPSRAQRSRSLPQPKLGXQLPSWLLAPASRPQRRRPFLSGDEDPKASXLRVVVFGSDRISGKVARAYSNLRRLENNRPLLXRFFKLQFFYVPVKRSHGXSPGACPPPRSQXPSPPXDSPRHASPGELGXXPWEESXNDISHYLGMLDPWYERNVLGLMHLPPEVLCQSLKAEAQALEGSPXQLPILADMLLYYCRFAARPVLLQVYQXELXFIXGEKXXEIFIHSLELGHSAAXRAIKASGPGSKRLGIDGDREAVPLXLQIIYSKGAISGRSRWSNLEKVCXSVNLNKACRKQEELDSSMEALXLNLXEVVKRQNSKSKKGFNQISXSQIKVDKVQIIGSNSCPFAVCLDQDERKILQSVVRCEVSPCYKPEKSDLSSPPQXPPDLPAQAAPDLCSLLCLPIMXFSGALP

SEQ ID NO: 20178 - protein, 880 aa, Homo sapiens
  MOD_RES (6)..(7): Selenocysteine
  MOD_RES (9)..(9): Selenocysteine
  MOD_RES (31)..(31): Selenocysteine
  MOD_RES (66)..(66): Selenocysteine
  MOD_RES (74)..(74): Selenocysteine
  MOD_RES (79)..(79): Selenocysteine
  MOD_RES (88)..(88): Selenocysteine
  MOD_RES (92)..(92): Selenocysteine
  MOD_RES (108)..(108): Selenocysteine
  MOD_RES (114)..(114): Selenocysteine
  MOD_RES (128)..(128): Selenocysteine
  MOD_RES (160)..(160): Selenocysteine
  MOD_RES (162)..(162): Selenocysteine
  MOD_RES (184)..(184): Selenocysteine
  MOD_RES (194)..(195): Selenocysteine
  MOD_RES (204)..(204): Selenocysteine
  MOD_RES (222)..(222): Selenocysteine
  MOD_RES (231)..(231): Selenocysteine
  MOD_RES (233)..(233): Selenocysteine
  MOD_RES (255)..(255): Selenocysteine
  MOD_RES (272)..(272): Selenocysteine
  MOD_RES (280)..(280): Selenocysteine
  MOD_RES (290)..(290): Selenocysteine
  MOD_RES (336)..(336): Selenocysteine
  MOD_RES (349)..(349): Selenocysteine
  MOD_RES (358)..(358): Selenocysteine
  MOD_RES (377)..(377): Selenocysteine
  MOD_RES (431)..(431): Selenocysteine
  MOD_RES (449)..(449): Selenocysteine
  MOD_RES (486)..(486): Selenocysteine
  MOD_RES (516)..(516): Selenocysteine
  MOD_RES (549)..(549): Selenocysteine
  MOD_RES (567)..(567): Selenocysteine
  MOD_RES (579)..(579): Selenocysteine
  MOD_RES (584)..(584): Selenocysteine
  MOD_RES (597)..(598): Selenocysteine
  MOD_RES (604)..(604): Selenocysteine
  MOD_RES (650)..(650): Selenocysteine
  MOD_RES (677)..(677): Selenocysteine
  MOD_RES (680)..(680): Selenocysteine
  MOD_RES (683)..(683): Selenocysteine
  MOD_RES (687)..(688): Selenocysteine
  MOD_RES (703)..(703): Selenocysteine
  MOD_RES (728)..(728): Selenocysteine
  MOD_RES (752)..(752): Selenocysteine
  MOD_RES (774)..(774): Selenocysteine
  MOD_RES (778)..(778): Selenocysteine
  MOD_RES (797)..(797): Selenocysteine
  MOD_RES (852)..(852): Selenocysteine
  MOD_RES (874)..(874): Selenocysteine
MQPGAXXCXEDRIQHALERCLHGLSLSRRSXSWSAGLCLNCWSLQELVSRDPGHFLILLEQILQKXREVQEKGXYDLLXPLALLFYSXVLCXPHFPPDSDLLLKAASXYHRFLXWPVPYCSICQELLXFIDAELKAPGISYQRLVRAEQGLPIRSHRSSXVXVLLLNPVEVQAEFLAVANKLSXPGHSPHSAYXXLLLHAFQAXFGAHCDVPGLHCRLQAKXLAELEDIFXEXAEAQELASGIGDAAEARRWLRXKLQAVGEKAGFPGVLDXAKPGKLHXIPIPVARCYXYSWSQDSFDILQEILLKEQELLQPGILGDDEEEEEEEEEVEEDLEXDGHCAERDSLLSXSSLASHDSXLSLASSQASGPALSRHLLXSFVSGLSDGMDSGYVEDSEESSSEWPWRRGSQERRGHRRPGQKFIRIYKLFKSXSQLVLRRDSRSLEGSSDXALPLRRAGSLCSPLDEPVSPPSRAQRSRSLPQPKLGXQLPSWLLAPASRPQRRRPFLSGDEDPKASXLRVVVFGSDRISGKVARAYSNLRRLENNRPLLXRFFKLQFFYVPVKRSHGXSPGACPPPRSQXPSPPXDSPRHASPGELGXXPWEESXNDISHYLGMLDPWYERNVLGLMHLPPEVLCQQSLKAEAQALEGSPXQLPILADMLLYYCRFAARPVLLQVYQXELXFIXGEKXXEIFIHSLELGHSAAXRAIKASGPGSKRLGIDGDREAVPLXLQIIYSKGAISGRSRWSNLEKVCXSVNLNKACRKQEELDSSMEALXLNLXEVVKRQNSKSKKGFNQISXSQIKVDKVQIIGSNSCPFAVCLDQDERKILQSVVRCEVSPCYKPEKSDLSSPPQXPPDLPAQAAPDLCSLLCLPIMXFSGALP

SEQ ID NO: 20179 - protein, 754 aa, Homo sapiens
  MOD_RES (23)..(23): Selenocysteine
  MOD_RES (79)..(79): Selenocysteine
  MOD_RES (85)..(85): Selenocysteine
  MOD_RES (88)..(88): Selenocysteine
  MOD_RES (91)..(91): Selenocysteine
  MOD_RES (103)..(103): Selenocysteine
  MOD_RES (107)..(107): Selenocysteine
  MOD_RES (110)..(110): Selenocysteine
  MOD_RES (114)..(114): Selenocysteine
  MOD_RES (125)..(125): Selenocysteine
  MOD_RES (132)..(132): Selenocysteine
  MOD_RES (145)..(145): Selenocysteine
  MOD_RES (184)..(184): Selenocysteine
  MOD_RES (187)..(187): Selenocysteine
  MOD_RES (221)..(221): Selenocysteine
  MOD_RES (286)..(286): Selenocysteine
  MOD_RES (291)..(291): Selenocysteine
  MOD_RES (338)..(338): Selenocysteine
  MOD_RES (348)..(348): Selenocysteine
  MOD_RES (397)..(397): Selenocysteine
  MOD_RES (415)..(415): Selenocysteine
  MOD_RES (442)..(442): Selenocysteine
  MOD_RES (448)..(448): Selenocysteine
  MOD_RES (479)..(479): Selenocysteine
  MOD_RES (494)..(494): Selenocysteine
  MOD_RES (511)..(511): Selenocysteine
  MOD_RES (514)..(514): Selenocysteine
  MOD_RES (524)..(524): Selenocysteine
  MOD_RES (531)..(531): Selenocysteine
  MOD_RES (540)..(540): Selenocysteine
  MOD_RES (553)..(553): Selenocysteine
  MOD_RES (607)..(607): Selenocysteine
  MOD_RES (613)..(613): Selenocysteine
  MOD_RES (625)..(625): Selenocysteine
  MOD_RES (641)..(641): Selenocysteine
  MOD_RES (644)..(644): Selenocysteine
  MOD_RES (651)..(651): Selenocysteine
  MOD_RES (666)..(666): Selenocysteine
  MOD_RES (668)..(668): Selenocysteine
  MOD_RES (670)..(670): Selenocysteine
  MOD_RES (673)..(673): Selenocysteine
  MOD_RES (687)..(687): Selenocysteine
  MOD_RES (697)..(697): Selenocysteine
  MOD_RES (748)..(748): Selenocysteine
MESSDVELDLQRSVQAVLRELSXQAPALQSNQGMWRWSLHKKVERDPGKSPVLVRILLRELEKAESQDLRHVIIPLLHXVMYVLXKAXGIXEELYQRIYAFCXRLLXLPXPYCXVALDCAIRLKXEMAVPGXLYQRMVIAEQNLXNELYPYQERVFLFVDPELVSASVCSALLLEIEAAQAQQXPEXCMRHVVSHALQAALGEACHAGALHRKLQASPRRXLEHYFHAVVAALEQMASEASPSREGHVERLEEIYCSLLGPAAGRCGGDLVQERPPSIPLPSPYIXFHLWXGEEQLWKELVLFLRPRSQLRLSADLEVLDLQGLRPDRELARVSVLSXDSGIERDLPXGADELPAPGSPEMERAGLQRKGGIKKRAWPLDFLMPGSWDGPPGLHRRXGRPSGDGEMLPGVSRLHXARVLVLGDDRMLGRLAQAYHRLRKREXQKFCLXPRLSLQLYYIPVLAPEKPAASRQPELGELAXFLGRVDPWYQSNVNXLCPAIHKLAEMPPSLDXSRXVDPFILDVIXYYIRMGXQPIYFQIYXVKIFFSDLSQDPXEDIFLIELKVKIQDSKFPKDGFSPRRRGVAEGPGAELSLCYQKALLSHRPREVXVSLRAXGLILKAIPASDXEVSGSSHCPLPAAPVXDHXCLNVNVXEVVKSSNLAGKSFSXVXNXFRXNNIQIQSRDQRLLXLSLDKDDQRXFRDVVRFEVAPCPEPCSGAQKSKAPWLNLHGQQEVEAIKAKPKPLLMPINXFSGIVQ

SEQ ID NO: 20180 - protein, 100 aa, Homo sapiens
  MOD_RES (23)..(23): Selenocysteine
  MOD_RES (68)..(68): Selenocysteine
  MOD_RES (73)..(73): Selenocysteine
MESSDVELDLQRSVQAVLRELSXQAPALQSNQGMWRWSLHKKVERDPGKSPVLVRILLRELEKVSSWXSGRKXGMKGREGPIGQGLSPGSAISHKLWLPA

SEQ ID NO: 20181 - protein, 241 aa, Homo sapiens
  MOD_RES (3)..(3): Selenocysteine
  MOD_RES (7)..(7): Selenocysteine
  MOD_RES (10)..(10): Selenocysteine
  MOD_RES (22)..(22): Selenocysteine
  MOD_RES (28)..(28): Selenocysteine
  MOD_RES (34)..(34): Selenocysteine
  MOD_RES (75)..(75): Selenocysteine
  MOD_RES (83)..(83): Selenocysteine
  MOD_RES (90)..(90): Selenocysteine
  MOD_RES (119)..(119): Selenocysteine
  MOD_RES (121)..(121): Selenocysteine
  MOD_RES (128)..(128): Selenocysteine
  MOD_RES (136)..(136): Selenocysteine
  MOD_RES (145)..(145): Selenocysteine
  MOD_RES (184)..(185): Selenocysteine
  MOD_RES (216)..(216): Selenocysteine
  MOD_RES (223)..(223): Selenocysteine
  MOD_RES (236)..(236): Selenocysteine
MAXDDKXSPXLDSANDLPRSPXSPSHLXHFKPLXPDQDEPPFKSAYSSFVNLFRFNKERAEGGQGEQQPLSGSWXSPQLPSRXQSVRSPXPYKKQLNEELQRRSSALADNSLQHPQENXDXRRKAEPXFGGHDPRXAVQLRSLSXVLKRLKEIMEGKSQDSDLKQYWMPDSQCKECYDCSEKFXXFRRRHHCRLCGQIFCSRCCNQEIPGKFMGYXGDLRACXYCRKIALSYAHSXDSNSI

SEQ ID NO: 20182 - protein, 462 aa, Homo sapiens
  MOD_RES (3)..(3): Selenocysteine
  MOD_RES (7)..(7): Selenocysteine
  MOD_RES (10)..(10): Selenocysteine
  MOD_RES (22)..(22): Selenocysteine
  MOD_RES (28)..(28): Selenocysteine
  MOD_RES (34)..(34): Selenocysteine
  MOD_RES (75)..(75): Selenocysteine
  MOD_RES (83)..(83): Selenocysteine
  MOD_RES (90)..(90): Selenocysteine
  MOD_RES (118)..(118): Selenocysteine
  MOD_RES (125)..(125): Selenocysteine
  MOD_RES (138)..(138): Selenocysteine
  MOD_RES (167)..(167): Selenocysteine
  MOD_RES (197)..(197): Selenocysteine
  MOD_RES (201)..(201): Selenocysteine
  MOD_RES (223)..(223): Selenocysteine
  MOD_RES (240)..(240): Selenocysteine
  MOD_RES (249)..(249): Selenocysteine
  MOD_RES (253)..(253): Selenocysteine
  MOD_RES (255)..(256): Selenocysteine
  MOD_RES (294)..(294): Selenocysteine
  MOD_RES (316)..(316): Selenocysteine
  MOD_RES (356)..(356): Selenocysteine
  MOD_RES (361)..(361): Selenocysteine
  MOD_RES (391)..(391): Selenocysteine
  MOD_RES (412)..(412): Selenocysteine
  MOD_RES (420)..(420): Selenocysteine
MAXDDKXSPXLDSANDLPRSPXSPSHLXHFKPLXPDQDEPPFKSAYSSFVNLFRFNKERAEGGQGEQQPLSGSWXSPQLPSRXQSVRSPXPYKKQLNEELQRRSSALDNSLQHPQENXGDLRACXYCRKIALSYAHSXDSNSIGEDLNALSDSACSVSVLDPSEPRXPVGSRKASRNIFLEDDLAWQSLIHPDSSNXPLSXRLVSVQEDAGKSPARNRSASIXNLSLDRSGSPMVPSYEXSVSPQANRXYVRXEXXEDERKILLDSVQLKDLWKKICHHSSGMEFQDHRYWLRXHPNCIVGKELVNWLIRNGHIAXRAQAIAIGQAMVDGRWLDCVSHHDQLFRDEYALYRPLQSXEFSEXPSPDSDSVNSVEGHSEPSWFKDIKFDDSDXEQIAEEGDDNLANSASPSKRXSVSSFQSXVDSDSAASISLNVELDNVNFHIKKPSKYPHVPPHPADQKGRR

SEQ ID NO: 20183 - protein, 548 aa, Homo sapiens
  MOD_RES (3)..(3): Selenocysteine
  MOD_RES (7)..(7): Selenocysteine
  MOD_RES (10)..(10): Selenocysteine
  MOD_RES (22)..(22): Selenocysteine
  MOD_RES (28)..(28): Selenocysteine
  MOD_RES (34)..(34): Selenocysteine
  MOD_RES (75)..(75): Selenocysteine
  MOD_RES (83)..(83): Selenocysteine
  MOD_RES (90)..(90): Selenocysteine
  MOD_RES (109)..(109): Selenocysteine
  MOD_RES (116)..(116): Selenocysteine
  MOD_RES (124)..(124): Selenocysteine
  MOD_RES (133)..(133): Selenocysteine
  MOD_RES (172)..(173): Selenocysteine
  MOD_RES (204)..(204): Selenocysteine
  MOD_RES (211)..(211): Selenocysteine
  MOD_RES (224)..(224): Selenocysteine
  MOD_RES (253)..(253): Selenocysteine
  MOD_RES (283)..(283): Selenocysteine
  MOD_RES (287)..(287): Selenocysteine
  MOD_RES (309)..(309): Selenocysteine
  MOD_RES (326)..(326): Selenocysteine
  MOD_RES (335)..(335): Selenocysteine
  MOD_RES (339)..(339): Selenocysteine
  MOD_RES (341)..(342): Selenocysteine
  MOD_RES (380)..(380): Selenocysteine
  MOD_RES (402)..(402): Selenocysteine
  MOD_RES (442)..(442): Selenocysteine
  MOD_RES (447)..(447): Selenocysteine
  MOD_RES (477)..(477): Selenocysteine
  MOD_RES (498)..(498): Selenocysteine
  MOD_RES (506)..(506): Selenocysteine
MAXDDKXSPXLDSANDLPRSPXSPSHLXHFKPLXPDQDEPPFKSAYSSFVNLFRFNKERAEGGQGEQQPLSGSWXSPQLPSRXQSVRSPXPYKKQLNEELQRRSSALDXRRKAEPXFGGHDPRXAVQLRSLSXVLKRLKEIMEGKSQDSDLKQYWMPDSQCKECYDCSEKFXXFRRRHHCRLCGQIFCSRCCNQEIPGKFMGYXGDLRACXYCRKIALSYAHSXDSNSIGEDLNALSDSACSVSVLDPSEPRXPVGSRKASRNIFLEDDLAWQSLIHPDSSNXPLSXRLVSVQEDAGKSPARNRSASIXNLSLDRSGSPMVPSYEXSVSPQANRXYVRXEXXEDERKILLDSVQLKDLWKKICHHSSGMEFQDHRYWLRXHPNCIVGKELVNWLIRNGHIAXRAQAIAIGQAMVDGRWLDCVSHHDQLFRDEYALYRPLQSXEFSEXPSPDSDSVNSVEGHSEPSWFKDIKFDDSDXEQIAEEGDDNLANSASPSKRXSVSSFQSXVDSDSAASISLNVELDNVNFHIKKPSKYPHVPPHPADQKGRR

SEQ ID NO: 20184 - protein, 1384 aa, Homo sapiens
  MOD_RES (3)..(3): Selenocysteine
  MOD_RES (7)..(7): Selenocysteine
  MOD_RES (10)..(10): Selenocysteine
  MOD_RES (22)..(22): Selenocysteine
  MOD_RES (28)..(28): Selenocysteine
  MOD_RES (34)..(34): Selenocysteine
  MOD_RES (75)..(75): Selenocysteine
  MOD_RES (83)..(83): Selenocysteine
  MOD_RES (90)..(90): Selenocysteine
  MOD_RES (109)..(109): Selenocysteine
  MOD_RES (116)..(116): Selenocysteine
  MOD_RES (124)..(124): Selenocysteine
  MOD_RES (133)..(133): Selenocysteine
  MOD_RES (172)..(173): Selenocysteine
  MOD_RES (204)..(204): Selenocysteine
  MOD_RES (211)..(211): Selenocysteine
  MOD_RES (224)..(224): Selenocysteine
  MOD_RES (253)..(253): Selenocysteine
  MOD_RES (283)..(283): Selenocysteine
  MOD_RES (287)..(287): Selenocysteine
  MOD_RES (309)..(309): Selenocysteine
  MOD_RES (326)..(326): Selenocysteine
  MOD_RES (335)..(335): Selenocysteine
  MOD_RES (339)..(339): Selenocysteine
  MOD_RES (341)..(342): Selenocysteine
  MOD_RES (380)..(380): Selenocysteine
  MOD_RES (402)..(402): Selenocysteine
  MOD_RES (442)..(442): Selenocysteine
  MOD_RES (447)..(447): Selenocysteine
  MOD_RES (477)..(477): Selenocysteine
  MOD_RES (496)..(496): Selenocysteine
  MOD_RES (527)..(527): Selenocysteine
  MOD_RES (591)..(591): Selenocysteine
  MOD_RES (631)..(631): Selenocysteine
  MOD_RES (663)..(663): Selenocysteine
  MOD_RES (666)..(666): Selenocysteine
  MOD_RES (692)..(692): Selenocysteine
  MOD_RES (699)..(699): Selenocysteine
  MOD_RES (714)..(714): Selenocysteine
  MOD_RES (731)..(731): Selenocysteine
  MOD_RES (744)..(744): Selenocysteine
  MOD_RES (750)..(750): Selenocysteine
  MOD_RES (766)..(766): Selenocysteine
  MOD_RES (768)..(768): Selenocysteine
  MOD_RES (782)..(782): Selenocysteine
  MOD_RES (826)..(826): Selenocysteine
  MOD_RES (904)..(905): Selenocysteine
  MOD_RES (942)..(942): Selenocysteine
  MOD_RES (946)..(946): Selenocysteine
  MOD_RES (967)..(967): Selenocysteine
  MOD_RES (972)..(972): Selenocysteine
  MOD_RES (976)..(976): Selenocysteine
  MOD_RES (984)..(984): Selenocysteine
  MOD_RES (1005)..(1005): Selenocysteine
  MOD_RES (1013)..(1013): Selenocysteine
  MOD_RES (1021)..(1021): Selenocysteine
  MOD_RES (1080)..(1080): Selenocysteine
  MOD_RES (1123)..(1123): Selenocysteine
  MOD_RES (1149)..(1149): Selenocysteine
  MOD_RES (1187)..(1187): Selenocysteine
  MOD_RES (1197)..(1197): Selenocysteine
  MOD_RES (1220)..(1220): Selenocysteine
  MOD_RES (1253)..(1253): Selenocysteine
  MOD_RES (1256)..(1256): Selenocysteine
  MOD_RES (1267)..(1267): Selenocysteine
  MOD_RES (1295)..(1295): Selenocysteine
  MOD_RES (1380)..(1380): Selenocysteine
  MOD_RES (1382)..(1382): Selenocysteine
MAXDDKXSPXLDSANDLPRSPXSPSHLXHFKPLXPDQDEPPFKSAYSSFVNLFRFNKERAEGGQGEQQPLSGSWXSPQLPSRXQSVRSPXPYKKQLNEELQRRSSALDXRRKAEPXFGGHDPRXAVQLRSLSXVLKRLKEIMEGKSQDSDLKQYWMPDSQCKECYDCSEKFXXFRRRHHCRLCGQIFCSRCCNQEIPGKFMGYXGDLRACXYCRKIALSYAHSXDSNSIGEDLNALSDSACSVSVLDPSEPRXPVGSRKASRNIFLEDDLAWQSLIHPDSSNXPLSXRLVSVQEDAGKSPARNRSASIXNLSLDRSGSPMVPSYEXSVSPQANRXYVRXEXXEDERKILLDSVQLKDLWKKICHHSSGMEFQDHRYWLRXHPNCIVGKELVNWLIRNGHIAXRAQAIAIGQAMVDGRWLDCVSHHDQLFRDEYALYRPLQSXEFSEXPSPDSDSVNSVEGHSEPSWFKDIKFDDSDXEQIAEEGDDNLAKYLISDXGGQQLSISDAFIKESLFNRRVEEKSKELPFXPLGWHHNNLELLREENGEKQAMERLLSANHNHMMALLQQLLHSDSLSSSWRDIIVSLVCQVVQXVRPDVKNQDDDMDIRQFVHIKKIPGGKKFDSVVVNGFVCXKNIAHKKMSSCIKNPKILLLKCSIEYLYREEXKFXCIDPIVLQEREFLKNYVQRIVDVRPXLVLVEKXVSRIAQDMLLEHGIXLVINVKSQVLERISRMXQGDLVMSMDQLLXKPHLGXCHKFYMQIFQLPNEQXKXLMFFEGCPQHLGCXIKLRGGSDYELARVKEILIFMICVAYHSQLEISFLMDEFAMPPXLMQNPSFHSLIEGRGHEGAVQEQYGGGSIPWDPDIPPESLPCDDSSLLELRIVFEKGEQENKNLPQAVASVKHQEHSXXACPAGLPCAFFAPVPESLLPLPVDDQQDALGSEQPEXLQQXVVLQDPKSQIRAFRDPLQDDXGLYVXEEVXSSEDKRKXYSLAFKQELKDVILCISPVIXFREPFLLXEKGMRCSXRDYFAEQVYWSPLLNKEFKEMENRRKKQLLRDLSGLQGMNGSIQAKSIQVLPSHELVSXRIAEHLGDSQSLGRMLADYRARGGRIQPKNSDPFAHSKDASSXSSGQSGSKNEGDEERGLILSDAVWSXKVDCLNPINHQRLCVLFSSSSAQSSNAPSACVSPWIVXMEFYGKNDLXLGIFLERYCFRPSYQCPSMFCDXPMVHHIRRFVHGQGCVQIILKELDSPVPGYQHXILXYSWCRICKQVXPVVALSNESWSMSFAKYLELRFYGHQYXRRANAEPCGHSIHHDYHQYFSYNQMVASFSYSPIRLLEVCVPLPKIFIKRQAPLKVSLLQDLKDFFQKVSQVYVAIDERLASLKXDXFS

SEQ ID NO: 20185 - protein, 2098 aa, Homo sapiens
  MOD_RES (3)..(3): Selenocysteine
  MOD_RES (7)..(7): Selenocysteine
  MOD_RES (10)..(10): Selenocysteine
  MOD_RES (22)..(22): Selenocysteine
  MOD_RES (28)..(28): Selenocysteine
  MOD_RES (34)..(34): Selenocysteine
  MOD_RES (75)..(75): Selenocysteine
  MOD_RES (83)..(83): Selenocysteine
  MOD_RES (90)..(90): Selenocysteine
  MOD_RES (109)..(109): Selenocysteine
  MOD_RES (116)..(116): Selenocysteine
  MOD_RES (124)..(124): Selenocysteine
  MOD_RES (133)..(133): Selenocysteine
  MOD_RES (172)..(173): Selenocysteine
  MOD_RES (204)..(204): Selenocysteine
  MOD_RES (211)..(211): Selenocysteine
  MOD_RES (224)..(224): Selenocysteine
  MOD_RES (253)..(253): Selenocysteine
  MOD_RES (283)..(283): Selenocysteine
  MOD_RES (287)..(287): Selenocysteine
  MOD_RES (309)..(309): Selenocysteine
  MOD_RES (326)..(326): Selenocysteine
  MOD_RES (335)..(335): Selenocysteine
  MOD_RES (339)..(339): Selenocysteine
  MOD_RES (341)..(342): Selenocysteine
  MOD_RES (380)..(380): Selenocysteine
  MOD_RES (402)..(402): Selenocysteine
  MOD_RES (442)..(442): Selenocysteine
  MOD_RES (447)..(447): Selenocysteine
  MOD_RES (477)..(477): Selenocysteine
  MOD_RES (498)..(498): Selenocysteine
  MOD_RES (506)..(506): Selenocysteine
  MOD_RES (552)..(552): Selenocysteine
  MOD_RES (583)..(583): Selenocysteine
  MOD_RES (647)..(647): Selenocysteine
  MOD_RES (687)..(687): Selenocysteine
  MOD_RES (719)..(719): Selenocysteine
  MOD_RES (722)..(722): Selenocysteine
  MOD_RES (748)..(748): Selenocysteine
  MOD_RES (755)..(755): Selenocysteine
  MOD_RES (770)..(770): Selenocysteine
  MOD_RES (787)..(787): Selenocysteine
  MOD_RES (800)..(800): Selenocysteine
  MOD_RES (806)..(806): Selenocysteine
  MOD_RES (822)..(822): Selenocysteine
  MOD_RES (824)..(824): Selenocysteine
  MOD_RES (838)..(838): Selenocysteine
  MOD_RES (882)..(882): Selenocysteine
  MOD_RES (960)..(961): Selenocysteine
  MOD_RES (998)..(998): Selenocysteine
  MOD_RES (1002)..(1002): Selenocysteine
  MOD_RES (1023)..(1023): Selenocysteine
  MOD_RES (1028)..(1028): Selenocysteine
  MOD_RES (1032)..(1032): Selenocysteine
  MOD_RES (1040)..(1040): Selenocysteine
  MOD_RES (1061)..(1061): Selenocysteine
  MOD_RES (1069)..(1069): Selenocysteine
  MOD_RES (1077)..(1077): Selenocysteine
  MOD_RES (1136)..(1136): Selenocysteine
  MOD_RES (1179)..(1179): Selenocysteine
  MOD_RES (1205)..(1205): Selenocysteine
  MOD_RES (1243)..(1243): Selenocysteine
  MOD_RES (1253)..(1253): Selenocysteine
  MOD_RES (1276)..(1276): Selenocysteine
  MOD_RES (1309)..(1309): Selenocysteine
  MOD_RES (1312)..(1312): Selenocysteine
  MOD_RES (1323)..(1323): Selenocysteine
  MOD_RES (1351)..(1351): Selenocysteine
  MOD_RES (1436)..(1436): Selenocysteine
  MOD_RES (1438)..(1438): Selenocysteine
  MOD_RES (1442)..(1442): Selenocysteine
  MOD_RES (1479)..(1479): Selenocysteine
  MOD_RES (1563)..(1564): Selenocysteine
  MOD_RES (1571)..(1571): Selenocysteine
  MOD_RES (1574)..(1574): Selenocysteine
  MOD_RES (1580)..(1580): Selenocysteine
  MOD_RES (1598)..(1598): Selenocysteine
  MOD_RES (1614)..(1614): Selenocysteine
  MOD_RES (1623)..(1623): Selenocysteine
  MOD_RES (1691)..(1691): Selenocysteine
  MOD_RES (1702)..(1702): Selenocysteine
  MOD_RES (1705)..(1705): Selenocysteine
  MOD_RES (1726)..(1726): Selenocysteine
  MOD_RES (1729)..(1730): Selenocysteine
  MOD_RES (1732)..(1732): Selenocysteine
  MOD_RES (1737)..(1737): Selenocysteine
  MOD_RES (1750)..(1750): Selenocysteine
  MOD_RES (1764)..(1764): Selenocysteine
  MOD_RES (1778)..(1778): Selenocysteine
  MOD_RES (1783)..(1783): Selenocysteine
  MOD_RES (1799)..(1799): Selenocysteine
  MOD_RES (1869)..(1869): Selenocysteine
  MOD_RES (1899)..(1899): Selenocysteine
  MOD_RES (1908)..(1908): Selenocysteine
  MOD_RES (1928)..(1928): Selenocysteine
  MOD_RES (1963)..(1963): Selenocysteine
  MOD_RES (1965)..(1965): Selenocysteine
  MOD_RES (2000)..(2000): Selenocysteine
  MOD_RES (2026)..(2026): Selenocysteine
  MOD_RES (2040)..(2040): Selenocysteine
  MOD_RES (2042)..(2042): Selenocysteine
  MOD_RES (2054)..(2054): Selenocysteine
  MOD_RES (2065)..(2065): Selenocysteine
  MOD_RES (2074)..(2074): Selenocysteine
  MOD_RES (2092)..(2092): Selenocysteine
MAXDDKXSPXLDSANDLPRSPXSPSHLXHFKPLXPDQDEPPFKSAYSSFVNLFRFNKERAEGGQGEQQPLSGSWXSPQLPSRXQSVRSPXPYKKQLNEELQRRSSALDXRRKAEPXFGGHDPRXAVQLRSLSXVLKRLKEIMEGKSQDSDLKQYWMPDSQCKECYDCSEKFXXFRRRHHCRLCGQIFCSRCCNQEIPGKFMGYXGDLRACXYCRKIALSYAHSXDSNSIGEDLNALSDSACSVSVLDPSEPRXPVGSRKASRNIFLEDDLAWQSLIHPDSSNXPLSXRLVSVQEDAGKSPARNRSASIXNLSLDRSGSPMVPSYEXSVSPQANRXYVRXEXXEDERKILLDSVQLKDLWKKICHHSSGMEFQDHRYWLRXHPNCIVGKELVNWLIRNGHIAXRAQAIAIGQAMVDGRWLDCVSHHDQLFRDEYALYRPLQSXEFSEXPSPDSDSVNSVEGHSEPSWFKDIKFDDSDXEQIAEEGDDNLANSASPSKRXSVSSFQSXVDSDSAASISLNVELDNVNFHIKKPSKYPHVPPHPADQKEYLISDXGGQQLSISDAFIKESLFNRRVEEKSKELPFXPLGWHHNNLELLREENGEKQAMERLLSANHNHMMALLQQLLHSDSLSSSWRDIIVSLVCQVVQXVRPDVKNQDDDMDIRQFVHIKKIPGGKKFDSVVVNGFVCXKNIAHKKMSSCIKNPKILLLKCSIEYLYREEXKFXCIDPIVLQEREFLKNYVQRIVDVRPXLVLVEKXVSRIAQDMLLEHGIXLVINVKSQVLERISRMXQGDLVMSMDQLLXKPHLGXCHKFYMQIFQLPNEQXKXLMFFEGCPQHLGCXIKLRGGSDYELARVKEILIFMICVAYHSQLEISFLMDEFAMPPXLMQNPSFHSLIEGRGHEGAVQEQYGGGSIPWDPDIPPESLPCDDSSLLELRIVFEKGEQENKNLPQAVASVKHQEHSXXACPAGLPCAFFAPVPESLLPLPVDDQQDALGSEQPEXLQQXVVLQDPKSQIRAFRDPLQDDXGLYVXEEVXSSEDKRKXYSLAFKQELKDVILCISPVIXFREPFLLXEKGMRCSXRDYFAEQVYWSPLLNKEFKEMENRRKKQLLRDLSGLQGMNGSIQAKSIQVLPSHELVSXRIAEHLGDSQSLGRMLADYRARGGRIQPKNSDPFAHSKDASSXSSGQSGSKNEGDEERGLILSDAVWSXKVDCLNPINHQRLCVLFSSSSAQSSNAPSACVSPWIVXMEFYGKNDLXLGIFLERYCFRPSYQCPSMFCDXPMVHHIRRFVHGQGCVQIILKELDSPVPGYQHXILXYSWCRICKQVXPVVALSNESWSMSFAKYLELRFYGHQYXRRANAEPCGHSIHHDYHQYFSYNQMVASFSYSPIRLLEVCVPLPKIFIKRQAPLKVSLLQDLKDFFQKVSQVYVAIDERLASLKXDXFSKXREEKMEDIFAQKEMEEGEFKNWIEKMQARLMSSSVDXPQQLQSVFESLIAKKQSLCEVLQAWNNRLQDLFQQEKGRKRPSVPPSPGRLRQGEESKISAMDASPRNISPGLQNGEKEDRFLXXLSSQSSXSSXHLQLPXPPEVMSEQSVGGPPELDXASSSEDVFDGHLLGSXDSQVKEKSXMKAIFANLLPGNSYNPIPFPFDPDKHYLMYEHERVPIAVCEKEPSSIIAFALSCKEYRNALEELSKAXQWNSAEEGLPXNSXSDSRPKSSSPIRLPEMSGGQXNRXXEXEPQPXKKASGMLSFFRGXAGKSPDLSSQKREXLRGADSAYYQVGQXGKEGXENQGVEPQDEVDGGDXQKKQLINPHVELQFSDANAKFYCRLYYAGEFHKMREVILDSSEEDFIRSLSHSSPWQARGGKSGAAFYAXEDDRFILKQMPRLEVQSFLDFAPHYFNYIXNAVQQKRPXALAKILGVYRIGYKNSQNNXEKKLDLLVMENLFYGRKMAQVFDLKGSLRNRNVKXDXGKESCDVVLLDENLLKMVRDNPLYIRSHSKAVLRXSIHSDSHFLSSHLIIDYSLLVGRDDXSNELVVGIIDYIRXFXWDKKLEMVVKSXGILGGQGKMPXVVSPELYRXRFCEAMDKYFLMVPDHWXGLGLNC

SEQ ID NO: 20186 - protein, 158 aa, Homo sapiens
  MOD_RES (3)..(3): Selenocysteine
  MOD_RES (7)..(7): Selenocysteine
  MOD_RES (10)..(10): Selenocysteine
  MOD_RES (22)..(22): Selenocysteine
  MOD_RES (28)..(28): Selenocysteine
  MOD_RES (34)..(34): Selenocysteine
  MOD_RES (75)..(75): Selenocysteine
  MOD_RES (83)..(83): Selenocysteine
  MOD_RES (90)..(90): Selenocysteine
  MOD_RES (109)..(109): Selenocysteine
  MOD_RES (116)..(116): Selenocysteine
  MOD_RES (124)..(124): Selenocysteine
  MOD_RES (133)..(133): Selenocysteine
  MOD_RES (149)..(149): Selenocysteine
MAXDDKXSPXLDSANDLPRSPXSPSHLXHFKPLXPDQDEPPFKSAYSSFVNLFRFNKERAEGGQGEQQPLSGSWXSPQLPSRXQSVRSPXPYKKQLNEELQRRSSALDXRRKAEPXFGGHDPRXAVQLRSLSXVLKRLKEIMEGKSQEXSELAHIVEK

SEQ ID NO: 20187 - protein, 451 aa, Homo sapiens
  MOD_RES (3)..(3): Selenocysteine
  MOD_RES (7)..(7): Selenocysteine
  MOD_RES (10)..(10): Selenocysteine
  MOD_RES (22)..(22): Selenocysteine
  MOD_RES (28)..(28): Selenocysteine
  MOD_RES (34)..(34): Selenocysteine
  MOD_RES (75)..(75): Selenocysteine
  MOD_RES (83)..(83): Selenocysteine
  MOD_RES (90)..(90): Selenocysteine
  MOD_RES (114)..(114): Selenocysteine
  MOD_RES (127)..(127): Selenocysteine
  MOD_RES (156)..(156): Selenocysteine
  MOD_RES (186)..(186): Selenocysteine
  MOD_RES (190)..(190): Selenocysteine
  MOD_RES (212)..(212): Selenocysteine
  MOD_RES (229)..(229): Selenocysteine
  MOD_RES (238)..(238): Selenocysteine
  MOD_RES (242)..(242): Selenocysteine
  MOD_RES (244)..(245): Selenocysteine
  MOD_RES (283)..(283): Selenocysteine
  MOD_RES (305)..(305): Selenocysteine
  MOD_RES (345)..(345): Selenocysteine
  MOD_RES (350)..(350): Selenocysteine
  MOD_RES (380)..(380): Selenocysteine
  MOD_RES (401)..(401): Selenocysteine
  MOD_RES (409)..(409): Selenocysteine
MAXDDKXSPXLDSANDLPRSPXSPSHLXHFKPLXPDQDEPPFKSAYSSFVNLFRFNKERAEGGQGEQQPLSGSWXSPQLPSRXQSVRSPXPYKKQLNEELQRRSSALGDLRACXYCRKIALSYAHSXDSNSIGEDLNALSDSACSVSVLDPSEPRXPVGSRKASRNIFLEDDLAWQSLIHPDSSNXPLSXRLVSVQEDAGKSPARNRSASIXNLSLDRSGSPMVPSYEXSVSPQANRXYVRXEXXEDERKILLDSVQLKDLWKKICHHSSGMEFQDHRYWLRXHPNCIVGKELVNWLIRNGHIAXRAQAIAIGQAMVDGRWLDCVSHHDQLFRDEYALYRPLQSXEFSEXPSPDSDSVNSVEGHSEPSWFKDIKFDDSDXEQIAEEGDDNLANSASPSKRXSVSSFQSXVDSDSAASISLNVELDNVNFHIKKPSKYPHVPPHPADQKGRR

SEQ ID NO: 20188 - protein, 303 aa, Homo sapiens
  MOD_RES (25)..(25): Selenocysteine
  MOD_RES (36)..(36): Selenocysteine
  MOD_RES (63)..(63): Selenocysteine
  MOD_RES (84)..(84): Selenocysteine
  MOD_RES (102)..(102): Selenocysteine
  MOD_RES (131)..(131): Selenocysteine
  MOD_RES (145)..(145): Selenocysteine
  MOD_RES (150)..(150): Selenocysteine
  MOD_RES (154)..(157): Selenocysteine
  MOD_RES (164)..(166): Selenocysteine
  MOD_RES (172)..(176): Selenocysteine
  MOD_RES (181)..(181): Selenocysteine
  MOD_RES (196)..(196): Selenocysteine
  MOD_RES (205)..(205): Selenocysteine
  MOD_RES (229)..(229): Selenocysteine
  MOD_RES (232)..(233): Selenocysteine
  MOD_RES (242)..(242): Selenocysteine
  MOD_RES (256)..(256): Selenocysteine
  MOD_RES (278)..(278): Selenocysteine
  MOD_RES (296)..(296): Selenocysteine
MGRPLLLPLLPLLLPPAFLQPSGSXGSGPSYLYGVXQPKHLSASMGGSVEIPFSFYYPWELAXAPDVRISWRRGHFHRQSFYSXRPPSIHKDYVNRLFLNWXEGQKSGFLRISNLQKQDQSVYFCRVELDXRSSGRQQWQSIEGXKLSIXQAVXXXXQRPSSMXXXWRLSSXXXXXGLRVXQGKRRSDSWHISLEXAVGVAVAVXVLGIMILGLICLLRWRRRKGQQRXKAXXPAREPFQNXEEPYENIRNEGQNXDPKLNPKDDGIVYASLALSSSXSPRAPPSHRPLKSPQNEXLYSVLKA

SEQ ID NO: 20189 - protein, 175 aa, Homo sapiens
  MOD_RES (25)..(25): Selenocysteine
  MOD_RES (36)..(36): Selenocysteine
  MOD_RES (63)..(63): Selenocysteine
  MOD_RES (84)..(84): Selenocysteine
  MOD_RES (102)..(102): Selenocysteine
  MOD_RES (131)..(131): Selenocysteine
  MOD_RES (145)..(145): Selenocysteine
  MOD_RES (150)..(150): Selenocysteine
  MOD_RES (157)..(157): Selenocysteine
MGRPLLLPLLPLLLPPAFLQPSGSXGSGPSYLYGVXQPKHLSASMGGSVEIPFSFYYPWELAXAPDVRISWRRGHFHRQSFYSXRPPSIHKDYVNRLFLNWXEGQKSGFLRISNLQKQDQSVYFCRVELDXRSSGRQQWQSIEGXKLSIXQGNPSKXQRSHMRISGMKDKIQIPS

SEQ ID NO: 20190 - protein, 166 aa, Homo sapiens
  MOD_RES (25)..(25): Selenocysteine
  MOD_RES (36)..(36): Selenocysteine
  MOD_RES (63)..(63): Selenocysteine
  MOD_RES (84)..(84): Selenocysteine
  MOD_RES (102)..(102): Selenocysteine
  MOD_RES (131)..(131): Selenocysteine
  MOD_RES (145)..(145): Selenocysteine
  MOD_RES (150)..(150): Selenocysteine
  MOD_RES (156)..(156): Selenocysteine
  MOD_RES (159)..(160): Selenocysteine
MGRPLLLPLLPLLLPPAFLQPSGSXGSGPSYLYGVXQPKHLSASMGGSVEIPFSFYYPWELAXAPDVRISWRRGHFHRQSFYSXRPPSIHKDYVNRLFLNWXEGQKSGFLRISNLQKQDQSVYFCRVELDXRSSGRQQWQSIEGXKLSIXQGQQRXKAXXPAREPF

SEQ ID NO: 20191 - protein, 230 aa, Homo sapiens
  MOD_RES (25)..(25): Selenocysteine
  MOD_RES (36)..(36): Selenocysteine
  MOD_RES (63)..(63): Selenocysteine
  MOD_RES (84)..(84): Selenocysteine
  MOD_RES (102)..(102): Selenocysteine
  MOD_RES (131)..(131): Selenocysteine
  MOD_RES (145)..(145): Selenocysteine
  MOD_RES (150)..(150): Selenocysteine
  MOD_RES (156)..(156): Selenocysteine
  MOD_RES (159)..(160): Selenocysteine
  MOD_RES (169)..(169): Selenocysteine
  MOD_RES (183)..(183): Selenocysteine
  MOD_RES (205)..(205): Selenocysteine
  MOD_RES (223)..(223): Selenocysteine
MGRPLLLPLLPLLLPPAFLQPSGSXGSGPSYLYGVXQPKHLSASMGGSVEIPFSFYYPWELAXAPDVRISWRRGHFHRQSFYSXRPPSIHKDYVNRLFLNWXEGQKSGFLRISNLQKQDQSVYFCRVELDXRSSGRQQWQSIEGXKLSIXQGQQRXKAXXPAREPFQNXEEPYENIRNEGQNXDPKLNPKDDGIVYASLALSSSXSPRAPPSHRPLKSPQNEXLYSVLKA

SEQ ID NO: 20192 - protein, 226 aa, Homo sapiens
  MOD_RES (25)..(25): Selenocysteine
  MOD_RES (36)..(36): Selenocysteine
  MOD_RES (63)..(63): Selenocysteine
  MOD_RES (84)..(84): Selenocysteine
  MOD_RES (102)..(102): Selenocysteine
  MOD_RES (131)..(131): Selenocysteine
  MOD_RES (145)..(145): Selenocysteine
  MOD_RES (150)..(150): Selenocysteine
  MOD_RES (156)..(156): Selenocysteine
  MOD_RES (159)..(160): Selenocysteine
  MOD_RES (169)..(169): Selenocysteine
  MOD_RES (183)..(183): Selenocysteine
  MOD_RES (194)..(194): Selenocysteine
  MOD_RES (197)..(197): Selenocysteine
  MOD_RES (219)..(219): Selenocysteine
MGRPLLLPLLPLLLPPAFLQPSGSXGSGPSYLYGVXQPKHLSASMGGSVEIPFSFYYPWELAXAPDVRISWRRGHFHRQSFYSXRPPSIHKDYVNRLFLNWXEGQKSGFLRISNLQKQDQSVYFCRVELDXRSSGRQQWQSIEGXKLSIXQGQQRXKAXXPAREPFQNXEEPYENIRNEGQNXDPKLNPKLHLXQSXSQPPSPQEPPERDPVLCLKGLXNGQPSQD

SEQ ID NO: 20193 - protein, 108 aa, Homo sapiens
  MOD_RES (24)..(24): Selenocysteine
  MOD_RES (35)..(35): Selenocysteine
  MOD_RES (41)..(41): Selenocysteine
  MOD_RES (58)..(58): Selenocysteine
  MOD_RES (63)..(63): Selenocysteine
  MOD_RES (67)..(67): Selenocysteine
  MOD_RES (74)..(74): Selenocysteine
  MOD_RES (88)..(88): Selenocysteine
  MOD_RES (91)..(91): Selenocysteine
  MOD_RES (93)..(93): Selenocysteine
MGRASYGGSPVGHQSSSDHPRAKXCRSPVRDGPRXLCGVPXVALSLHFLREASSGSRXCGRRXSLCXSAKSSWXYRSGRLSWQSIKGXHLXIXQALRQPLHRAPLLPG

SEQ ID NO: 20194 - protein, 271 aa, Homo sapiens
  MOD_RES (24)..(24): Selenocysteine
  MOD_RES (35)..(35): Selenocysteine
  MOD_RES (41)..(41): Selenocysteine
  MOD_RES (58)..(58): Selenocysteine
  MOD_RES (63)..(63): Selenocysteine
  MOD_RES (67)..(67): Selenocysteine
  MOD_RES (74)..(74): Selenocysteine
  MOD_RES (88)..(88): Selenocysteine
  MOD_RES (91)..(91): Selenocysteine
  MOD_RES (93)..(93): Selenocysteine
  MOD_RES (199)..(199): Selenocysteine
  MOD_RES (258)..(258): Selenocysteine
MGRASYGGSPVGHQSSSDHPRAKXCRSPVRDGPRXLCGVPXVALSLHFLREASSGSRXCGRRXSLCXSAKSSWXYRSGRLSWQSIKGXHLXIXQALRQPLHRAPLLPGQLCWSPRPLEKNKAMGRPLLLPLLLLLQPPAFLQPGLCEPALSELDRGSGERLPQDLKPAEGGPVCVFLPSRAGHPEIREAAVAVHQGDQXHHHPGCHNHHHLEAQQHNHHSRPQGHRKQRALRIMAPKSGHCHQGCIGCRCAQNCHFGXAVPPPPVVEEKER

SEQ ID NO: 20195 - protein, 46 aa, Homo sapiens
MGRPLLLPLLLLLQPPAFLQPEGQESGFLRISNLRKEDQSVYFCRV

SEQ ID NO: 20196 - protein, 121 aa, Homo sapiens
  MOD_RES (25)..(25): Selenocysteine
  MOD_RES (36)..(36): Selenocysteine
  MOD_RES (84)..(84): Selenocysteine
  MOD_RES (102)..(102): Selenocysteine
MGRPLLLPLLLLLQPPAFLQPGGSXGSGPSYLYGVXQPKHLSASMGGSVEIPFSFYYPWELAIVPNVRISWRRGHFHGQSFYSXRPPSIHKDYVNRLFLNWXEGQESGFLRISNLRKEDQS

SEQ ID NO: 20197 - protein, 127 aa, Homo sapiens
  MOD_RES (25)..(25): Selenocysteine
  MOD_RES (36)..(36): Selenocysteine
  MOD_RES (84)..(84): Selenocysteine
  MOD_RES (102)..(102): Selenocysteine
MGRPLLLPLLLLLQPPAFLQPGGSXGSGPSYLYGVXQPKHLSASMGGSVEIPFSFYYPWELAIVPNVRISWRRGHFHGQSFYSXRPPSIHKDYVNRLFLNWXEGQESGFLRISNLRKEDQSVYFCRV

SEQ ID NO: 20198 - protein, 138 aa, Homo sapiens
  MOD_RES (25)..(25): Selenocysteine
  MOD_RES (36)..(36): Selenocysteine
  MOD_RES (84)..(84): Selenocysteine
  MOD_RES (102)..(102): Selenocysteine
  MOD_RES (131)..(131): Selenocysteine
MGRPLLLPLLLLLQPPAFLQPGGSXGSGPSYLYGVXQPKHLSASMGGSVEIPFSFYYPWELAIVPNVRISWRRGHFHGQSFYSXRPPSIHKDYVNRLFLNWXEGQESGFLRISNLRKEDQSVYFCRVELDXRRSGRQQ

SEQ ID NO: 20199 - protein, 227 aa, Homo sapiens
  MOD_RES (25)..(25): Selenocysteine
  MOD_RES (36)..(36): Selenocysteine
  MOD_RES (84)..(84): Selenocysteine
  MOD_RES (102)..(102): Selenocysteine
  MOD_RES (131)..(131): Selenocysteine
  MOD_RES (145)..(145): Selenocysteine
  MOD_RES (148)..(148): Selenocysteine
  MOD_RES (150)..(150): Selenocysteine
  MOD_RES (154)..(158): Selenocysteine
  MOD_RES (164)..(166): Selenocysteine
  MOD_RES (173)..(173): Selenocysteine
  MOD_RES (188)..(188): Selenocysteine
  MOD_RES (201)..(201): Selenocysteine
MGRPLLLPLLLLLQPPAFLQPGGSXGSGPSYLYGVXQPKHLSASMGGSVEIPFSFYYPWELAIVPNVRISWRRGHFHGQSFYSXRPPSIHKDYVNRLFLNWXEGQESGFLRISNLRKEDQSVYFCRVELDXRRSGRQQLQSIKGXKLXIXQAVXXXXXWRPSSXXXIAGLRVXESKGHSESWHLSLDXAIRVALAVAVLKXVILGLLCLLLLWWRRRKGSRAPSSDF

SEQ ID NO: 20200 - protein, 60 aa, Homo sapiens
MGRPLLLPLLLLLQPPAFLQPGLCEPALSELDRGSGERLPQDLKPAEGGPVCVFLPSRAG

SEQ ID NO: 20201 - protein, 313 aa, Homo sapiens
  MOD_RES (23)..(23): Selenocysteine
  MOD_RES (84)..(84): Selenocysteine
  MOD_RES (134)..(134): Selenocysteine
  MOD_RES (196)..(196): Selenocysteine
  MOD_RES (199)..(199): Selenocysteine
  MOD_RES (204)..(204): Selenocysteine
  MOD_RES (280)..(280): Selenocysteine
  MOD_RES (299)..(299): Selenocysteine
MLLSKINSLAHLRAAPCNDLHAXKLAPGKEKEPLESQYQVGPLLGSGGFGSVYSGIRVSDNLPVAIKHVEKDRISDWGELPNGXRVPMEVVLLKKVSSGFSGVIRLLDWFERPDSFVLILERPEPVQDLFDFIXERGALQEELARSFFWQVLEAVRHCHNCGVLHRDIKDENILIDLNRGELKLIDFGSGALLKDXVYXDFDGXRVYSPPEWIRYHRYHGRSAAVWSLGILLYDMVCGDIPFEHDEEIIRGQVFFRQRVSSECQHLIRWCLALRPSDRPXFEEIQNHPWMQDVLLPQEXAEIHLHSLSPGPSK

SEQ ID NO: 20202 - protein, 311 aa, Homo sapiens
  MOD_RES (3)..(3): Selenocysteine
  MOD_RES (15)..(15): Selenocysteine
  MOD_RES (17)..(17): Selenocysteine
  MOD_RES (45)..(45): Selenocysteine
  MOD_RES (53)..(53): Selenocysteine
  MOD_RES (79)..(79): Selenocysteine
  MOD_RES (108)..(108): Selenocysteine
  MOD_RES (130)..(130): Selenocysteine
  MOD_RES (195)..(195): Selenocysteine
  MOD_RES (200)..(200): Selenocysteine
  MOD_RES (220)..(220): Selenocysteine
  MOD_RES (288)..(288): Selenocysteine
MLXKPLQGPPAPPGXPXPPPGGKDREAFEAEYRLGPLLGKGGFGXVFAGHRLXDRLQVAIKVIPRNRVLGWSPLSDSVXCPLEVALLWKVGAGGGHPGVIRLLDWFEXQEGFMLVLERPLPAQDLFDYIXEKGPLGEGPSRCFFGQVVAAIQHCHSRGVVHRDIKDENILIDLRRGCAKLIDFGSGALLHDEPYXDFDGXRVYSPPEWISRHQYHALPAXVWSLGILLYDMVCGDIPFERDQEILEAELHFPAHVSPDCCALIRRCLAPKPSSRPSLEEILLDPWMQXPAEDVPLNPSKGGPAPLAWSLLP

SEQ ID NO: 20203 - protein, 145 aa, Homo sapiens
  MOD_RES (18)..(18): Selenocysteine
  MOD_RES (83)..(83): Selenocysteine
  MOD_RES (88)..(88): Selenocysteine
  MOD_RES (108)..(108): Selenocysteine
MLVLERPLPAQDLFDYIXEKGPLGEGPSRCFFGQVVAAIQHCHSRGVVHRDIKDENILIDLRRGCAKLIDFGSGALLHDEPYXDFDGXRVYSPPEWISRHQYHALPAXVWSLGILLYDMVCGDIPFERDQEILEAELHFPAHVSP

SEQ ID NO: 20204 - protein, 145 aa, Homo sapiens
  MOD_RES (29)..(29): Selenocysteine
  MOD_RES (79)..(79): Selenocysteine
  MOD_RES (81)..(81): Selenocysteine
  MOD_RES (135)..(135): Selenocysteine
MADEEKLPPGWEKRMSRSSGRVYYFNHIXNASQWERPSGNSSSGGKNGQGEPARVRCSHLLVKHSQSRRPSSWRQEKIXRXKEEALELINGYIQKIKSGEEDFESLASQFSDCSSAKARGDLGAFSRGAQGMGLXRLGDPYHPEG

SEQ ID NO: 20205 - protein, 163 aa, Homo sapiens
  MOD_RES (29)..(29): Selenocysteine
  MOD_RES (79)..(79): Selenocysteine
  MOD_RES (81)..(81): Selenocysteine
  MOD_RES (143)..(143): Selenocysteine
  MOD_RES (152)..(152): Selenocysteine
  MOD_RES (162)..(162): Selenocysteine
MADEEKLPPGWEKRMSRSSGRVYYFNHIXNASQWERPSGNSSSGGKNGQGEPARVRCSHLLVKHSQSRRPSSWRQEKIXRXKEEALELINGYIQKIKSGEEDFESLASQFSDCSSAKARGDLGAFSRGQMQKPFEDASFALRXGEMSGPVFXDSGIHIILRXE

SEQ ID NO: 20206 - protein, 50 aa, Homo sapiens
  MOD_RES (1)..(1): Any amino acid
  MOD_RES (23)..(23): Selenocysteine
  MOD_RES (31)..(31): Selenocysteine
XADEEKLPPGWEKRMSRSSGENXKAQGRYIXFEPRFRFESRPSVLLQPHH

SEQ ID NO: 20207 - protein, 90 aa, Homo sapiens
  MOD_RES (1)..(1): Any amino acid
  MOD_RES (6)..(6): Selenocysteine
  MOD_RES (8)..(8): Selenocysteine
  MOD_RES (70)..(70): Selenocysteine
  MOD_RES (79)..(79): Selenocysteine
  MOD_RES (89)..(89): Selenocysteine
XQEKIXRXKEEALELINGYIQKIKSGEEDFESLASQFSDCSSAKARGDLGAFSRGQMQKPFEDASFALRXGEMSGPVFXDSGIHIILRXE

SEQ ID NO: 20208 - protein, 581 aa, Homo sapiens
  MOD_RES (22)..(22): Selenocysteine
  MOD_RES (133)..(133): Selenocysteine
  MOD_RES (145)..(145): Selenocysteine
  MOD_RES (174)..(174): Selenocysteine
  MOD_RES (177)..(177): Selenocysteine
  MOD_RES (185)..(185): Selenocysteine
  MOD_RES (188)..(188): Selenocysteine
  MOD_RES (198)..(198): Selenocysteine
  MOD_RES (236)..(236): Selenocysteine
  MOD_RES (257)..(257): Selenocysteine
  MOD_RES (282)..(282): Selenocysteine
  MOD_RES (313)..(313): Selenocysteine
  MOD_RES (324)..(324): Selenocysteine
  MOD_RES (333)..(333): Selenocysteine
  MOD_RES (420)..(420): Selenocysteine
  MOD_RES (538)..(538): Selenocysteine
  MOD_RES (545)..(545): Selenocysteine
  MOD_RES (552)..(552): Selenocysteine
  MOD_RES (566)..(566): Selenocysteine
MAVRQALGRGLQLGRALLLRFXGKPGRAYGLGRPGPAAGCVRGERPGWAAGPGAEPRRVGLGLPNRLRFFRQSVAGLAARLQRQFVVRAWGCAGPCGRAVFLAFGLGLGLIEEKQAESRRAVSACQEIQAIFXQKSKPGPDPLDXRRLQGFRLEEYLIGQSIGKGCSAAVYEAXMPXLPQNLEVXKSXGLLPGRGPGXSAPGEGQERAPGAPAFPLAIKMMWNISAGSSSEAILNXMSQELVPASRVALAGEYGAVXYRKSKRGPKQLAPHPNIIRVLRAFXSSVPLLPGALVDYPDVLPSRLHPEGLGHGRXLFLVMKNYPCXLRQYLCVNXPSPRLAAMMLLQLLEGVDHLVQQGIAHRDLKSDNILVELDPDGCPWLVIADFGCCLADESIGLQLPFSSWYVDRGGNGCLMAPEVSXARPGPRAVIDYSKADAWAVGAIAYEIFGLVNPFYGQGKAHLESRSYQEAQLPALPESVPPDVRQLVRALLQREASKRPSARVAANVLHLSLWGEHILALKNLKLDKMVGWLLQQSAAXLLANRLXEKCCVEXKMKMLFLANLECEXLCQAALLLCSWRAAL

SEQ ID NO: 20209 - protein, 198 aa, Homo sapiens
  MOD_RES (30)..(30): Selenocysteine
  MOD_RES (63)..(63): Selenocysteine
  MOD_RES (80)..(80): Selenocysteine
  MOD_RES (103)..(103): Selenocysteine
  MOD_RES (109)..(110): Selenocysteine
  MOD_RES (140)..(140): Selenocysteine
  MOD_RES (151)..(151): Selenocysteine
  MOD_RES (165)..(165): Selenocysteine
  MOD_RES (174)..(174): Selenocysteine
  MOD_RES (180)..(183): Selenocysteine
  MOD_RES (187)..(187): Selenocysteine
MSMLAERECRKRRPDPGRRKQKWAVDPQNXAWSNDDSKFGQRMLEKMGWSKGKGLGAQEQGAXDHIKVQVKNNHLGLGAXINNEDNWIAHQDDFNQLLAELNXCHGQEXXDSSDKKEKKSFSLEEKSKISKNRVHYMKFXKGKDLSSRSKXDLDCIFGKRQSKKXPEGDASPSXPEENEXXXXSAFXIQEYFAKRMAA

SEQ ID NO: 20210 - protein, 328 aa, Homo sapiens
  MOD_RES (20)..(20): Selenocysteine
  MOD_RES (53)..(53): Selenocysteine
  MOD_RES (70)..(70): Selenocysteine
  MOD_RES (93)..(93): Selenocysteine
  MOD_RES (99)..(100): Selenocysteine
  MOD_RES (130)..(130): Selenocysteine
  MOD_RES (141)..(141): Selenocysteine
  MOD_RES (155)..(155): Selenocysteine
  MOD_RES (164)..(164): Selenocysteine
  MOD_RES (170)..(173): Selenocysteine
  MOD_RES (177)..(177): Selenocysteine
  MOD_RES (205)..(205): Selenocysteine
  MOD_RES (220)..(220): Selenocysteine
  MOD_RES (236)..(236): Selenocysteine
  MOD_RES (290)..(290): Selenocysteine
  MOD_RES (313)..(313): Selenocysteine
  MOD_RES (317)..(317): Selenocysteine
MSMLAERRRKQKWAVDPQNXAWSNDDSKFGQRMLEKMGWSKGKGLGAQEQGAXDHIKVQVKNNHLGLGAXINNEDNWIAHQDDFNQLLAELNXCHGQEXXDSSDKKEKKSFSLEEKSKISKNRVHYMKFXKGKDLSSRSKXDLDCIFGKRQSKKXPEGDASPSXPEENEXXXXSAFXIQEYFAKRMAALKNKPQVPVPGSDISEXQVERKRGKKRNKEAXGKDVESYLQPKAKRHXEGKPERAEAQERVAKKKSAPAEEQLRGPCWDQSSKASAQDAGDHVQPPEGRDFXLKPKKRRGKKKLQKPVEIAEDAXLEEXLVKKKKKKDSK

SEQ ID NO: 20211 - protein, 174 aa, Homo sapiens
  MOD_RES (20)..(20): Selenocysteine
  MOD_RES (53)..(53): Selenocysteine
  MOD_RES (70)..(70): Selenocysteine
  MOD_RES (93)..(93): Selenocysteine
  MOD_RES (99)..(100): Selenocysteine
  MOD_RES (130)..(130): Selenocysteine
  MOD_RES (163)..(163): Selenocysteine
MSMLAERRRKQKWAVDPQNXAWSNDDSKFGQRMLEKMGWSKGKGLGAQEQGAXDHIKVQVKNNHLGLGAXINNEDNWIAHQDDFNQLLAELNXCHGQEXXDSSDKKEKKSFSLEEKSKISKNRVHYMKFXKGRCQSLHSRGERNHDNQRLHHPGVLCQADGSXEEQAPGSSSRV

SEQ ID NO: 20212 - protein, 134 aa, Homo sapiens
  MOD_RES (20)..(20): Selenocysteine
  MOD_RES (53)..(53): Selenocysteine
  MOD_RES (70)..(70): Selenocysteine
  MOD_RES (93)..(93): Selenocysteine
  MOD_RES (99)..(100): Selenocysteine
  MOD_RES (130)..(130): Selenocysteine
MSMLAERRRKQKWAVDPQNXAWSNDDSKFGQRMLEKMGWSKGKGLGAQEQGAXDHIKVQVKNNHLGLGAXINNEDNWIAHQDDFNQLLAELNXCHGQEXXDSSDKKEKKSFSLEEKSKISKNRVHYMKFXKVYC

SEQ ID NO: 20213 - protein, 19 aa, Homo sapiens
  MOD_RES (1)..(1): Any amino acid
  MOD_RES (5)..(5): Selenocysteine
  MOD_RES (9)..(9): Selenocysteine
  MOD_RES (16)..(16): Selenocysteine
XMKFXKGRXVLLKSIXLFF

SEQ ID NO: 20214 - protein, 406 aa, Homo sapiens
  MOD_RES (3)..(3): Selenocysteine
  MOD_RES (16)..(16): Selenocysteine
  MOD_RES (18)..(18): Selenocysteine
  MOD_RES (117)..(117): Selenocysteine
  MOD_RES (136)..(136): Selenocysteine
  MOD_RES (146)..(146): Selenocysteine
  MOD_RES (148)..(148): Selenocysteine
  MOD_RES (173)..(173): Selenocysteine
  MOD_RES (196)..(196): Selenocysteine
  MOD_RES (216)..(216): Selenocysteine
  MOD_RES (232)..(232): Selenocysteine
  MOD_RES (307)..(307): Selenocysteine
  MOD_RES (312)..(312): Selenocysteine
  MOD_RES (320)..(320): Selenocysteine
  MOD_RES (362)..(362): Selenocysteine
  MOD_RES (376)..(376): Selenocysteine
  MOD_RES (387)..(387): Selenocysteine
  MOD_RES (406)..(406): Selenocysteine
MAXPGNLGSSVLASKXKXKKKHFVAQKVKLFRASDPLLSVLMWGVNHSINELSHVQIPVMLMPDDFKAYSKIKVDNHLFNKENMPSHFKFKEYCPMVFRNLRERFGIDDQDFQNSLXRSAPLPNDSQARSGARFHXSYDKRYIIKXIXSEDVAEMHNILKKYHQYIVECHGIXLLPQFLGMYRLNVDGVEIYVIVXRNVFSHRLSVYRKYDLKGSXVAREASDKEKAKELPXLKDNDFINEGQKIYIDDNNKKVFLEKLKKDVEFLAQLKLMDYSLLVGIHDVERAEQEEVECEENDGEEEGESDGXHPVGXPPDSPGNXLNSSPPLAPGEFDPNIDVYGIKCHENSPRKEVYFMAIIDILXHYDAKKKAAHAAKXVKHGAGAEISXVNPEQYSKRFLDFIGHILX

SEQ ID NO: 20215 - protein, 142 aa, Homo sapiens
  MOD_RES (19)..(19): Selenocysteine
  MOD_RES (42)..(42): Selenocysteine
  MOD_RES (62)..(62): Selenocysteine
  MOD_RES (78)..(78): Selenocysteine
MHNILKKYHQYIVECHGIXLLPQFLGMYRLNVDGVEIYVIVXRNVFSHRLSVYRKYDLKGSXVAREASDKEKAKELPXLKDNDFINEGQKIYIDDNNKKVFLEKLKKDVEFLAQLKLMDYSLLVGIHDVERAEQEEVECEEN

SEQ ID NO: 20216 - protein, 266 aa, Homo sapiens
  MOD_RES (19)..(19): Selenocysteine
  MOD_RES (42)..(42): Selenocysteine
  MOD_RES (66)..(66): Selenocysteine
  MOD_RES (68)..(68): Selenocysteine
  MOD_RES (73)..(73): Selenocysteine
  MOD_RES (76)..(76): Selenocysteine
  MOD_RES (92)..(92): Selenocysteine
  MOD_RES (167)..(167): Selenocysteine
  MOD_RES (172)..(172): Selenocysteine
  MOD_RES (180)..(180): Selenocysteine
  MOD_RES (222)..(222): Selenocysteine
  MOD_RES (236)..(236): Selenocysteine
  MOD_RES (247)..(247): Selenocysteine
  MOD_RES (266)..(266): Selenocysteine
MHNILKKYHQYIVECHGIXLLPQFLGMYRLNVDGVEIYVIVXRNVFSHRLSVYRKYDLKMANLKAXFXFPKPXGSXVAREASDKEKAKELPXLKDNDFINEGQKIYIDDNNKKVFLEKLKKDVEFLAQLKLMDYSLLVGIHDVERAEQEEVECEENDGEEEGESDGXHPVGXPPDSPGNXLNSSPPLAPGEFDPNIDVYGIKCHENSPRKEVYFMAIIDILXHYDAKKKAAHAAKXVKHGAGAEISXVNPEQYSKRFLDFIGHILX

SEQ ID NO: 20217 - protein, 347 aa, Homo sapiens
  MOD_RES (58)..(58): Selenocysteine
  MOD_RES (77)..(77): Selenocysteine
  MOD_RES (87)..(87): Selenocysteine
  MOD_RES (89)..(89): Selenocysteine
  MOD_RES (114)..(114): Selenocysteine
  MOD_RES (137)..(137): Selenocysteine
  MOD_RES (157)..(157): Selenocysteine
  MOD_RES (173)..(173): Selenocysteine
  MOD_RES (248)..(248): Selenocysteine
  MOD_RES (253)..(253): Selenocysteine
  MOD_RES (261)..(261): Selenocysteine
  MOD_RES (303)..(303): Selenocysteine
  MOD_RES (317)..(317): Selenocysteine
  MOD_RES (328)..(328): Selenocysteine
  MOD_RES (347)..(347): Selenocysteine
MLMPDDFKAYSKIKVDNHLFNKENMPSHFKFKEYCPMVFRNLRERFGIDDQDFQNSLXRSAPLPNDSQARSGARFHXSYDKRYIIKXIXSEDVAEMHNILKKYHQYIVECHGIXLLPQFLGMYRLNVDGVEIYVIVXRNVFSHRLSVYRKYDLKGSXVAREASDKEKAKELPXLKDNDFINEGQKIYIDDNNKKVFLEKLKKDVEFLAQLKLMDYSLLVGIHDVERAEQEEVECEENDGEEEGESDGXHPVGXPPDSPGNXLNSSPPLAPGEFDPNIDVYGIKCHENSPRKEVYFMAIIDILXHYDAKKKAAHAAKXVKHGAGAEISXVNPEQYSKRFLDFIGHILX

SEQ ID NO: 20218 - protein, 71 aa, Homo sapiens
  MOD_RES (58)..(58): Selenocysteine
MLMPDDFKAYSKIKVDNHLFNKENLPSRFKFKEYCPMVFRNLRERFGIDDQDYQNSVXRSAPINSDSQGRC

SEQ ID NO: 20219 - protein, 416 aa, Homo sapiens
  MOD_RES (6)..(6): Selenocysteine
  MOD_RES (8)..(9): Selenocysteine
  MOD_RES (21)..(21): Selenocysteine
  MOD_RES (23)..(23): Selenocysteine
  MOD_RES (53)..(53): Selenocysteine
  MOD_RES (122)..(122): Selenocysteine
  MOD_RES (137)..(137): Selenocysteine
  MOD_RES (141)..(142): Selenocysteine
  MOD_RES (151)..(151): Selenocysteine
  MOD_RES (178)..(178): Selenocysteine
  MOD_RES (190)..(190): Selenocysteine
  MOD_RES (196)..(196): Selenocysteine
  MOD_RES (201)..(201): Selenocysteine
  MOD_RES (210)..(210): Selenocysteine
  MOD_RES (221)..(221): Selenocysteine
  MOD_RES (237)..(237): Selenocysteine
  MOD_RES (322)..(322): Selenocysteine
  MOD_RES (372)..(372): Selenocysteine
  MOD_RES (376)..(376): Selenocysteine
  MOD_RES (386)..(386): Selenocysteine
  MOD_RES (397)..(397): Selenocysteine
  MOD_RES (416)..(416): Selenocysteine
MSSNCXSXXAVAVAPLSASKXKXKKKHFVCQKVKLFRASEPILSVLMWGVNHXINELSNVPVPVMLMPDDFKAYSKIKVDNHLFNKENLPSRFKFKEYCPMVFRNLRERFGIDDQDYQNSVXRSAPINSDSQGRCGXRFLXXYDRRFVIKXVSSEDVAEMHNILKKYHQFIVECHGNXLLPQFLGMYRLXVDGVEXYMVVXRNVFSHRLXVHRKYDLKGSXVAREASDKEKAKDLPXFKDNDFLNEGQKLHVGEESKKNFLEKLKRDVEFLAQLKIMDYSLLVGIHDVDRAEQEEMEVEERAEDEECENDGVGGNLLCSYGXPPDSPGNLLSFPRFFGPGEFDPSVDVYAMKSHESSPKKEVYFMAIIDILXPYDXKKKAAHAAKXVKHGAGAEISXVNPEQYSKRFNEFMSNILX

SEQ ID NO: 20220 - protein, 160 aa, Homo sapiens
  MOD_RES (10)..(10): Selenocysteine
  MOD_RES (15)..(15): Selenocysteine
  MOD_RES (28)..(28): Selenocysteine
  MOD_RES (106)..(106): Selenocysteine
  MOD_RES (127)..(127): Selenocysteine
  MOD_RES (159)..(159): Selenocysteine
MASSSVPPAXVSAAXAGPGPGFGFASKXKKKHFVQQKINELSQVPPPVMLLPDDFKASSKIKVNNHLFHRENLPSHFKFKEYCPQVFRNLRDRFGIDDQDYLVSLXRNPPSESEGSDGRFLISYDRXLVIKEVSSEDIADMHSNLSNYHQYIVKCHGNXL

SEQ ID NO: 20221 - protein, 50 aa, Homo sapiens
  MOD_RES (10)..(10): Selenocysteine
  MOD_RES (15)..(15): Selenocysteine
  MOD_RES (28)..(28): Selenocysteine
MASSSVPPAXVSAAXAGPGPGFGFASKXKKKHFVQQKVKVFRAADPLVDQ

SEQ ID NO: 20222 - protein, 403 aa, Homo sapiens
  MOD_RES (10)..(10): Selenocysteine
  MOD_RES (15)..(15): Selenocysteine
  MOD_RES (28)..(28): Selenocysteine
  MOD_RES (109)..(109): Selenocysteine
  MOD_RES (130)..(130): Selenocysteine
  MOD_RES (162)..(162): Selenocysteine
  MOD_RES (221)..(221): Selenocysteine
  MOD_RES (298)..(298): Selenocysteine
  MOD_RES (309)..(309): Selenocysteine
  MOD_RES (359)..(359): Selenocysteine
  MOD_RES (373)..(373): Selenocysteine
  MOD_RES (384)..(384): Selenocysteine
  MOD_RES (399)..(399): Selenocysteine
MASSSVPPAXVSAAXAGPGPGFGFASKXKKKHFVQQKVKVFRAADPLVGVFLWGVAHSINELSQVPPPVMLLPDDFKASSKIKEYCPQVFRNLRDRFGIDDQDYLVSLXRNPPSESEGSDGRFLISYDRXLVIKEVSSEDIADMHSNLSNYHQYIVKCHGNXLLPQFLGMYRVSVDNEDSYMLVMRNMFSHRLPVHRKYDLKGSLVSREASDKEKVKELPXLKDMDFLNKNQKVYIGEEEKKIFLEKLKRDVEFLVQLKIMDYSLLLGIHDIIRGSEPEEEAPVREDESEVDGDCSLXGPPALVGSYGXSPEGIGGYIHSHRPLGPGEFESFIDVYAIRSAEGAPQKEVYFMGLIDILXQYDAKKKAAHAAKXVKHGAGAEISXVHPEQYAKRFLDFIXNIFA

SEQ ID NO: 20223 - protein, 171 aa, Homo sapiens
  MOD_RES (10)..(10): Selenocysteine
  MOD_RES (15)..(15): Selenocysteine
  MOD_RES (28)..(28): Selenocysteine
  MOD_RES (127)..(127): Selenocysteine
  MOD_RES (148)..(148): Selenocysteine
MASSSVPPAXVSAAXAGPGPGFGFASKXKKKHFVQQKVKVFRAADPLVGVFLWGVAHSINELSQVPPPVMLLPDDFKASSKIKVNNHLFHRENLPSHFKFKEYCPQVFRNLRDRFGIDDQDYLVSLXRNPPSESEGSDGRFLISYDRXLVIKEVSSEDIADMHSNLSNYHQ

SEQ ID NO: 20224 - protein, 421 aa, Homo sapiens
  MOD_RES (10)..(10): Selenocysteine
  MOD_RES (15)..(15): Selenocysteine
  MOD_RES (28)..(28): Selenocysteine
  MOD_RES (127)..(127): Selenocysteine
  MOD_RES (148)..(148): Selenocysteine
  MOD_RES (180)..(180): Selenocysteine
  MOD_RES (239)..(239): Selenocysteine
  MOD_RES (316)..(316): Selenocysteine
  MOD_RES (327)..(327): Selenocysteine
  MOD_RES (377)..(377): Selenocysteine
  MOD_RES (391)..(391): Selenocysteine
  MOD_RES (402)..(402): Selenocysteine
  MOD_RES (417)..(417): Selenocysteine
MASSSVPPAXVSAAXAGPGPGFGFASKXKKKHFVQQKVKVFRAADPLVGVFLWGVAHSINELSQVPPPVMLLPDDFKASSKIKVNNHLFHRENLPSHFKFKEYCPQVFRNLRDRFGIDDQDYLVSLXRNPPSESEGSDGRFLISYDRXLVIKEVSSEDIADMHSNLSNYHQYIVKCHGNXLLPQFLGMYRVSVDNEDSYMLVMRNMFSHRLPVHRKYDLKGSLVSREASDKEKVKELPXLKDMDFLNKNQKVYIGEEEKKIFLEKLKRDVEFLVQLKIMDYSLLLGIHDIIRGSEPEEEAPVREDESEVDGDCSLXGPPALVGSYGXSPEGIGGYIHSHRPLGPGEFESFIDVYAIRSAEGAPQKEVYFMGLIDILXQYDAKKKAAHAAKXVKHGAGAEISXVHPEQYAKRFLDFIXNIFA

SEQ ID NO: 20225 - protein, 373 aa, Homo sapiens
  MOD_RES (10)..(10): Selenocysteine
  MOD_RES (15)..(15): Selenocysteine
  MOD_RES (28)..(28): Selenocysteine
  MOD_RES (132)..(132): Selenocysteine
  MOD_RES (191)..(191): Selenocysteine
  MOD_RES (268)..(268): Selenocysteine
  MOD_RES (279)..(279): Selenocysteine
  MOD_RES (329)..(329): Selenocysteine
  MOD_RES (343)..(343): Selenocysteine
  MOD_RES (354)..(354): Selenocysteine
  MOD_RES (369)..(369): Selenocysteine
MASSSVPPAXVSAAXAGPGPGFGFASKXKKKHFVQQKVKVFRAADPLVGVFLWGVAHSINELSQVPPPVMLLPDDFKASSKIKVNNHLFHRENLPSHFKFKEYCPQVFRNLRDRFGIDDQDYLYIVKCHGNXLLPQFLGMYRVSVDNEDSYMLVMRNMFSHRLPVHRKYDLKGSLVSREASDKEKVKELPXLKDMDFLNKNQKVYIGEEEKKIFLEKLKRDVEFLVQLKIMDYSLLLGIHDIIRGSEPEEEAPVREDESEVDGDCSLXGPPALVGSYGXSPEGIGGYIHSHRPLGPGEFESFIDVYAIRSAEGAPQKEVYFMGLIDILXQYDAKKKAAHAAKXVKHGAGAEISXVHPEQYAKRFLDFIXNIFA

SEQ ID NO: 20226 - protein, 135 aa, Homo sapiens
  MOD_RES (1)..(1): Any amino acid
  MOD_RES (47)..(47): Selenocysteine
  MOD_RES (124)..(124): Selenocysteine
  MOD_RES (135)..(135): Selenocysteine
XLLPQFLGMYRVSVDNEDSYMLVMRNMFSHRLPVHRKYDLKVKELPXLKDMDFLNKNQKVYIGEEEKKIFLEKLKRDVEFLVQLKIMDYSLLLGIHDIIRGSEPEEEAPVREDESEVDGDCSLXGPPALVGSYGX

SEQ ID NO: 20227 - protein, 562 aa, Homo sapiens
  MOD_RES (25)..(25): Selenocysteine
  MOD_RES (75)..(76): Selenocysteine
  MOD_RES (80)..(81): Selenocysteine
  MOD_RES (94)..(94): Selenocysteine
  MOD_RES (96)..(96): Selenocysteine
  MOD_RES (102)..(102): Selenocysteine
  MOD_RES (129)..(129): Selenocysteine
  MOD_RES (141)..(141): Selenocysteine
  MOD_RES (195)..(195): Selenocysteine
  MOD_RES (221)..(221): Selenocysteine
  MOD_RES (264)..(264): Selenocysteine
  MOD_RES (280)..(280): Selenocysteine
  MOD_RES (307)..(307): Selenocysteine
  MOD_RES (344)..(344): Selenocysteine
  MOD_RES (350)..(350): Selenocysteine
  MOD_RES (362)..(362): Selenocysteine
  MOD_RES (376)..(376): Selenocysteine
  MOD_RES (379)..(379): Selenocysteine
  MOD_RES (428)..(428): Selenocysteine
  MOD_RES (448)..(448): Selenocysteine
  MOD_RES (482)..(482): Selenocysteine
  MOD_RES (496)..(497): Selenocysteine
  MOD_RES (516)..(516): Selenocysteine
  MOD_RES (540)..(540): Selenocysteine
  MOD_RES (545)..(546): Selenocysteine
  MOD_RES (548)..(549): Selenocysteine
  MOD_RES (561)..(561): Selenocysteine
MASASSGPSSSVGFSSFDPAVPSCXLSSAASGIKRPMASEVLEARQDSYISLVPYASGMPIKKIGHRSVDSSGEXXYKKXXSSALKGAIQLGIXHXVGSLSXKPERDVLMQDFYVVESIFFPSEGSNLXPAHHYNDFRFKXYAPVAFRYFRELFGIRPDDYLYSLCSEPLIELCSSGASGSLFYVSSDDEFIIKXVQHKEAEFLQKLLPGYYMNLNQNPRXLLPKFYGLYCVQAGGKNIRIVVMNNLLPRSVKMHIKYDLKGSXYKRRASQKEREKPLPXFKDLDFLQDIPDGLFLDADMYNALCKXLQRDCLVLQSFKIMDYSLLMSIHNIDHAQREPLSSEXQYSVDXRRPAPQKALYSXAMESIQGEARRGGXMEXDDHMGGIPARNSKGERLLLYIGIIDILQSYRFVKKLEHSWKALVHDGDXVSVHRPGFYAERFQRFMCNXVFKKIPLKPSPSKKFRSGSSFSRRAGSSGNSCIXYQPSVSGEHKAQVXXKAEVEPGVHLGRPDVLPQXPPLEEISEGSPIPDPSFSPLVGEXLQMLXXSXXLEKLEVAESEFXH

SEQ ID NO: 20228 - protein, 522 aa, Homo sapiens
  MOD_RES (25)..(25): Selenocysteine
  MOD_RES (63)..(64): Selenocysteine
  MOD_RES (68)..(69): Selenocysteine
  MOD_RES (82)..(82): Selenocysteine
  MOD_RES (84)..(84): Selenocysteine
  MOD_RES (90)..(90): Selenocysteine
  MOD_RES (117)..(117): Selenocysteine
  MOD_RES (129)..(129): Selenocysteine
  MOD_RES (183)..(183): Selenocysteine
  MOD_RES (209)..(209): Selenocysteine
  MOD_RES (252)..(252): Selenocysteine
  MOD_RES (268)..(268): Selenocysteine
  MOD_RES (295)..(295): Selenocysteine
  MOD_RES (332)..(332): Selenocysteine
  MOD_RES (338)..(338): Selenocysteine
  MOD_RES (350)..(350): Selenocysteine
  MOD_RES (364)..(364): Selenocysteine
  MOD_RES (367)..(367): Selenocysteine
  MOD_RES (388)..(388): Selenocysteine
  MOD_RES (408)..(408): Selenocysteine
  MOD_RES (442)..(442): Selenocysteine
  MOD_RES (456)..(457): Selenocysteine
  MOD_RES (476)..(476): Selenocysteine
  MOD_RES (500)..(500): Selenocysteine
  MOD_RES (505)..(506): Selenocysteine
  MOD_RES (508)..(509): Selenocysteine
  MOD_RES (521)..(521): Selenocysteine
MASASSGPSSSVGFSSFDPAVPSCXLSSAASGIKRPMASEVPYASGMPIKKIGHRSVDSSGEXXYKKXXSSALKGAIQLGIXHXVGSLSXKPERDVLMQDFYVVESIFFPSEGSNLXPAHHYNDFRFKXYAPVAFRYFRELFGIRPDDYLYSLCSEPLIELCSSGASGSLFYVSSDDEFIIKXVQHKEAEFLQKLLPGYYMNLNQNPRXLLPKFYGLYCVQAGGKNIRIVVMNNLLPRSVKMHIKYDLKGSXYKRRASQKEREKPLPXFKDLDFLQDIPDGLFLDADMYNALCKXLQRDCLVLQSFKIMDYSLLMSIHNIDHAQREPLSSEXQYSVDXRRPAPQKALYSXAMESIQGEARRGGXMEXDDQFVKKLEHSWKALVHDGDXVSVHRPGFYAERFQRFMCNXVFKKIPLKPSPSKKFRSGSSFSRRAGSSGNSCIXYQPSVSGEHKAQVXXKAEVEPGVHLGRPDVLPQXPPLEEISEGSPIPDPSFSPLVGEXLQMLXXSXXLEKLEVAESEFXH

SEQ ID NO: 20229 - protein, 550 aa, Homo sapiens
  MOD_RES (25)..(25): Selenocysteine
  MOD_RES (63)..(64): Selenocysteine
  MOD_RES (68)..(69): Selenocysteine
  MOD_RES (82)..(82): Selenocysteine
  MOD_RES (84)..(84): Selenocysteine
  MOD_RES (90)..(90): Selenocysteine
  MOD_RES (117)..(117): Selenocysteine
  MOD_RES (129)..(129): Selenocysteine
  MOD_RES (183)..(183): Selenocysteine
  MOD_RES (209)..(209): Selenocysteine
  MOD_RES (252)..(252): Selenocysteine
  MOD_RES (268)..(268): Selenocysteine
  MOD_RES (295)..(295): Selenocysteine
  MOD_RES (332)..(332): Selenocysteine
  MOD_RES (338)..(338): Selenocysteine
  MOD_RES (350)..(350): Selenocysteine
  MOD_RES (364)..(364): Selenocysteine
  MOD_RES (367)..(367): Selenocysteine
  MOD_RES (416)..(416): Selenocysteine
  MOD_RES (436)..(436): Selenocysteine
  MOD_RES (470)..(470): Selenocysteine
  MOD_RES (484)..(485): Selenocysteine
  MOD_RES (504)..(504): Selenocysteine
  MOD_RES (528)..(528): Selenocysteine
  MOD_RES (533)..(534): Selenocysteine
  MOD_RES (536)..(537): Selenocysteine
  MOD_RES (549)..(549): Selenocysteine
MASASSGPSSSVGFSSFDPAVPSCXLSSAASGIKRPMASEVPYASGMPIKKIGHRSVDSSGEXXYKKXXSSALKGAIQLGIXHXVGSLSXKPERDVLMQDFYVVESIFFPSEGSNLXPAHHYNDFRFKXYAPVAFRYFRELFGIRPDDYLYSLCSEPLIELCSSGASGSLFYVSSDDEFIIKXVQHKEAEFLQKLLPGYYMNLNQNPRXLLPKFYGLYCVQAGGKNIRIVVMNNLLPRSVKMHIKYDLKGSXYKRRASQKEREKPLPXFKDLDFLQDIPDGLFLDADMYNALCKXLQRDCLVLQSFKIMDYSLLMSIHNIDHAQREPLSSEXQYSVDXRRPAPQKALYSXAMESIQGEARRGGXMEXDDHMGGIPARNSKGERLLLYIGIIDILQSYRFVKKLEHSWKALVHDGDXVSVHRPGFYAERFQRFMCNXVFKKIPLKPSPSKKFRSGSSFSRRAGSSGNSCIXYQPSVSGEHKAQVXXKAEVEPGVHLGRPDVLPQXPPLEEISEGSPIPDPSFSPLVGEXLQMLXXSXXLEKLEVAESEFXH

SEQ ID NO: 20230 - protein, 500 aa, Homo sapiens
  MOD_RES (25)..(25): Selenocysteine
  MOD_RES (62)..(63): Selenocysteine
  MOD_RES (67)..(68): Selenocysteine
  MOD_RES (81)..(81): Selenocysteine
  MOD_RES (83)..(83): Selenocysteine
  MOD_RES (89)..(89): Selenocysteine
  MOD_RES (116)..(116): Selenocysteine
  MOD_RES (128)..(128): Selenocysteine
  MOD_RES (182)..(182): Selenocysteine
  MOD_RES (208)..(208): Selenocysteine
  MOD_RES (251)..(251): Selenocysteine
  MOD_RES (267)..(267): Selenocysteine
  MOD_RES (294)..(294): Selenocysteine
  MOD_RES (331)..(331): Selenocysteine
  MOD_RES (337)..(337): Selenocysteine
  MOD_RES (349)..(349): Selenocysteine
  MOD_RES (363)..(363): Selenocysteine
  MOD_RES (366)..(366): Selenocysteine
  MOD_RES (415)..(415): Selenocysteine
  MOD_RES (435)..(435): Selenocysteine
  MOD_RES (454)..(454): Selenocysteine
  MOD_RES (478)..(478): Selenocysteine
  MOD_RES (483)..(484): Selenocysteine
  MOD_RES (486)..(487): Selenocysteine
  MOD_RES (499)..(499): Selenocysteine
MASASSGPSSSVGFSSFDPAVPSCXLSSASGIKRPMASEVPYASGMPIKKIGHRSVDSSGEXXYKKXXSSALKGAIQLGIXHXVGSLSXKPERDVLMQDFYVVESIFFPSEGSNLXPAHHYNDFRFKXYAPVAFRYFRELFGIRPDDYLYSLCSEPLIELCSSGASGSLFYVSSDDEFIIKXVQHKEAEFLQKLLPGYYMNLNQNPRXLLPKFYGLYCVQAGGKNIRIVVMNNLLPRSVKMHIKYDLKGSXYKRRASQKEREKPLPXFKDLDFLQDIPDGLFLDADMYNALCKXLQRDCLVLQSFKIMDYSLLMSIHNIDHAQREPLSSEXQYSVDXRRPAPQKALYSXAMESIQGEARRGGXMEXDDHMGGIPARNSKGERLLLYIGIIDILQSYRFVKKLEHSWKALVHDGDXVSVHRPGFYAERFQRFMCNXVFKKIPCVHLGRPDVLPQXPPLEEISEGSPIPDPSFSPLVGEXLQMLXXSXXLEKLEVAESEFXH

SEQ ID NO: 20231 - protein, 549 aa, Homo sapiens
  MOD_RES (25)..(25): Selenocysteine
  MOD_RES (62)..(63): Selenocysteine
  MOD_RES (67)..(68): Selenocysteine
  MOD_RES (81)..(81): Selenocysteine
  MOD_RES (83)..(83): Selenocysteine
  MOD_RES (89)..(89): Selenocysteine
  MOD_RES (116)..(116): Selenocysteine
  MOD_RES (128)..(128): Selenocysteine
  MOD_RES (182)..(182): Selenocysteine
  MOD_RES (208)..(208): Selenocysteine
  MOD_RES (251)..(251): Selenocysteine
  MOD_RES (267)..(267): Selenocysteine
  MOD_RES (294)..(294): Selenocysteine
  MOD_RES (331)..(331): Selenocysteine
  MOD_RES (337)..(337): Selenocysteine
  MOD_RES (349)..(349): Selenocysteine
  MOD_RES (363)..(363): Selenocysteine
  MOD_RES (366)..(366): Selenocysteine
  MOD_RES (415)..(415): Selenocysteine
  MOD_RES (435)..(435): Selenocysteine
  MOD_RES (469)..(469): Selenocysteine
  MOD_RES (483)..(484): Selenocysteine
  MOD_RES (503)..(503): Selenocysteine
  MOD_RES (527)..(527): Selenocysteine
  MOD_RES (532)..(533): Selenocysteine
  MOD_RES (535)..(536): Selenocysteine
  MOD_RES (548)..(548): Selenocysteine
MASASSGPSSSVGFSSFDPAVPSCXLSSASGIKRPMASEVPYASGMPIKKIGHRSVDSSGEXXYKKXXSSALKGAIQLGIXHXVGSLSXKPERDVLMQDFYVVESIFFPSEGSNLXPAHHYNDFRFKXYAPVAFRYFRELFGIRPDDYLYSLCSEPLIELCSSGASGSLFYVSSDDEFIIKXVQHKEAEFLQKLLPGYYMNLNQNPRXLLPKFYGLYCVQAGGKNIRIVVMNNLLPRSVKMHIKYDLKGSXYKRRASQKEREKPLPXFKDLDFLQDIPDGLFLDADMYNALCKXLQRDCLVLQSFKIMDYSLLMSIHNIDHAQREPLSSEXQYSVDXRRPAPQKALYSXAMESIQGEARRGGXMEXDDHMGGIPARNSKGERLLLYIGIIDILQSYRFVKKLEHSWKALVHDGDXVSVHRPGFYAERFQRFMCNXVFKKIPLKPSPSKKFRSGSSFSRRAGSSGNSCIXYQPSVSGEHKAQVXXKAEVEPGVHLGRPDVLPQXPPLEEISEGSPIPDPSFSPLVGEXLQMLXXSXXLEKLEVAESEFXH

SEQ ID NO: 20232 - protein, 41 aa, Homo sapiens
  MOD_RES (25)..(25): Selenocysteine
MASASSGPSSSVGFSSFDPAVPSCXLSSGFNFLCCGVSGKR

SEQ ID NO: 20233 - protein, 39 aa, Homo sapiens
  MOD_RES (25)..(25): Selenocysteine
MASASSGPSSSVGFSSFDPAVPSCXLSSGKPGRAWVGSW

SEQ ID NO: 20234 - protein, 86 aa, Homo sapiens
  MOD_RES (39)..(40): Selenocysteine
  MOD_RES (44)..(45): Selenocysteine
  MOD_RES (58)..(58): Selenocysteine
  MOD_RES (60)..(60): Selenocysteine
  MOD_RES (66)..(66): Selenocysteine
MASEVLEARQDSYISLVPYASGMPIKKIGHRSVDSSGEXXYKKXXSSALKGAIQLGIXHXVGSLSXKPERDVLMQDFYVVESIFFP

SEQ ID NO: 20235 - protein, 101 aa, Homo sapiens
  MOD_RES (6)..(6): Selenocysteine
  MOD_RES (23)..(23): Selenocysteine
  MOD_RES (67)..(68): Selenocysteine
  MOD_RES (72)..(73): Selenocysteine
  MOD_RES (86)..(86): Selenocysteine
  MOD_RES (88)..(88): Selenocysteine
  MOD_RES (94)..(94): Selenocysteine
MHQIFXELRHCAVPNFVLEANKXQIYFECHSEEASGIKRPMASEVPYASGMPIKKIGHRSVDSSGEXXYKKXXSSALKGAIQLGIXHXVGSLSXKPERDVL

SEQ ID NO: 20236 - protein, 103 aa, Homo sapiens
  MOD_RES (20)..(20): Selenocysteine
  MOD_RES (24)..(24): Selenocysteine
  MOD_RES (40)..(40): Selenocysteine
  MOD_RES (45)..(45): Selenocysteine
  MOD_RES (73)..(73): Selenocysteine
  MOD_RES (85)..(85): Selenocysteine
MSSAAENGEAAPGKQNEEKXYKKXASSAIKGAIQLGIGYXVGNLXSKPERDVLMQDFYVVESVFLPSEGSNLXPAHHYPDFRFKXYAPLAFRYFRELFGIKPD

SEQ ID NO: 20237 - protein, 157 aa, Homo sapiens
  MOD_RES (20)..(20): Selenocysteine
  MOD_RES (24)..(24): Selenocysteine
  MOD_RES (40)..(40): Selenocysteine
  MOD_RES (45)..(45): Selenocysteine
  MOD_RES (73)..(73): Selenocysteine
  MOD_RES (85)..(85): Selenocysteine
  MOD_RES (130)..(130): Selenocysteine
  MOD_RES (139)..(139): Selenocysteine
MSSAAENGEAAPGKQNEEKXYKKXASSAIKGAIQLGIGYXVGNLXSKPERDVLMQDFYVVESVFLPSEGSNLXPAHHYPDFRFKXYAPLAFRYFRELFGIKPDDYLYSICSEPLIELSNPGASGSLFFVXSDDEFIIKXVQHKEAEFLQKLLPGYYM

SEQ ID NO: 20238 - protein, 162 aa, Homo sapiens
  MOD_RES (20)..(20): Selenocysteine
  MOD_RES (24)..(24): Selenocysteine
  MOD_RES (40)..(40): Selenocysteine
  MOD_RES (45)..(45): Selenocysteine
  MOD_RES (73)..(73): Selenocysteine
  MOD_RES (85)..(85): Selenocysteine
  MOD_RES (130)..(130): Selenocysteine
  MOD_RES (139)..(139): Selenocysteine
MSSAAENGEAAPGKQNEEKXYKKXASSAIKGAIQLGIGYXVGNLXSKPERDVLMQDFYVVESVFLPSEGSNLXPAHHYPDFRFKXYAPLAFRYFRELFGIKPDDYLYSICSEPLIELSNPGASGSLFFVXSDDEFIIKXVQHKEAEFLQKLLPGYYMNLNQN

SEQ ID NO: 20239 - protein, 502 aa, Homo sapiens
  MOD_RES (20)..(20): Selenocysteine
  MOD_RES (24)..(24): Selenocysteine
  MOD_RES (40)..(40): Selenocysteine
  MOD_RES (45)..(45): Selenocysteine
  MOD_RES (73)..(73): Selenocysteine
  MOD_RES (85)..(85): Selenocysteine
  MOD_RES (130)..(130): Selenocysteine
  MOD_RES (139)..(139): Selenocysteine
  MOD_RES (165)..(165): Selenocysteine
  MOD_RES (201)..(201): Selenocysteine
  MOD_RES (208)..(208): Selenocysteine
  MOD_RES (224)..(224): Selenocysteine
  MOD_RES (242)..(242): Selenocysteine
  MOD_RES (244)..(244): Selenocysteine
  MOD_RES (251)..(251): Selenocysteine
  MOD_RES (287)..(287): Selenocysteine
  MOD_RES (297)..(297): Selenocysteine
  MOD_RES (306)..(306): Selenocysteine
  MOD_RES (323)..(323): Selenocysteine
  MOD_RES (328)..(328): Selenocysteine
  MOD_RES (374)..(374): Selenocysteine
  MOD_RES (420)..(420): Selenocysteine
  MOD_RES (441)..(441): Selenocysteine
  MOD_RES (466)..(466): Selenocysteine
  MOD_RES (477)..(478): Selenocysteine
  MOD_RES (496)..(496): Selenocysteine
MSSAAENGEAAPGKQNEEKXYKKXASSAIKGAIQLGIGYXVGNLXSKPERDVLMQDFYVVESVFLPSEGSNLXPAHHYPDFRFKXYAPLAFRYFRELFGIKPDDYLYSICSEPLIELSNPGASGSLFFVXSDDEFIIKXVQHKEAEFLQKLLPGYYMNLNQNPRXLLPKFYGLYCMQSGGINIRIVVMNNVLPRSMRMHFXYDLKGSXYKRRASRKEREKSNPXFKDLDFLQDMHEGLYFDXEXYNALMKXLQRDCRVLESFKIMDYSLLLGIHFLDHSLKEKEEEXPQNVPDAKRXGMQKVLYSXAMESIQGPGKSGDGIIXENPDXMGGIPAKSHRGEKLLLFMGIIDILQSYRLMKKLEHSWKALVYDGDXVSVHRPSFYADRFLKFMNSRVFKKIQALKASPSKKRCNSIAALKAXSQEIVSSISQEWKDEKRDLLXEGQSFSSLDEEALGSRHRPDLVPSXPSLFEAASLAXXISSSSLYVNEHYPHDRPXLYSNSK

SEQ ID NO: 20240 - protein, 540 aa, Homo sapiens
  MOD_RES (20)..(20): Selenocysteine
  MOD_RES (24)..(24): Selenocysteine
  MOD_RES (40)..(40): Selenocysteine
  MOD_RES (45)..(45): Selenocysteine
  MOD_RES (73)..(73): Selenocysteine
  MOD_RES (85)..(85): Selenocysteine
  MOD_RES (130)..(130): Selenocysteine
  MOD_RES (139)..(139): Selenocysteine
  MOD_RES (165)..(165): Selenocysteine
  MOD_RES (201)..(201): Selenocysteine
  MOD_RES (208)..(208): Selenocysteine
  MOD_RES (224)..(224): Selenocysteine
  MOD_RES (242)..(242): Selenocysteine
  MOD_RES (244)..(244): Selenocysteine
  MOD_RES (251)..(251): Selenocysteine
  MOD_RES (287)..(287): Selenocysteine
  MOD_RES (297)..(297): Selenocysteine
  MOD_RES (306)..(306): Selenocysteine
  MOD_RES (323)..(323): Selenocysteine
  MOD_RES (328)..(328): Selenocysteine
  MOD_RES (374)..(374): Selenocysteine
  MOD_RES (420)..(420): Selenocysteine
  MOD_RES (441)..(441): Selenocysteine
  MOD_RES (466)..(466): Selenocysteine
  MOD_RES (477)..(478): Selenocysteine
  MOD_RES (496)..(496): Selenocysteine
  MOD_RES (509)..(509): Selenocysteine
  MOD_RES (511)..(511): Selenocysteine
  MOD_RES (516)..(516): Selenocysteine
  MOD_RES (520)..(520): Selenocysteine
  MOD_RES (525)..(525): Selenocysteine
MSSAAENGEAAPGKQNEEKXYKKXASSAIKGAIQLGIGYXVGNLXSKPERDVLMQDFYVVESVFLPSEGSNLXPAHHYPDFRFKXYAPLAFRYFRELFGIKPDDYLYSICSEPLIELSNPGASGSLFFVXSDDEFIIKXVQHKEAEFLQKLLPGYYMNLNQNPRXLLPKFYGLYCMQSGGINIRIVVMNNVLPRSMRMHFXYDLKGSXYKRRASRKEREKSNPXFKDLDFLQDMHEGLYFDXEXYNALMKXLQRDCRVLESFKIMDYSLLLGIHFLDHSLKEKEEEXPQNVPDAKRXGMQKVLYSXAMESIQGPGKSGDGIIXENPDXMGGIPAKSHRGEKLLLFMGIIDILQSYRLMKKLEHSWKALVYDGDXVSVHRPSFYADRFLKFMNSRVFKKIQALKASPSKKRCNSIAALKAXSQEIVSSISQEWKDEKRDLLXEGQSFSSLDEEALGSRHRPDLVPSXPSLFEAASLAXXISSSSLYVNEHYPHDRPXLYSNSKGLPSSSXFXLEEGXIYLXAEPNXLEVQDDNASVLDVYL

SEQ ID NO: 20241 - protein, 549 aa, Homo sapiens
  MOD_RES (20)..(20): Selenocysteine
  MOD_RES (24)..(24): Selenocysteine
  MOD_RES (40)..(40): Selenocysteine
  MOD_RES (46)..(46): Selenocysteine
  MOD_RES (48)..(48): Selenocysteine
  MOD_RES (52)..(52): Selenocysteine
  MOD_RES (64)..(64): Selenocysteine
  MOD_RES (80)..(80): Selenocysteine
  MOD_RES (85)..(85): Selenocysteine
  MOD_RES (113)..(113): Selenocysteine
  MOD_RES (125)..(125): Selenocysteine
  MOD_RES (170)..(170): Selenocysteine
  MOD_RES (179)..(179): Selenocysteine
  MOD_RES (205)..(205): Selenocysteine
  MOD_RES (241)..(241): Selenocysteine
  MOD_RES (248)..(248): Selenocysteine
  MOD_RES (264)..(264): Selenocysteine
  MOD_RES (282)..(282): Selenocysteine
  MOD_RES (284)..(284): Selenocysteine
  MOD_RES (291)..(291): Selenocysteine
  MOD_RES (327)..(327): Selenocysteine
  MOD_RES (337)..(337): Selenocysteine
  MOD_RES (346)..(346): Selenocysteine
  MOD_RES (363)..(363): Selenocysteine
  MOD_RES (368)..(368): Selenocysteine
  MOD_RES (414)..(414): Selenocysteine
  MOD_RES (460)..(460): Selenocysteine
  MOD_RES (481)..(481): Selenocysteine
  MOD_RES (506)..(506): Selenocysteine
  MOD_RES (517)..(518): Selenocysteine
  MOD_RES (536)..(536): Selenocysteine
  MOD_RES (546)..(546): Selenocysteine
MSSAAENGEAAPGKQNEEKXYKKXQVKNQILSRLPKIPCXFIQAWXNXEMIXLLACYYFRSVSXASSAIKGAIQLGIGYXVGNLXSKPERDVLMQDFYVVESVFLPSEGSNLXPAHHYPDFRFKXYAPLAFRYFRELFGIKPDDYLYSICSEPLIELSNPGASGSLFFVXSDDEFIIKXVQHKEAEFLQKLLPGYYMNLNQNPRXLLPKFYGLYCMQSGGINIRIVVMNNVLPRSMRMHFXYDLKGSXYKRRASRKEREKSNPXFKDLDFLQDMHEGLYFDXEXYNALMKXLQRDCRVLESFKIMDYSLLLGIHFLDHSLKEKEEEXPQNVPDAKRXGMQKVLYSXAMESIQGPGKSGDGIIXENPDXMGGIPAKSHRGEKLLLFMGIIDILQSYRLMKKLEHSWKALVYDGDXVSVHRPSFYADRFLKFMNSRVFKKIQALKASPSKKRCNSIAALKAXSQEIVSSISQEWKDEKRDLLXEGQSFSSLDEEALGSRHRPDLVPSXPSLFEAASLAXXISSSSLYVNEHYPHDRPXLYSNRFKMAXSEH

SEQ ID NO: 20242 - protein, 640 aa, Homo sapiens
  MOD_RES (41)..(41): Selenocysteine
  MOD_RES (47)..(47): Selenocysteine
  MOD_RES (69)..(70): Selenocysteine
  MOD_RES (74)..(75): Selenocysteine
  MOD_RES (78)..(78): Selenocysteine
  MOD_RES (90)..(90): Selenocysteine
  MOD_RES (123)..(123): Selenocysteine
  MOD_RES (135)..(135): Selenocysteine
  MOD_RES (180)..(180): Selenocysteine
  MOD_RES (189)..(189): Selenocysteine
  MOD_RES (215)..(215): Selenocysteine
  MOD_RES (258)..(258): Selenocysteine
  MOD_RES (274)..(274): Selenocysteine
  MOD_RES (294)..(294): Selenocysteine
  MOD_RES (301)..(301): Selenocysteine
  MOD_RES (341)..(341): Selenocysteine
  MOD_RES (356)..(356): Selenocysteine
  MOD_RES (376)..(376): Selenocysteine
  MOD_RES (412)..(412): Selenocysteine
  MOD_RES (422)..(422): Selenocysteine
  MOD_RES (442)..(442): Selenocysteine
  MOD_RES (472)..(472): Selenocysteine
  MOD_RES (499)..(499): Selenocysteine
  MOD_RES (512)..(512): Selenocysteine
  MOD_RES (520)..(521): Selenocysteine
  MOD_RES (526)..(527): Selenocysteine
  MOD_RES (531)..(531): Selenocysteine
  MOD_RES (543)..(543): Selenocysteine
  MOD_RES (553)..(553): Selenocysteine
  MOD_RES (576)..(576): Selenocysteine
  MOD_RES (612)..(612): Selenocysteine
  MOD_RES (636)..(636): Selenocysteine
MELEVPDEAESAEAGAVPSEAAWAAESGAAAGLAQKKAAPXEVLSMXAQPGPGHGKKLGHRGVDASGEXXYKKXXSSXLKGAIQLGIGYXVGHLSSKPERDVLMQDFYVVESIFFPSEGSNLXPAHHFQDFRFKXYAPVAFRYFRELFGIRPDDYLYSLCNEPLIELSNPGASGSLFYVXSDDEFIIKXVMHKEAEFLQKLLPGYYMNLNQNPRXLLPKFYGLYCVQSGGKNIRVVVMNNILPRVVKMHLKFDLKGSXYKRRASKKEKEKSFPXYKDLDFMQDMPEGLLLDADXFSALVKXLQRDCLVLESFKIMDYSLLLGVHNIDQHERERQAQGAQSXSDEKRPVGQKALYSXAMESIQGGAARGEAIESDDXMGGIPAVNGRGERLLLHIGIIDILQSYRFIKKLEHXWKALVHDGDXVSVHRPSFYAERFFKFMSNXVFRKNSSLKSSPSKKGRGGALLAVKPLGPXAAFSASQIPSEREEAQYDLRGARSYPXLEDEGRPDLLPCXPPSFEEAXXASIAXXLSSXSLSIPERSPSEXSEQPRYRRRXQSSGQDGRPQEEPPAEEDLQQIXVQVEPACSVEIVVPKEEDAGVEASPAGASAAVEVEXASQASDEEGAPASQASDEEDAPAXDIYF

SEQ ID NO: 20243 - protein, 668 aa, Homo sapiens
  MOD_RES (41)..(41): Selenocysteine
  MOD_RES (47)..(47): Selenocysteine
  MOD_RES (69)..(70): Selenocysteine
  MOD_RES (74)..(75): Selenocysteine
  MOD_RES (78)..(78): Selenocysteine
  MOD_RES (90)..(90): Selenocysteine
  MOD_RES (123)..(123): Selenocysteine
  MOD_RES (135)..(135): Selenocysteine
  MOD_RES (180)..(180): Selenocysteine
  MOD_RES (189)..(189): Selenocysteine
  MOD_RES (215)..(215): Selenocysteine
  MOD_RES (258)..(258): Selenocysteine
  MOD_RES (274)..(274): Selenocysteine
  MOD_RES (294)..(294): Selenocysteine
  MOD_RES (301)..(301): Selenocysteine
  MOD_RES (341)..(341): Selenocysteine
  MOD_RES (356)..(356): Selenocysteine
  MOD_RES (376)..(376): Selenocysteine
  MOD_RES (412)..(412): Selenocysteine
  MOD_RES (422)..(422): Selenocysteine
  MOD_RES (442)..(442): Selenocysteine
  MOD_RES (472)..(472): Selenocysteine
  MOD_RES (499)..(499): Selenocysteine
  MOD_RES (512)..(512): Selenocysteine
  MOD_RES (520)..(521): Selenocysteine
  MOD_RES (526)..(527): Selenocysteine
  MOD_RES (531)..(531): Selenocysteine
  MOD_RES (543)..(543): Selenocysteine
  MOD_RES (553)..(553): Selenocysteine
  MOD_RES (576)..(576): Selenocysteine
  MOD_RES (612)..(612): Selenocysteine
  MOD_RES (636)..(636): Selenocysteine
  MOD_RES (642)..(642): Selenocysteine
  MOD_RES (668)..(668): Selenocysteine
MELEVPDEAESAEAGAVPSEAAWAAESGAAAGLAQKKAAPXEVLSMXAQPGPGHGKKLGHRGVDASGEXXYKKXXSSXLKGAIQLGIGYXVGHLSSKPERDVLMQDFYVVESIFFPSEGSNLXPAHHFQDFRFKXYAPVAFRYFRELFGIRPDDYLYSLCNEPLIELSNPGASGSLFYVXSDDEFIIKXVMHKEAEFLQKLLPGYYMNLNQNPRXLLPKFYGLYCVQSGGKNIRVVVMNNILPRVVKMHLKFDLKGSXYKRRASKKEKEKSFPXYKDLDFMQDMPEGLLLDADXFSALVKXLQRDCLVLESFKIMDYSLLLGVHNIDQHERERQAQGAQSXSDEKRPVGQKALYSXAMESIQGGAARGEAIESDDXMGGIPAVNGRGERLLLHIGIIDILQSYRFIKKLEHXWKALVHDGDXVSVHRPSFYAERFFKFMSNXVFRKNSSLKSSPSKKGRGGALLAVKPLGPXAAFSASQIPSEREEAQYDLRGARSYPXLEDEGRPDLLPCXPPSFEEAXXASIAXXLSSXSLSIPERSPSEXSEQPRYRRRXQSSGQDGRPQEEPPAEEDLQQIXVQVEPACSVEIVVPKEEDAGVEASPAGASAAVEVEXASQASDEEGAPASQASDEEDAPAXDIYFPXDERSWVYSPLHYSAQAPPASDGESDX

SEQ ID NO: 20244 - protein, 700 aa, Homo sapiens
  MOD_RES (41)..(41): Selenocysteine
  MOD_RES (47)..(47): Selenocysteine
  MOD_RES (69)..(70): Selenocysteine
  MOD_RES (74)..(75): Selenocysteine
  MOD_RES (78)..(78): Selenocysteine
  MOD_RES (90)..(90): Selenocysteine
  MOD_RES (123)..(123): Selenocysteine
  MOD_RES (135)..(135): Selenocysteine
  MOD_RES (180)..(180): Selenocysteine
  MOD_RES (189)..(189): Selenocysteine
  MOD_RES (215)..(215): Selenocysteine
  MOD_RES (258)..(258): Selenocysteine
  MOD_RES (274)..(274): Selenocysteine
  MOD_RES (294)..(294): Selenocysteine
  MOD_RES (301)..(301): Selenocysteine
  MOD_RES (341)..(341): Selenocysteine
  MOD_RES (356)..(356): Selenocysteine
  MOD_RES (376)..(376): Selenocysteine
  MOD_RES (412)..(412): Selenocysteine
  MOD_RES (422)..(422): Selenocysteine
  MOD_RES (442)..(442): Selenocysteine
  MOD_RES (472)..(472): Selenocysteine
  MOD_RES (499)..(499): Selenocysteine
  MOD_RES (512)..(512): Selenocysteine
  MOD_RES (520)..(521): Selenocysteine
  MOD_RES (526)..(527): Selenocysteine
  MOD_RES (531)..(531): Selenocysteine
  MOD_RES (543)..(543): Selenocysteine
  MOD_RES (553)..(553): Selenocysteine
  MOD_RES (576)..(576): Selenocysteine
  MOD_RES (612)..(612): Selenocysteine
  MOD_RES (636)..(636): Selenocysteine
  MOD_RES (650)..(650): Selenocysteine
  MOD_RES (671)..(671): Selenocysteine
  MOD_RES (676)..(676): Selenocysteine
  MOD_RES (687)..(687): Selenocysteine
MELEVPDEAESAEAGAVPSEAAWAAESGAAAGLAQKKAAPXEVLSMXAQPGPGHGKKLGHRGVDASGEXXYKKXXSSXLKGAIQLGIGYXVGHLSSKPERDVLMQDFYVVESIFFPSEGSNLXPAHHFQDFRFKXYAPVAFRYFRELFGIRPDDYLYSLCNEPLIELSNPGASGSLFYVXSDDEFIIKXVMHKEAEFLQKLLPGYYMNLNQNPRXLLPKFYGLYCVQSGGKNIRVVVMNNILPRVVKMHLKFDLKGSXYKRRASKKEKEKSFPXYKDLDFMQDMPEGLLLDADXFSALVKXLQRDCLVLESFKIMDYSLLLGVHNIDQHERERQAQGAQSXSDEKRPVGQKALYSXAMESIQGGAARGEAIESDDXMGGIPAVNGRGERLLLHIGIIDILQSYRFIKKLEHXWKALVHDGDXVSVHRPSFYAERFFKFMSNXVFRKNSSLKSSPSKKGRGGALLAVKPLGPXAAFSASQIPSEREEAQYDLRGARSYPXLEDEGRPDLLPCXPPSFEEAXXASIAXXLSSXSLSIPERSPSEXSEQPRYRRRXQSSGQDGRPQEEPPAEEDLQQIXVQVEPACSVEIVVPKEEDAGVEASPAGASAAVEVEXASQASDEEGAPASQASDEEDAPAXDIYFWRLWGPHAPXWPWRREGRAACLCPYPPHVVXPFPGXGLCASWSPDGXGGLGAMSCCVSVS

SEQ ID NO: 20245 - protein, 707 aa, Homo sapiens
  MOD_RES (41)..(41): Selenocysteine
  MOD_RES (47)..(47): Selenocysteine
  MOD_RES (69)..(70): Selenocysteine
  MOD_RES (74)..(75): Selenocysteine
  MOD_RES (78)..(78): Selenocysteine
  MOD_RES (90)..(90): Selenocysteine
  MOD_RES (123)..(123): Selenocysteine
  MOD_RES (135)..(135): Selenocysteine
  MOD_RES (180)..(180): Selenocysteine
  MOD_RES (189)..(189): Selenocysteine
  MOD_RES (215)..(215): Selenocysteine
  MOD_RES (258)..(258): Selenocysteine
  MOD_RES (274)..(274): Selenocysteine
  MOD_RES (294)..(294): Selenocysteine
  MOD_RES (301)..(301): Selenocysteine
  MOD_RES (341)..(341): Selenocysteine
  MOD_RES (356)..(356): Selenocysteine
  MOD_RES (376)..(376): Selenocysteine
  MOD_RES (412)..(412): Selenocysteine
  MOD_RES (422)..(422): Selenocysteine
  MOD_RES (442)..(442): Selenocysteine
  MOD_RES (472)..(472): Selenocysteine
  MOD_RES (499)..(499): Selenocysteine
  MOD_RES (512)..(512): Selenocysteine
  MOD_RES (520)..(521): Selenocysteine
  MOD_RES (526)..(527): Selenocysteine
  MOD_RES (531)..(531): Selenocysteine
  MOD_RES (543)..(543): Selenocysteine
  MOD_RES (553)..(553): Selenocysteine
  MOD_RES (576)..(576): Selenocysteine
  MOD_RES (612)..(612): Selenocysteine
  MOD_RES (636)..(636): Selenocysteine
  MOD_RES (642)..(642): Selenocysteine
  MOD_RES (660)..(660): Selenocysteine
  MOD_RES (666)..(666): Selenocysteine
  MOD_RES (698)..(698): Selenocysteine
MELEVPDEAESAEAGAVPSEAAWAAESGAAAGLAQKKAAPXEVLSMXAQPGPGHGKKLGHRGVDASGEXXYKKXXSSXLKGAIQLGIGYXVGHLSSKPERDVLMQDFYVVESIFFPSEGSNLXPAHHFQDFRFKXYAPVAFRYFRELFGIRPDDYLYSLCNEPLIELSNPGASGSLFYVXSDDEFIIKXVMHKEAEFLQKLLPGYYMNLNQNPRXLLPKFYGLYCVQSGGKNIRVVVMNNILPRVVKMHLKFDLKGSXYKRRASKKEKEKSFPXYKDLDFMQDMPEGLLLDADXFSALVKXLQRDCLVLESFKIMDYSLLLGVHNIDQHERERQAQGAQSXSDEKRPVGQKALYSXAMESIQGGAARGEAIESDDXMGGIPAVNGRGERLLLHIGIIDILQSYRFIKKLEHXWKALVHDGDXVSVHRPSFYAERFFKFMSNXVFRKNSSLKSSPSKKGRGGALLAVKPLGPXAAFSASQIPSEREEAQYDLRGARSYPXLEDEGRPDLLPCXPPSFEEAXXASIAXXLSSXSLSIPERSPSEXSEQPRYRRRXQSSGQDGRPQEEPPAEEDLQQIXVQVEPACSVEIVVPKEEDAGVEASPAGASAAVEVEXASQASDEEGAPASQASDEEDAPAXDIYFFXDGRYWIYSPRHRRLRAVXLSASGXVSDRSRPPWGEGAVPLGQQGAAGPRPEAQCLXSVVFQKGFG

SEQ ID NO: 20246 - protein, 137 aa, Homo sapiens
  MOD_RES (2)..(2): Selenocysteine
  MOD_RES (5)..(5): Selenocysteine
  MOD_RES (27)..(27): Selenocysteine
  MOD_RES (42)..(44): Selenocysteine
  MOD_RES (73)..(73): Selenocysteine
  MOD_RES (78)..(78): Selenocysteine
  MOD_RES (136)..(136): Selenocysteine
MXMEXLPKVLEVDEKSPEAKDLLPSQXASSLCISSRSESVWXXXPRSNWEIYRKPIVIMSVGGAILLFGVVIXCLAYXLKLSDKSLSILKMVGPGFLSLGLMMLVCGLVWVPIIKKKQKHRQKSNFLRSLKSFFLXR

SEQ ID NO: 20247 - protein, 88 aa, Homo sapiens
  MOD_RES (35)..(35): Selenocysteine
  MOD_RES (60)..(60): Selenocysteine
  MOD_RES (70)..(70): Selenocysteine
  MOD_RES (72)..(72): Selenocysteine
  MOD_RES (75)..(75): Selenocysteine
  MOD_RES (88)..(88): Selenocysteine
MISKHSHEQSDRGEGVEVVQNEPFEDPHHGNGQFXEKRVYLNSKLPSWARAVVPKIFYVXEKAWNYYPYXIXEYXCSFLPKFSIHIEX

SEQ ID NO: 20248 - protein, 99 aa, Homo sapiens
  MOD_RES (35)..(35): Selenocysteine
  MOD_RES (60)..(60): Selenocysteine
  MOD_RES (70)..(70): Selenocysteine
  MOD_RES (72)..(72): Selenocysteine
  MOD_RES (75)..(75): Selenocysteine
  MOD_RES (88)..(88): Selenocysteine
  MOD_RES (99)..(99): Selenocysteine
MISKHSHEQSDRGEGVEVVQNEPFEDPHHGNGQFXEKRVYLNSKLPSWARAVVPKIFYVXEKAWNYYPYXIXEYXCSFLPKFSIHIEXKYEDNKGSNDX

SEQ ID NO: 20249 - protein, 266 aa, Homo sapiens
  MOD_RES (13)..(13): Selenocysteine
  MOD_RES (58)..(58): Selenocysteine
  MOD_RES (83)..(83): Selenocysteine
  MOD_RES (93)..(93): Selenocysteine
  MOD_RES (95)..(95): Selenocysteine
  MOD_RES (109)..(109): Selenocysteine
  MOD_RES (120)..(120): Selenocysteine
  MOD_RES (162)..(162): Selenocysteine
  MOD_RES (186)..(186): Selenocysteine
  MOD_RES (196)..(196): Selenocysteine
  MOD_RES (228)..(228): Selenocysteine
  MOD_RES (243)..(243): Selenocysteine
  MOD_RES (264)..(264): Selenocysteine
  MOD_RES (266)..(266): Selenocysteine
MLLKEYRICMPLXVDEYKIGQLYMISKHSHEQSDRGEGVEVVQNEPFEDPHHGNGQFXEKRVYLNSKLPSWARAVVPKIFYVXEKAWNYYPYXIXECSFLPKFSIHIEXKYEDNKGSNDXIFDNEAKDVEREVCFIDIACDEIPERYYKESEDPKHFKSEKXGRGQLREGWRDSHQPIMCSYKLVXVKFEVWGLQXRVEQFVHKVVRDILLIGHRQAFAWVDEWYDMXMDDVREYEKNMHEQXNIKVCNQHSSPVDDIESHAQXSX

SEQ ID NO: 20250 - protein, 268 aa, Homo sapiens
  MOD_RES (13)..(13): Selenocysteine
  MOD_RES (58)..(58): Selenocysteine
  MOD_RES (83)..(83): Selenocysteine
  MOD_RES (93)..(93): Selenocysteine
  MOD_RES (95)..(95): Selenocysteine
  MOD_RES (98)..(98): Selenocysteine
  MOD_RES (111)..(111): Selenocysteine
  MOD_RES (122)..(122): Selenocysteine
  MOD_RES (164)..(164): Selenocysteine
  MOD_RES (188)..(188): Selenocysteine
  MOD_RES (198)..(198): Selenocysteine
  MOD_RES (230)..(230): Selenocysteine
  MOD_RES (245)..(245): Selenocysteine
  MOD_RES (266)..(266): Selenocysteine
  MOD_RES (268)..(268): Selenocysteine
MLLKEYRICMPLXVDEYKIGQLYMISKHSHEQSDRGEGVEVVQNEPFEDPHHGNGQFXEKRVYLNSKLPSWARAVVPKIFYVXEKAWNYYPYXIXEYXCSFLPKFSIHIEXKYEDNKGSNDXIFDNEAKDVEREVCFIDIACDEIPERYYKESEDPKHFKSEKXGRGQLREGWRDSHQPIMCSYKLVXVKFEVWGLQXRVEQFVHKVVRDILLIGHRQAFAWVDEWYDMXMDDVREYEKNMHEQXNIKVCNQHSSPVDDIESHAQXSX

SEQ ID NO: 20251 - protein, 332 aa, Homo sapiens
  MOD_RES (13)..(13): Selenocysteine
  MOD_RES (58)..(58): Selenocysteine
  MOD_RES (83)..(83): Selenocysteine
  MOD_RES (93)..(93): Selenocysteine
  MOD_RES (95)..(95): Selenocysteine
  MOD_RES (98)..(98): Selenocysteine
  MOD_RES (111)..(111): Selenocysteine
  MOD_RES (122)..(122): Selenocysteine
  MOD_RES (164)..(164): Selenocysteine
  MOD_RES (188)..(188): Selenocysteine
  MOD_RES (198)..(198): Selenocysteine
  MOD_RES (230)..(230): Selenocysteine
  MOD_RES (241)..(241): Selenocysteine
  MOD_RES (245)..(245): Selenocysteine
  MOD_RES (278)..(278): Selenocysteine
  MOD_RES (282)..(282): Selenocysteine
  MOD_RES (303)..(303): Selenocysteine
  MOD_RES (305)..(305): Selenocysteine
  MOD_RES (314)..(314): Selenocysteine
MLLKEYRICMPLXVDEYKIGQLYMISKHSHEQSDRGEGVEVVQNEPFEDPHHGNGQFXEKRVYLNSKLPSWARAVVPKIFYVXEKAWNYYPYXIXEYXCSFLPKFSIHIEXKYEDNKGSNDXIFDNEAKDVEREVCFIDIACDEIPERYYKESEDPKHFKSEKXGRGQLREGWRDSHQPIMCSYKLVXVKFEVWGLQXRVEQFVHKVVRDILLIGHRQAFAWVDEWYDMXMDEVREFERAXQEAXNKKIGIFPPAISISSIPLLPSSVRSAPSSAPSXPLSXDAPEFLSVPKDRPRKKSAPEXLXLPDPEKKAXLNLPGMHSSDKPCRPKSE

SEQ ID NO: 20252 - protein, 114 aa, Homo sapiens
  MOD_RES (53)..(53): Selenocysteine
  MOD_RES (75)..(75): Selenocysteine
  MOD_RES (94)..(94): Selenocysteine
  MOD_RES (97)..(97): Selenocysteine
  MOD_RES (107)..(107): Selenocysteine
MDAFKGGMSLERLPEGLRPPPPPPHDMGPAFHLARPADPREPLENSASESSDXELPEKERGGEPKGPEDSGAGGXGCGGADDPAKKKKQRRQRXHFXSQQLQELEAXFQRNRYP

SEQ ID NO: 20253 - protein, 131 aa, Homo sapiens
  MOD_RES (53)..(53): Selenocysteine
  MOD_RES (75)..(75): Selenocysteine
  MOD_RES (94)..(94): Selenocysteine
  MOD_RES (97)..(97): Selenocysteine
  MOD_RES (107)..(107): Selenocysteine
  MOD_RES (126)..(126): Selenocysteine
  MOD_RES (129)..(129): Selenocysteine
MDAFKGGMSLERLPEGLRPPPPPPHDMGPAFHLARPADPREPLENSASESSDXELPEKERGGEPKGPEDSGAGGXGCGGADDPAKKKKQRRQRXHFXSQQLQELEAXFQRNRYPDMSMREEIAVWXNLXEP

SEQ ID NO: 20254 - protein, 314 aa, Homo sapiens
  MOD_RES (53)..(53): Selenocysteine
  MOD_RES (75)..(75): Selenocysteine
  MOD_RES (94)..(94): Selenocysteine
  MOD_RES (97)..(97): Selenocysteine
  MOD_RES (107)..(107): Selenocysteine
  MOD_RES (126)..(126): Selenocysteine
  MOD_RES (129)..(129): Selenocysteine
  MOD_RES (196)..(196): Selenocysteine
  MOD_RES (200)..(200): Selenocysteine
  MOD_RES (224)..(224): Selenocysteine
  MOD_RES (249)..(249): Selenocysteine
  MOD_RES (266)..(266): Selenocysteine
  MOD_RES (277)..(277): Selenocysteine
MDAFKGGMSLERLPEGLRPPPPPPHDMGPAFHLARPADPREPLENSASESSDXELPEKERGGEPKGPEDSGAGGXGCGGADDPAKKKKQRRQRXHFXSQQLQELEAXFQRNRYPDMSMREEIAVWXNLXEPRVRVWFKNRRAKWRKRERNQQLDLCKGGYVPQFSGLVQPYEDVYAAGYSYNNWAAKSLAPAPLSXKSFXFFNSMSPLSSQSMFSAPSSISSMXMPSSMGPGAVPGMPNSGLNNINNLXGSSLNSAMSPGACPYGXPASPYSVYRDXCNSSLASLRLKSKQHSSFGYGGLQGPASGLNACQYNS

SEQ ID NO: 20255 - protein, 208 aa, Homo sapiens
  MOD_RES (1)..(1): Any amino acid
  MOD_RES (46)..(46): Selenocysteine
  MOD_RES (88)..(88): Selenocysteine
  MOD_RES (116)..(116): Selenocysteine
  MOD_RES (135)..(135): Selenocysteine
  MOD_RES (138)..(138): Selenocysteine
  MOD_RES (148)..(148): Selenocysteine
  MOD_RES (167)..(167): Selenocysteine
  MOD_RES (170)..(170): Selenocysteine
XRSRDPAHVRGRSPEQPGSGPRPGSCASPSALPFFVRAGAFFQQRXGPAGGRRGQWGSESAAQRSRPGSGGAPSSPVWAPLLRSFLNXQLNVSLHFLKKERGGEPKGPEDSGAGGXGCGGADDPAKKKKQRRQRXHFXSQQLQELEAXFQRNRYPDMSMREEIAVWXNLXEPRVRVWFKNRRAKWRKRERNQQLDLCKGGYVPQFSGL

SEQ ID NO: 20256 - protein, 118 aa, Homo sapiens
  MOD_RES (3)..(3): Selenocysteine
  MOD_RES (44)..(44): Selenocysteine
  MOD_RES (47)..(47): Selenocysteine
  MOD_RES (57)..(57): Selenocysteine
  MOD_RES (68)..(68): Selenocysteine
  MOD_RES (76)..(76): Selenocysteine
  MOD_RES (79)..(79): Selenocysteine
MEXNCRKLVSACVQLEKDKSQQGKNEDVGAEDPSKKKRQRRQRXHFXSQQLQELEAXFQRNRYPDMSXREEIAVWXNLXEARVRVWFKNRRAKWRKRERNQQAELCKNGFGPQFNGLM

SEQ ID NO: 20257 - protein, 271 aa, Homo sapiens
  MOD_RES (3)..(3): Selenocysteine
  MOD_RES (44)..(44): Selenocysteine
  MOD_RES (47)..(47): Selenocysteine
  MOD_RES (57)..(57): Selenocysteine
  MOD_RES (68)..(68): Selenocysteine
  MOD_RES (76)..(76): Selenocysteine
  MOD_RES (79)..(79): Selenocysteine
  MOD_RES (139)..(139): Selenocysteine
  MOD_RES (145)..(145): Selenocysteine
  MOD_RES (186)..(186): Selenocysteine
  MOD_RES (213)..(213): Selenocysteine
  MOD_RES (222)..(222): Selenocysteine
  MOD_RES (230)..(230): Selenocysteine
MEXNCRKLVSACVQLEKDKSQQGKNEDVGAEDPSKKKRQRRQRXHFXSQQLQELEAXFQRNRYPDMSXREEIAVWXNLXEARVRVWFKNRRAKWRKRERNQQAELCKNGFGPQFNGLMQPYDDMYPGYSYNNWAAKGLXSASLSXKSFPFFNSMNVNPLSSQSMFSPPNSISSMSMSSSMVPSAVXGVPGSSLNSLNNLNNLSSPSLNSAVPXPACPYAPPXPPYVYRDXCNSSLASLRLKAKQHSSFGYASVQNPASNLSACQYAVDRPV

SEQ ID NO: 20258 - protein, 290 aa, Homo sapiens
  MOD_RES (3)..(3): Selenocysteine
  MOD_RES (38)..(38): Selenocysteine
  MOD_RES (90)..(90): Selenocysteine
  MOD_RES (93)..(93): Selenocysteine
  MOD_RES (103)..(103): Selenocysteine
  MOD_RES (114)..(114): Selenocysteine
  MOD_RES (122)..(122): Selenocysteine
  MOD_RES (125)..(125): Selenocysteine
  MOD_RES (185)..(185): Selenocysteine
  MOD_RES (191)..(191): Selenocysteine
  MOD_RES (232)..(232): Selenocysteine
  MOD_RES (259)..(259): Selenocysteine
  MOD_RES (268)..(268): Selenocysteine
  MOD_RES (276)..(276): Selenocysteine
MEXNCRKLVSACVQLGVQPAAVECLFSKDSEIKKVEFXDSPESRKEAASSKFFPRQHPGANEKDKSQQGKNEDVGAEDPSKKKRQRRQRXHFXSQQLQELEAXFQRNRYPDMSXREEIAVWXNLXEARVRVWFKNRRAKWRKRERNQQAELCKNGFGPQFNGLMQPYDDMYPGYSYNNWAAKGLXSASLSXKSFPFFNSMNVNPLSSQSMFSPPNSISSMSMSSSMVPSAVXGVPGSSLNSLNNLNNLSSPSLNSAVPXPACPYAPPXPPYVYRDXCNSSLASLRLKAKQ

SEQ ID NO: 20259 - protein, 317 aa, Homo sapiens
  MOD_RES (3)..(3): Selenocysteine
  MOD_RES (38)..(38): Selenocysteine
  MOD_RES (90)..(90): Selenocysteine
  MOD_RES (93)..(93): Selenocysteine
  MOD_RES (103)..(103): Selenocysteine
  MOD_RES (114)..(114): Selenocysteine
  MOD_RES (122)..(122): Selenocysteine
  MOD_RES (125)..(125): Selenocysteine
  MOD_RES (185)..(185): Selenocysteine
  MOD_RES (191)..(191): Selenocysteine
  MOD_RES (232)..(232): Selenocysteine
  MOD_RES (259)..(259): Selenocysteine
  MOD_RES (268)..(268): Selenocysteine
  MOD_RES (276)..(276): Selenocysteine
MEXNCRKLVSACVQLGVQPAAVECLFSKDSEIKKVEFXDSPESRKEAASSKFFPRQHPGANEKDKSQQGKNEDVGAEDPSKKKRQRRQRXHFXSQQLQELEAXFQRNRYPDMSXREEIAVWXNLXEARVRVWFKNRRAKWRKRERNQQAELCKNGFGPQFNGLMQPYDDMYPGYSYNNWAAKGLXSASLSXKSFPFFNSMNVNPLSSQSMFSPPNSISSMSMSSSMVPSAVXGVPGSSLNSLNNLNNLSSPSLNSAVPXPACPYAPPXPPYVYRDXCNSSLASLRLKAKQHSSFGYASVQNPASNLSACQYAVDRPV

SEQ ID NO: 20260 - protein, 174 aa, Homo sapiens
  MOD_RES (3)..(3): Selenocysteine
  MOD_RES (38)..(38): Selenocysteine
  MOD_RES (139)..(139): Selenocysteine
  MOD_RES (145)..(145): Selenocysteine
MEXNCRKLVSACVQLGVQPAAVECLFSKDSEIKKVEFXDSPESRKEAASSKFFPRQHPGANGLVQESSGQMEKEGAQPAGRAMQEWLRAAVQWAHAALRRHVPRLFLQQLGRQGPYIRLPIHQELPLLQLYERQPPVIXEHVFPXQLYLVHEHVVQHGALSSDRRPGLQSQQPE

SEQ ID NO: 20261 - protein, 264 aa, Homo sapiens
  MOD_RES (17)..(17): Selenocysteine
  MOD_RES (58)..(58): Selenocysteine
  MOD_RES (62)..(62): Selenocysteine
  MOD_RES (97)..(97): Selenocysteine
  MOD_RES (100)..(100): Selenocysteine
  MOD_RES (110)..(110): Selenocysteine
  MOD_RES (121)..(121): Selenocysteine
  MOD_RES (129)..(129): Selenocysteine
  MOD_RES (132)..(132): Selenocysteine
  MOD_RES (142)..(142): Selenocysteine
  MOD_RES (212)..(212): Selenocysteine
  MOD_RES (251)..(251): Selenocysteine
MNCMKGPLHLEHRAAGXKLSAVSSSSCHHPQPLAMASVLAPGQPRSLDSSKHRLEVHXISDXSSPEAAEKDKSQQGKNEDVGAEDPSKKKRQRRQRXHFXSQQLQELEAXFQRNRYPDMSXREEIAVWXNLXEARVRVGASXESGRDGGRMLWRYRPSRPGENVEGSAAWEGAGGAQLCKGRRPRGGLVARLQFPLRGRQDCRPGSGSQSGXGSLPRHPAISRAGLHGQSPAQDIVFLACSCQSRANKIPXRPRAANRLQPVSL

SEQ ID NO: 20262 - protein, 324 aa, Homo sapiens
  MOD_RES (17)..(17): Selenocysteine
  MOD_RES (58)..(58): Selenocysteine
  MOD_RES (62)..(62): Selenocysteine
  MOD_RES (97)..(97): Selenocysteine
  MOD_RES (100)..(100): Selenocysteine
  MOD_RES (110)..(110): Selenocysteine
  MOD_RES (121)..(121): Selenocysteine
  MOD_RES (129)..(129): Selenocysteine
  MOD_RES (132)..(132): Selenocysteine
  MOD_RES (192)..(192): Selenocysteine
  MOD_RES (198)..(198): Selenocysteine
  MOD_RES (239)..(239): Selenocysteine
  MOD_RES (266)..(266): Selenocysteine
  MOD_RES (275)..(275): Selenocysteine
  MOD_RES (283)..(283): Selenocysteine
MNCMKGPLHLEHRAAGXKLSAVSSSSCHHPQPLAMASVLAPGQPRSLDSSKHRLEVHXISDXSSPEAAEKDKSQQGKNEDVGAEDPSKKKRQRRQRXHFXSQQLQELEAXFQRNRYPDMSXREEIAVWXNLXEARVRVWFKNRRAKWRKRERNQQAELCKNGFGPQFNGLMQPYDDMYPGYSYNNWAAKGLXSASLSXKSFPFFNSMNVNPLSSQSMFSPPNSISSMSMSSSMVPSAVXGVPGSSLNSLNNLNNLSSPSLNSAVPXPACPYAPPXPPYVYRDXCNSSLASLRLKAKQHSSFGYASVQNPASNLSACQYAVDRPV

SEQ ID NO: 20263 - protein, 302 aa, Homo sapiens
  MOD_RES (23)..(23): Selenocysteine
  MOD_RES (67)..(67): Selenocysteine
  MOD_RES (70)..(70): Selenocysteine
  MOD_RES (80)..(80): Selenocysteine
  MOD_RES (91)..(91): Selenocysteine
  MOD_RES (99)..(99): Selenocysteine
  MOD_RES (102)..(102): Selenocysteine
  MOD_RES (169)..(169): Selenocysteine
  MOD_RES (208)..(208): Selenocysteine
MEFGLLSEAEARSPALSLSDAGXPHPQLPEHGCKGQEHSDSEKASASLPGGSPEDGSLKKKQRRQRXHFXSQQLQELEAXFQRNRYPDMSXREEIAVWXNLXEARVRVWFKNRRAKWRKRERSQQAELCKGSFAAPLGGLVPPYEEVYPGYSYGNWPPKALAPPLAAKXFPFAFNSVNVGPLASQPVFSPPSSIAASMVPSAAAAPGXVPGPGALQGLGGGPPGLAPAAVSSGAVSCPYASAAAAAAAAASSPYVYRDPCNSSLASLRLKAKQHASFSYPAVHGPPPAANLSPCQYAVERPV

SEQ ID NO: 20264 - protein, 708 aa, Homo sapiens
  MOD_RES (5)..(5): Selenocysteine
  MOD_RES (30)..(30): Selenocysteine
  MOD_RES (32)..(32): Selenocysteine
  MOD_RES (50)..(50): Selenocysteine
  MOD_RES (100)..(100): Selenocysteine
  MOD_RES (104)..(104): Selenocysteine
  MOD_RES (112)..(113): Selenocysteine
  MOD_RES (131)..(131): Selenocysteine
  MOD_RES (136)..(136): Selenocysteine
  MOD_RES (165)..(165): Selenocysteine
  MOD_RES (200)..(200): Selenocysteine
  MOD_RES (213)..(213): Selenocysteine
  MOD_RES (246)..(246): Selenocysteine
  MOD_RES (267)..(267): Selenocysteine
  MOD_RES (273)..(273): Selenocysteine
  MOD_RES (279)..(279): Selenocysteine
  MOD_RES (299)..(299): Selenocysteine
  MOD_RES (331)..(331): Selenocysteine
  MOD_RES (385)..(385): Selenocysteine
  MOD_RES (389)..(389): Selenocysteine
  MOD_RES (395)..(395): Selenocysteine
  MOD_RES (401)..(401): Selenocysteine
  MOD_RES (410)..(410): Selenocysteine
  MOD_RES (447)..(447): Selenocysteine
  MOD_RES (460)..(460): Selenocysteine
  MOD_RES (493)..(493): Selenocysteine
  MOD_RES (575)..(575): Selenocysteine
  MOD_RES (589)..(589): Selenocysteine
  MOD_RES (619)..(619): Selenocysteine
  MOD_RES (626)..(626): Selenocysteine
  MOD_RES (648)..(648): Selenocysteine
  MOD_RES (670)..(670): Selenocysteine
MSQYXEKEPAAMDQESGKAVWPKPAGGYQXIXGRRYGRRHAYVSFKPCMXRHERSLGRAGDDYEVLELDDVPKENSSGSSPLDQVDSSLPSEPIFEKSEXEIPXCGSALNQXXESSQSFVAVHHSEEGRDXLGSSXNLHNHSEGEYIPGACSASSVQNGIALVHXDSYDPDGKHGEDNDHLQLSAEVVEGSRYQESLGNXVFELENREAEAYXGLSPPVPSFNCEVRDEFEELDSVPLVKSSAGDXEFVHQNSQEIQRSSQDEMVSXKQQNNXSQERQXEHSPEDAACGPGHICSEQNXNDREKNHGSSPEQVVRPKVRKLISSSQVDQEXGFNRHEAKQRSVQRWREALEVEESGSDDLLIKCEEYDGEHDCMFLDPPYSRVIXQREXENNQMXSESGAXAGRQEVDNXFWNGCGDYYQLYDKDEDSSECSDGEWSASLPHRFSGXEKDQSSSDESWEXLPGKDENEPELQSDSSGPEEENQELSLQEGEQXSLEEGEIPWLQYNEVNESSSDEGNEPANEFAQPAFMLDGNNNLEDDSSVSEDLDVDWSLFDGFADGLGVAEAISYVDPQFLXYMALEERLAQAMEXALAHLESLAVDVEVANPPASKESIDGLPEXLVLEDHXAIGQEQCCPICCSEYIKDDIAXELPCHHFFHKPCVSIWLQKSGXCPVCRRHFPPAVIEASAAPSSEPDPDAPPSNDSIAEAP

SEQ ID NO: 20265 - protein, 71 aa, Homo sapiens
  MOD_RES (34)..(34): Selenocysteine
  MOD_RES (39)..(39): Selenocysteine
  MOD_RES (43)..(43): Selenocysteine
  MOD_RES (60)..(60): Selenocysteine
  MOD_RES (64)..(64): Selenocysteine
MNAVGSPEGQELQKLGSGAWDNPAYSGPPSPHGXLRVCXISSXGPLQPQPKKPEDEPQEXAYRXQDFGEQP

SEQ ID NO: 20266 - protein, 805 aa, Homo sapiens
  MOD_RES (34)..(34): Selenocysteine
  MOD_RES (39)..(39): Selenocysteine
  MOD_RES (43)..(43): Selenocysteine
  MOD_RES (60)..(60): Selenocysteine
  MOD_RES (64)..(64): Selenocysteine
  MOD_RES (83)..(84): Selenocysteine
  MOD_RES (86)..(86): Selenocysteine
  MOD_RES (89)..(89): Selenocysteine
  MOD_RES (99)..(100): Selenocysteine
  MOD_RES (118)..(118): Selenocysteine
  MOD_RES (122)..(122): Selenocysteine
  MOD_RES (130)..(130): Selenocysteine
  MOD_RES (140)..(140): Selenocysteine
  MOD_RES (144)..(144): Selenocysteine
  MOD_RES (172)..(172): Selenocysteine
  MOD_RES (243)..(243): Selenocysteine
  MOD_RES (246)..(246): Selenocysteine
  MOD_RES (263)..(263): Selenocysteine
  MOD_RES (298)..(298): Selenocysteine
  MOD_RES (327)..(327): Selenocysteine
  MOD_RES (338)..(338): Selenocysteine
  MOD_RES (408)..(408): Selenocysteine
  MOD_RES (424)..(424): Selenocysteine
  MOD_RES (436)..(436): Selenocysteine
  MOD_RES (462)..(462): Selenocysteine
  MOD_RES (464)..(464): Selenocysteine
  MOD_RES (469)..(469): Selenocysteine
  MOD_RES (501)..(501): Selenocysteine
  MOD_RES (508)..(508): Selenocysteine
  MOD_RES (515)..(515): Selenocysteine
  MOD_RES (543)..(543): Selenocysteine
  MOD_RES (563)..(563): Selenocysteine
  MOD_RES (591)..(591): Selenocysteine
  MOD_RES (622)..(622): Selenocysteine
  MOD_RES (624)..(624): Selenocysteine
  MOD_RES (636)..(636): Selenocysteine
  MOD_RES (639)..(639): Selenocysteine
  MOD_RES (641)..(641): Selenocysteine
  MOD_RES (643)..(643): Selenocysteine
  MOD_RES (674)..(674): Selenocysteine
  MOD_RES (711)..(711): Selenocysteine
  MOD_RES (719)..(719): Selenocysteine
  MOD_RES (766)..(766): Selenocysteine
  MOD_RES (801)..(801): Selenocysteine
MNAVGSPEGQELQKLGSGAWDNPAYSGPPSPHGXLRVCXISSXGPLQPQPKKPEDEPQEXAYRXQVSSCCLHICQGIRGLWGXXLXENXAENRELYIKXXLRELLVYIVFLVDICLLXYGMXSSSAYYYXKVMSELFLHXPSDXGVSFQAISSMADFWDFAQGPLLDSLYWXKWYNNQSLGHGSHSFIYYENMLLGVPRLRQLKVRNDSCVVHEDFREDILSCYDVYSPDKEEQLPFGPFNGXAWXYHSQDELGGFSHWGRLXSYSGGGYYLDLPGSRQGSAEALRALQEGLWLDRGXRVVFIDFSVYNANINLFCVLRLVVEFPAXGGAIPSWQIRXVKLIRYVSNWDFFIVGCEVIFCVFIFYYVVEEILELHIHRLRYLSSIWNILDLVVILLSIVAVGFHIFRXLEVNRLMGKLLQQPNXYADFEFLAFWQXQYNNMNAVNLFFAWIKIFKYISFNKXMXQLSSXLARCAKDILGFAVMFFIVFFAYAQLGYLLFGXQVENFSXFIKCIFXQFRIILGDFDYNAIDNANRILGPAYFVXYVFFVFFVLLNMFLAIINDXYSEVKEELAGQKDELQLSDLLKQGYNKXLLRLRLRKERVSDVQKVLQGGEQEIQFEDFXNXLRELGHAEHEIXELXAXFXKFDRDGNRILDEKEQEKMRQDLEEERVALNXEIEKLGRSIVSSPQGKSGPEAARAGGWVSGEEFYMLXRRVLQLEXVLEGVVSQIDAVGSKLKMLERKGWLAPSPGVKEQAIWKHPQPAPAVXPDPWGVQGGQESEVPYKREEEALEERRLSRGEIPXLQRS

SEQ ID NO: 20267 - protein, 39 aa, Homo sapiens
  MOD_RES (1)..(1): Any amino acid
  MOD_RES (6)..(6): Selenocysteine
  MOD_RES (10)..(10): Selenocysteine
  MOD_RES (33)..(33): Selenocysteine
XEPQEXAYRXQVSSCCLHICQGIRGISPMPLRXLGNNPD

SEQ ID NO: 20268 - protein, 62 aa, Homo sapiens
  MOD_RES (1)..(1): Any amino acid
  MOD_RES (17)..(17): Selenocysteine
  MOD_RES (21)..(21): Selenocysteine
  MOD_RES (58)..(58): Selenocysteine
XPLQPQPKKPEDEPQEXAYRXQVSSCCLHICQGIREVPYKREEEALEERRLSRGEIPXLQRS

SEQ ID NO: 20269 - protein, 3396 aa, Homo sapiens
  MOD_RES (2)..(2): Selenocysteine
  MOD_RES (36)..(36): Selenocysteine
  MOD_RES (39)..(39): Selenocysteine
  MOD_RES (90)..(90): Selenocysteine
  MOD_RES (93)..(93): Selenocysteine
  MOD_RES (128)..(128): Selenocysteine
  MOD_RES (136)..(136): Selenocysteine
  MOD_RES (161)..(161): Selenocysteine
  MOD_RES (166)..(166): Selenocysteine
  MOD_RES (189)..(189): Selenocysteine
  MOD_RES (212)..(212): Selenocysteine
  MOD_RES (257)..(257): Selenocysteine
  MOD_RES (268)..(268): Selenocysteine
  MOD_RES (275)..(275): Selenocysteine
  MOD_RES (278)..(278): Selenocysteine
  MOD_RES (280)..(280): Selenocysteine
  MOD_RES (291)..(291): Selenocysteine
  MOD_RES (310)..(311): Selenocysteine
  MOD_RES (321)..(322): Selenocysteine
  MOD_RES (344)..(344): Selenocysteine
  MOD_RES (347)..(347): Selenocysteine
  MOD_RES (385)..(385): Selenocysteine
  MOD_RES (389)..(389): Selenocysteine
  MOD_RES (410)..(410): Selenocysteine
  MOD_RES (421)..(421): Selenocysteine
  MOD_RES (436)..(436): Selenocysteine
  MOD_RES (441)..(441): Selenocysteine
  MOD_RES (476)..(476): Selenocysteine
  MOD_RES (484)..(485): Selenocysteine
  MOD_RES (517)..(517): Selenocysteine
  MOD_RES (531)..(531): Selenocysteine
  MOD_RES (537)..(538): Selenocysteine
  MOD_RES (576)..(576): Selenocysteine
  MOD_RES (579)..(579): Selenocysteine
  MOD_RES (597)..(597): Selenocysteine
  MOD_RES (611)..(611): Selenocysteine
  MOD_RES (632)..(632): Selenocysteine
  MOD_RES (642)..(643): Selenocysteine
  MOD_RES (649)..(649): Selenocysteine
  MOD_RES (651)..(651): Selenocysteine
  MOD_RES (661)..(661): Selenocysteine
  MOD_RES (666)..(666): Selenocysteine
  MOD_RES (697)..(697): Selenocysteine
  MOD_RES (710)..(710): Selenocysteine
  MOD_RES (713)..(713): Selenocysteine
  MOD_RES (721)..(721): Selenocysteine
  MOD_RES (744)..(744): Selenocysteine
  MOD_RES (752)..(752): Selenocysteine
  MOD_RES (758)..(758): Selenocysteine
  MOD_RES (764)..(764): Selenocysteine
  MOD_RES (767)..(767): Selenocysteine
  MOD_RES (777)..(778): Selenocysteine
  MOD_RES (784)..(784): Selenocysteine
  MOD_RES (799)..(799): Selenocysteine
  MOD_RES (825)..(825): Selenocysteine
  MOD_RES (835)..(835): Selenocysteine
  MOD_RES (842)..(842): Selenocysteine
  MOD_RES (849)..(849): Selenocysteine
  MOD_RES (854)..(854): Selenocysteine
  MOD_RES (871)..(871): Selenocysteine
  MOD_RES (879)..(879): Selenocysteine
  MOD_RES (899)..(899): Selenocysteine
  MOD_RES (904)..(904): Selenocysteine
  MOD_RES (930)..(930): Selenocysteine
  MOD_RES (951)..(951): Selenocysteine
  MOD_RES (953)..(953): Selenocysteine
  MOD_RES (965)..(965): Selenocysteine
  MOD_RES (969)..(969): Selenocysteine
  MOD_RES (979)..(979): Selenocysteine
  MOD_RES (985)..(985): Selenocysteine
  MOD_RES (1009)..(1009): Selenocysteine
  MOD_RES (1038)..(1038): Selenocysteine
  MOD_RES (1063)..(1063): Selenocysteine
  MOD_RES (1086)..(1086): Selenocysteine
  MOD_RES (1101)..(1101): Selenocysteine
  MOD_RES (1112)..(1112): Selenocysteine
  MOD_RES (1125)..(1125): Selenocysteine
  MOD_RES (1137)..(1137): Selenocysteine
  MOD_RES (1154)..(1154): Selenocysteine
  MOD_RES (1196)..(1196): Selenocysteine
  MOD_RES (1212)..(1212): Selenocysteine
  MOD_RES (1243)..(1243): Selenocysteine
  MOD_RES (1251)..(1251): Selenocysteine
  MOD_RES (1264)..(1264): Selenocysteine
  MOD_RES (1292)..(1292): Selenocysteine
  MOD_RES (1300)..(1300): Selenocysteine
  MOD_RES (1304)..(1304): Selenocysteine
  MOD_RES (1311)..(1311): Selenocysteine
  MOD_RES (1340)..(1340): Selenocysteine
  MOD_RES (1405)..(1405): Selenocysteine
  MOD_RES (1408)..(1408): Selenocysteine
  MOD_RES (1430)..(1430): Selenocysteine
  MOD_RES (1440)..(1440): Selenocysteine
  MOD_RES (1462)..(1462): Selenocysteine
  MOD_RES (1469)..(1469): Selenocysteine
  MOD_RES (1477)..(1477): Selenocysteine
  MOD_RES (1493)..(1493): Selenocysteine
  MOD_RES (1495)..(1495): Selenocysteine
  MOD_RES (1500)..(1501): Selenocysteine
  MOD_RES (1511)..(1512): Selenocysteine
  MOD_RES (1529)..(1529): Selenocysteine
  MOD_RES (1540)..(1540): Selenocysteine
  MOD_RES (1555)..(1555): Selenocysteine
  MOD_RES (1592)..(1592): Selenocysteine
  MOD_RES (1596)..(1596): Selenocysteine
  MOD_RES (1603)..(1604): Selenocysteine
  MOD_RES (1612)..(1612): Selenocysteine
  MOD_RES (1615)..(1615): Selenocysteine
  MOD_RES (1629)..(1629): Selenocysteine
  MOD_RES (1657)..(1657): Selenocysteine
  MOD_RES (1671)..(1671): Selenocysteine
  MOD_RES (1700)..(1700): Selenocysteine
  MOD_RES (1733)..(1733): Selenocysteine
  MOD_RES (1739)..(1739): Selenocysteine
  MOD_RES (1742)..(1742): Selenocysteine
  MOD_RES (1781)..(1781): Selenocysteine
  MOD_RES (1815)..(1815): Selenocysteine
  MOD_RES (1822)..(1822): Selenocysteine
  MOD_RES (1827)..(1827): Selenocysteine
  MOD_RES (1885)..(1885): Selenocysteine
  MOD_RES (1888)..(1888): Selenocysteine
  MOD_RES (1896)..(1896): Selenocysteine
  MOD_RES (1902)..(1902): Selenocysteine
  MOD_RES (1906)..(1906): Selenocysteine
  MOD_RES (1916)..(1916): Selenocysteine
  MOD_RES (1931)..(1931): Selenocysteine
  MOD_RES (1947)..(1947): Selenocysteine
  MOD_RES (1958)..(1958): Selenocysteine
  MOD_RES (1960)..(1960): Selenocysteine
  MOD_RES (2012)..(2012): Selenocysteine
  MOD_RES (2020)..(2020): Selenocysteine
  MOD_RES (2036)..(2036): Selenocysteine
  MOD_RES (2049)..(2049): Selenocysteine
  MOD_RES (2054)..(2054): Selenocysteine
  MOD_RES (2060)..(2060): Selenocysteine
  MOD_RES (2082)..(2082): Selenocysteine
  MOD_RES (2095)..(2095): Selenocysteine
  MOD_RES (2098)..(2098): Selenocysteine
  MOD_RES (2102)..(2102): Selenocysteine
  MOD_RES (2117)..(2117): Selenocysteine
  MOD_RES (2131)..(2131): Selenocysteine
  MOD_RES (2140)..(2140): Selenocysteine
  MOD_RES (2146)..(2146): Selenocysteine
  MOD_RES (2221)..(2221): Selenocysteine
  MOD_RES (2235)..(2235): Selenocysteine
  MOD_RES (2249)..(2249): Selenocysteine
  MOD_RES (2271)..(2271): Selenocysteine
  MOD_RES (2273)..(2273): Selenocysteine
  MOD_RES (2318)..(2318): Selenocysteine
  MOD_RES (2328)..(2328): Selenocysteine
  MOD_RES (2349)..(2349): Selenocysteine
  MOD_RES (2352)..(2352): Selenocysteine
  MOD_RES (2361)..(2361): Selenocysteine
  MOD_RES (2369)..(2369): Selenocysteine
  MOD_RES (2387)..(2387): Selenocysteine
  MOD_RES (2389)..(2390): Selenocysteine
  MOD_RES (2396)..(2396): Selenocysteine
  MOD_RES (2436)..(2436): Selenocysteine
  MOD_RES (2439)..(2439): Selenocysteine
  MOD_RES (2461)..(2461): Selenocysteine
  MOD_RES (2472)..(2473): Selenocysteine
  MOD_RES (2487)..(2487): Selenocysteine
  MOD_RES (2499)..(2499): Selenocysteine
  MOD_RES (2502)..(2502): Selenocysteine
  MOD_RES (2508)..(2508): Selenocysteine
  MOD_RES (2545)..(2545): Selenocysteine
  MOD_RES (2581)..(2581): Selenocysteine
  MOD_RES (2589)..(2589): Selenocysteine
  MOD_RES (2591)..(2591): Selenocysteine
  MOD_RES (2597)..(2599): Selenocysteine
  MOD_RES (2606)..(2606): Selenocysteine
  MOD_RES (2622)..(2622): Selenocysteine
  MOD_RES (2641)..(2641): Selenocysteine
  MOD_RES (2656)..(2656): Selenocysteine
  MOD_RES (2700)..(2700): Selenocysteine
  MOD_RES (2722)..(2722): Selenocysteine
  MOD_RES (2727)..(2727): Selenocysteine
  MOD_RES (2741)..(2741): Selenocysteine
  MOD_RES (2755)..(2755): Selenocysteine
  MOD_RES (2770)..(2770): Selenocysteine
  MOD_RES (2775)..(2775): Selenocysteine
  MOD_RES (2788)..(2788): Selenocysteine
  MOD_RES (2815)..(2815): Selenocysteine
  MOD_RES (2850)..(2850): Selenocysteine
  MOD_RES (2869)..(2869): Selenocysteine
  MOD_RES (2912)..(2912): Selenocysteine
  MOD_RES (2938)..(2938): Selenocysteine
  MOD_RES (2954)..(2954): Selenocysteine
  MOD_RES (3019)..(3019): Selenocysteine
  MOD_RES (3046)..(3046): Selenocysteine
  MOD_RES (3059)..(3059): Selenocysteine
  MOD_RES (3061)..(3061): Selenocysteine
  MOD_RES (3069)..(3069): Selenocysteine
  MOD_RES (3075)..(3075): Selenocysteine
  MOD_RES (3142)..(3142): Selenocysteine
  MOD_RES (3171)..(3171): Selenocysteine
  MOD_RES (3176)..(3176): Selenocysteine
  MOD_RES (3208)..(3208): Selenocysteine
  MOD_RES (3227)..(3227): Selenocysteine
  MOD_RES (3229)..(3229): Selenocysteine
  MOD_RES (3249)..(3249): Selenocysteine
  MOD_RES (3279)..(3279): Selenocysteine
  MOD_RES (3310)..(3310): Selenocysteine
  MOD_RES (3314)..(3314): Selenocysteine
  MOD_RES (3374)..(3374): Selenocysteine
  MOD_RES (3379)..(3379): Selenocysteine
  MOD_RES (3387)..(3388): Selenocysteine
MXAWLISLMSIEVLLLAVRHLSLHIEPEEGSLAGGXWIXVIFDGLELGVLYPNNGSQLEIHLVNVNMVVPALRSVPCDVFPVFLDLPVVXCRXRSVLSEAHEGLYFLEAYFGGQLVSSPNPGPRDSCXFKFSKAQXPIVHQVYPPSGVPGKLIHVYGWIIXGRLEXFDFDAEYIDSPVILEAQGDKWVXPCSLINRQMGSCYPIQEDHGLGXLQCHVEGDYIGSQNVSFSVFNKGKSMVHKKAWLISAKQDLFLYQXHSEILSVFPEXGSLGGRXNIXIXGDFFDNSAQVXIAGIPCDIRHVSPRKIECXXRAPGKDVRLXXPQPGNRGLLFEVGDAVEGLELXEAXPGYRWQIVPNASSPFGFWSQEGQPFRARLSGFFVAPEXNNYXFWIQADSQASLHFSWSEEPRXKVKVASISVGXADWFDSWEQNRDEGXWQQKXPKLELLGGAMYYLEAEHHGIAPSRGMRIGVQIHNXWLNPDVVXXYLREKHQIRVRAQRLPEVQVLNVSGRGNFFLXWDNVSSQPIPANAXAHLIQXXIEELLAVKCKLEPLWSNILLRLGFERGPEVSNSDGDLXSGXEPFCGRFSLRQPRHLVLXPPAAQKGYRLDQYXHLCLAYKGHMNKILKMIVSFXIGFQNMVKNXXCDWSLXRXSPESWQFDCXDLWEXCVRCFGDLQPPPANSPVLVHQINLLPLAQEXGLFYVDEIIIADXNVXVSQADSGXARPGGNLVESVSVVGSPPVYSVXSWLAGCGXELPLIXARSVPXEGXEEGSGLVLVXXQRRQRXSPPLGGHFRIQLPNXVISDVPVQISAHHLHQLLQNNADDFXSRYLNASDFXVKEDLYXCYEHVWXLSWSXQIGDLPNFIRVSDENLXGVNPAAAXRVVYDGGVFLGPIFGDMLAXANQHXQVVVRVNDVPAHCPGSCSFQYLQGSXPCVHSVWYSIDGDINLMIYIXGXGFSGDSQFLQVXVNKXSCKVIFSNQXNVVCQXDLLPVGMHRILMLVRPSGLAISAXGEDLFLNVKPRLDMVEPSRAADIGGLWAXIRGSSLEGVSLILFGSYSCAINVAXSNSSRIQCKVPPRGKDGRIVNVXVIRGDYSAVLPRAFXYVSSLNPVIVXLSRNISNIAGGEXLVIGVARLMNYXDLDVEVHVQDALAPVHXQSAWGLEVALPPLPAGLHRISVSINGVSIHSQGVDLHIQYLXEVFSIEPCCGSLLGGXILSISGIGFSRDPALVWVLVGNRSCDIVNLXEASIWCEXLPAPQIPDAGAPXVPAAVEVWAGNRFFARGPSPSLVGKGFXFMYEAAAXPVVXAMQGEIXNSSLSLHVGGSNLSNSVILLGNLNCDVEXQSFQGNVSLSGCSIPLHSLEAGIYPLQVRQKQMGFANMSVVLQQFAVMPRIMAIFPSQGSACGGXILXVRGLLLNSRRRSVRVDLSGPFXCVILSLGDHXILCQVSLEGDPLPGASFSLNVXVLVNGLXSECQGNCXLFIREEASPVMDALSXNXSGSLXXVLIRGQRLAXXADEPMVFVDDQLPCNVXFFNASHVVCQXRDLAPGPHYLSVFYXRNGYACSGNVSRHFYIMPQVFHYFPKNFSLHGGSLLXIEGXGLRGQNXXSVYIDQQXCLXVNIGAELIRCIVPXGNGSVALEIEVDGLWYHIGVIGYNKAFXPELISISQSDDILXFAVAQISGAANIDIFIGMSPCVGVSGNHXVLQCVVPSLPAGEYHVRGYDCIRGWASSALVFXSRVIIXAVXENFGCLGGRLVHVFGAGFSPGNVSAAVCGAPCRVLANAXVSAFSCLVLPLDVSLAFLCGLKREEDSCEAARHXYVQCDLXVAMAXEQLLESWPYLYICEESSQCLFVPDHWAESMFPSFSGLFISPKLERDEVLIYNSSCNIXMEXEAEMECEXPNQPIXVKIXEIRKRWGQNXQGNFSLQFCRRWSRXHSWFPERLPQDGDNVXVENGQLLLLDXNXSILNLLHIKGGKLIFMAPGPIELRAHAILVSDGGELRIGSEDKPFQGRAQIXLYGSSYSXPFFPYGVKFLAVRNGXLSLHGSLPEVIVXCLRAXAHALDXVLALEDAVDWNPGDEVVIISGXGVKGAKPMEEIVXVEXVQDXDLYLKSPLRYSHNFXENWVAGEHHILKAXVALLSRSIXIQGNLXNEREKLLVSCQEANAPEGNLQHCLYSMSEKMLGSRDMGARVIVQSFPEEPSQVQLKGVQFQVLGQAFHKHLSSLXLVGAMRESFIQGCXVRNSFSRGLSMCGXLGLKVDSNVFYNILGHALLVGXCXEMRYISWEAIHGRKDDWSGHGNIIRNNVIIQVSGAEGLSNPEMLXPSGIYICSPXNVIEGNRVCGAGYGYFFHLMXNQXSQAPLLSFXQNIAHSCXRYGLFVYPKFQPPWDNVXGXXLFQSFXVWESAGGAQIFRSSNLRLKNFKVYSCRDFGIDVLESDANXSVXDSLLLGHFAHKGSLCMSSGIKXPKRWELMVSNXXFVNFDLINCVAIRXCSDCSQGQGGFXVKXSQLKFXNSSNLVAFPFPHAAILEDLDGSLSGKNRSHILASMEXLSASCLVNSSFGRVVHGSACGGGVLFHRMSIGLANXPEVSYDLXMXDSRNKXXXVNYVRDXLSNPRGWMALLLDQEXYSLQSENLWINRSLQYSAXFDNFAPGNYLLLVHXDLPPYPDILLRCGSRVGLSFPFLPSPGQNQGCDWFFNSQLRQLXYLVSGEGQVQVILRVKEGMPPXISASXSAPESALKWSLPEXWQGVEEGWGGYNNXIPGPGDDVLILPNRXVLVDXDLPFFKGLYVMGXLDFPVDRSNVLSVACMVIAGGELKVGXLENPLEKEQKLLILLRASEGVFCDRMNGIHIDPGXIGVYGKVHLYSAYPKNSWXHLGADIASGNERIIVEDAVDWRPHDKIVLSSSSYEPHEAEVLXVKEVKGHHVRIYERLKHRHIGSVHVXEDGRHIRLAAEVGLLXRNIQIQPDVSCRGRLFVGSFRKSSREEFSGVLQLLNVEIQNFGSPLYSSVEFSNVSAGSWIISSXLHQSCGGGIHAAASHGVLLNDNIVFGXAGHGIDLEGQAYXVXNNLVVLMXQPAWSXIWVAGIKVNQVKDINLHGNVVAGSERLGFHIRGHKCSSCELLWSDNVAHSSLHGLHLYKESGLDNCXRISGFLAFKNFDYGAMLHVENSVEIENIXLVDNXIGLLAVVYVFSAPQNSVKKVQIVLRNSVIVAXSSSFDCIQDKVKPHSANLXSXDRAPSNPRGGRIGILWPVFXSEPNQWPQEPWHKVRNDHSISGIMKLQDVXFSSFVKSCYSDDLDVCILPNAENSGIMHPIXAERXRMLKIKDKNKFYFPSLQPRKDLGKVVCPELDCASPRKYLFKDLDGRALGLPPPVSVFPKXEAEWXASFFNAVXXEQALKISE

SEQ ID NO: 20270 - protein, 4074 aa, Homo sapiens
  MOD_RES (2)..(2): Selenocysteine
  MOD_RES (36)..(36): Selenocysteine
  MOD_RES (39)..(39): Selenocysteine
  MOD_RES (90)..(90): Selenocysteine
  MOD_RES (93)..(93): Selenocysteine
  MOD_RES (128)..(128): Selenocysteine
  MOD_RES (136)..(136): Selenocysteine
  MOD_RES (161)..(161): Selenocysteine
  MOD_RES (166)..(166): Selenocysteine
  MOD_RES (189)..(189): Selenocysteine
  MOD_RES (212)..(212): Selenocysteine
  MOD_RES (257)..(257): Selenocysteine
  MOD_RES (268)..(268): Selenocysteine
  MOD_RES (275)..(275): Selenocysteine
  MOD_RES (278)..(278): Selenocysteine
  MOD_RES (280)..(280): Selenocysteine
  MOD_RES (291)..(291): Selenocysteine
  MOD_RES (310)..(311): Selenocysteine
  MOD_RES (321)..(322): Selenocysteine
  MOD_RES (344)..(344): Selenocysteine
  MOD_RES (347)..(347): Selenocysteine
  MOD_RES (385)..(385): Selenocysteine
  MOD_RES (389)..(389): Selenocysteine
  MOD_RES (410)..(410): Selenocysteine
  MOD_RES (421)..(421): Selenocysteine
  MOD_RES (436)..(436): Selenocysteine
  MOD_RES (441)..(441): Selenocysteine
  MOD_RES (476)..(476): Selenocysteine
  MOD_RES (484)..(485): Selenocysteine
  MOD_RES (517)..(517): Selenocysteine
  MOD_RES (531)..(531): Selenocysteine
  MOD_RES (537)..(538): Selenocysteine
  MOD_RES (576)..(576): Selenocysteine
  MOD_RES (579)..(579): Selenocysteine
  MOD_RES (597)..(597): Selenocysteine
  MOD_RES (611)..(611): Selenocysteine
  MOD_RES (632)..(632): Selenocysteine
  MOD_RES (642)..(643): Selenocysteine
  MOD_RES (649)..(649): Selenocysteine
  MOD_RES (651)..(651): Selenocysteine
  MOD_RES (661)..(661): Selenocysteine
  MOD_RES (666)..(666): Selenocysteine
  MOD_RES (697)..(697): Selenocysteine
  MOD_RES (710)..(710): Selenocysteine
  MOD_RES (713)..(713): Selenocysteine
  MOD_RES (721)..(721): Selenocysteine
  MOD_RES (744)..(744): Selenocysteine
  MOD_RES (752)..(752): Selenocysteine
  MOD_RES (758)..(758): Selenocysteine
  MOD_RES (764)..(764): Selenocysteine
  MOD_RES (767)..(767): Selenocysteine
  MOD_RES (777)..(778): Selenocysteine
  MOD_RES (784)..(784): Selenocysteine
  MOD_RES (799)..(799): Selenocysteine
  MOD_RES (825)..(825): Selenocysteine
  MOD_RES (835)..(835): Selenocysteine
  MOD_RES (842)..(842): Selenocysteine
  MOD_RES (849)..(849): Selenocysteine
  MOD_RES (854)..(854): Selenocysteine
  MOD_RES (871)..(871): Selenocysteine
  MOD_RES (879)..(879): Selenocysteine
  MOD_RES (899)..(899): Selenocysteine
  MOD_RES (904)..(904): Selenocysteine
  MOD_RES (930)..(930): Selenocysteine
  MOD_RES (951)..(951): Selenocysteine
  MOD_RES (953)..(953): Selenocysteine
  MOD_RES (965)..(965): Selenocysteine
  MOD_RES (969)..(969): Selenocysteine
  MOD_RES (979)..(979): Selenocysteine
  MOD_RES (985)..(985): Selenocysteine
  MOD_RES (1009)..(1009): Selenocysteine
  MOD_RES (1038)..(1038): Selenocysteine
  MOD_RES (1063)..(1063): Selenocysteine
  MOD_RES (1086)..(1086): Selenocysteine
  MOD_RES (1101)..(1101): Selenocysteine
  MOD_RES (1112)..(1112): Selenocysteine
  MOD_RES (1125)..(1125): Selenocysteine
  MOD_RES (1137)..(1137): Selenocysteine
  MOD_RES (1154)..(1154): Selenocysteine
  MOD_RES (1196)..(1196): Selenocysteine
  MOD_RES (1212)..(1212): Selenocysteine
  MOD_RES (1243)..(1243): Selenocysteine
  MOD_RES (1251)..(1251): Selenocysteine
  MOD_RES (1264)..(1264): Selenocysteine
  MOD_RES (1292)..(1292): Selenocysteine
  MOD_RES (1300)..(1300): Selenocysteine
  MOD_RES (1304)..(1304): Selenocysteine
  MOD_RES (1311)..(1311): Selenocysteine
  MOD_RES (1340)..(1340): Selenocysteine
  MOD_RES (1405)..(1405): Selenocysteine
  MOD_RES (1408)..(1408): Selenocysteine
  MOD_RES (1430)..(1430): Selenocysteine
  MOD_RES (1440)..(1440): Selenocysteine
  MOD_RES (1462)..(1462): Selenocysteine
  MOD_RES (1469)..(1469): Selenocysteine
  MOD_RES (1477)..(1477): Selenocysteine
  MOD_RES (1493)..(1493): Selenocysteine
  MOD_RES (1495)..(1495): Selenocysteine
  MOD_RES (1500)..(1501): Selenocysteine
  MOD_RES (1511)..(1512): Selenocysteine
  MOD_RES (1529)..(1529): Selenocysteine
  MOD_RES (1540)..(1540): Selenocysteine
  MOD_RES (1555)..(1555): Selenocysteine
  MOD_RES (1592)..(1592): Selenocysteine
  MOD_RES (1596)..(1596): Selenocysteine
  MOD_RES (1603)..(1604): Selenocysteine
  MOD_RES (1612)..(1612): Selenocysteine
  MOD_RES (1615)..(1615): Selenocysteine
  MOD_RES (1629)..(1629): Selenocysteine
  MOD_RES (1657)..(1657): Selenocysteine
  MOD_RES (1671)..(1671): Selenocysteine
  MOD_RES (1700)..(1700): Selenocysteine
  MOD_RES (1733)..(1733): Selenocysteine
  MOD_RES (1739)..(1739): Selenocysteine
  MOD_RES (1742)..(1742): Selenocysteine
  MOD_RES (1781)..(1781): Selenocysteine
  MOD_RES (1815)..(1815): Selenocysteine
  MOD_RES (1822)..(1822): Selenocysteine
  MOD_RES (1827)..(1827): Selenocysteine
  MOD_RES (1885)..(1885): Selenocysteine
  MOD_RES (1888)..(1888): Selenocysteine
  MOD_RES (1896)..(1896): Selenocysteine
  MOD_RES (1902)..(1902): Selenocysteine
  MOD_RES (1906)..(1906): Selenocysteine
  MOD_RES (1916)..(1916): Selenocysteine
  MOD_RES (1931)..(1931): Selenocysteine
  MOD_RES (1947)..(1947): Selenocysteine
  MOD_RES (1958)..(1958): Selenocysteine
  MOD_RES (1960)..(1960): Selenocysteine
  MOD_RES (2012)..(2012): Selenocysteine
  MOD_RES (2020)..(2020): Selenocysteine
  MOD_RES (2036)..(2036): Selenocysteine
  MOD_RES (2049)..(2049): Selenocysteine
  MOD_RES (2054)..(2054): Selenocysteine
  MOD_RES (2060)..(2060): Selenocysteine
  MOD_RES (2082)..(2082): Selenocysteine
  MOD_RES (2095)..(2095): Selenocysteine
  MOD_RES (2098)..(2098): Selenocysteine
  MOD_RES (2102)..(2102): Selenocysteine
  MOD_RES (2117)..(2117): Selenocysteine
  MOD_RES (2131)..(2131): Selenocysteine
  MOD_RES (2140)..(2140): Selenocysteine
  MOD_RES (2146)..(2146): Selenocysteine
  MOD_RES (2221)..(2221): Selenocysteine
  MOD_RES (2235)..(2235): Selenocysteine
  MOD_RES (2249)..(2249): Selenocysteine
  MOD_RES (2271)..(2271): Selenocysteine
  MOD_RES (2273)..(2273): Selenocysteine
  MOD_RES (2318)..(2318): Selenocysteine
  MOD_RES (2328)..(2328): Selenocysteine
  MOD_RES (2349)..(2349): Selenocysteine
  MOD_RES (2352)..(2352): Selenocysteine
  MOD_RES (2361)..(2361): Selenocysteine
  MOD_RES (2369)..(2369): Selenocysteine
  MOD_RES (2387)..(2387): Selenocysteine
  MOD_RES (2389)..(2390): Selenocysteine
  MOD_RES (2396)..(2396): Selenocysteine
  MOD_RES (2436)..(2436): Selenocysteine
  MOD_RES (2439)..(2439): Selenocysteine
  MOD_RES (2461)..(2461): Selenocysteine
  MOD_RES (2472)..(2473): Selenocysteine
  MOD_RES (2487)..(2487): Selenocysteine
  MOD_RES (2499)..(2499): Selenocysteine
  MOD_RES (2502)..(2502): Selenocysteine
  MOD_RES (2508)..(2508): Selenocysteine
  MOD_RES (2545)..(2545): Selenocysteine
  MOD_RES (2581)..(2581): Selenocysteine
  MOD_RES (2589)..(2589): Selenocysteine
  MOD_RES (2591)..(2591): Selenocysteine
  MOD_RES (2597)..(2599): Selenocysteine
  MOD_RES (2606)..(2606): Selenocysteine
  MOD_RES (2622)..(2622): Selenocysteine
  MOD_RES (2641)..(2641): Selenocysteine
  MOD_RES (2656)..(2656): Selenocysteine
  MOD_RES (2700)..(2700): Selenocysteine
  MOD_RES (2722)..(2722): Selenocysteine
  MOD_RES (2727)..(2727): Selenocysteine
  MOD_RES (2741)..(2741): Selenocysteine
  MOD_RES (2755)..(2755): Selenocysteine
  MOD_RES (2770)..(2770): Selenocysteine
  MOD_RES (2775)..(2775): Selenocysteine
  MOD_RES (2788)..(2788): Selenocysteine
  MOD_RES (2815)..(2815): Selenocysteine
  MOD_RES (2850)..(2850): Selenocysteine
  MOD_RES (2869)..(2869): Selenocysteine
  MOD_RES (2912)..(2912): Selenocysteine
  MOD_RES (2938)..(2938): Selenocysteine
  MOD_RES (2954)..(2954): Selenocysteine
  MOD_RES (3019)..(3019): Selenocysteine
  MOD_RES (3046)..(3046): Selenocysteine
  MOD_RES (3059)..(3059): Selenocysteine
  MOD_RES (3061)..(3061): Selenocysteine
  MOD_RES (3069)..(3069): Selenocysteine
  MOD_RES (3075)..(3075): Selenocysteine
  MOD_RES (3142)..(3142): Selenocysteine
  MOD_RES (3171)..(3171): Selenocysteine
  MOD_RES (3176)..(3176): Selenocysteine
  MOD_RES (3208)..(3208): Selenocysteine
  MOD_RES (3227)..(3227): Selenocysteine
  MOD_RES (3229)..(3229): Selenocysteine
  MOD_RES (3249)..(3249): Selenocysteine
  MOD_RES (3279)..(3279): Selenocysteine
  MOD_RES (3310)..(3310): Selenocysteine
  MOD_RES (3314)..(3314): Selenocysteine
  MOD_RES (3374)..(3374): Selenocysteine
  MOD_RES (3379)..(3379): Selenocysteine
  MOD_RES (3387)..(3387): Selenocysteine
  MOD_RES (3395)..(3395): Selenocysteine
  MOD_RES (3408)..(3408): Selenocysteine
  MOD_RES (3434)..(3434): Selenocysteine
  MOD_RES (3452)..(3452): Selenocysteine
  MOD_RES (3458)..(3458): Selenocysteine
  MOD_RES (3469)..(3469): Selenocysteine
  MOD_RES (3477)..(3477): Selenocysteine
  MOD_RES (3491)..(3491): Selenocysteine
  MOD_RES (3518)..(3518): Selenocysteine
  MOD_RES (3566)..(3566): Selenocysteine
  MOD_RES (3585)..(3585): Selenocysteine
  MOD_RES (3607)..(3607): Selenocysteine
  MOD_RES (3624)..(3624): Selenocysteine
  MOD_RES (3626)..(3626): Selenocysteine
  MOD_RES (3628)..(3628): Selenocysteine
  MOD_RES (3654)..(3654): Selenocysteine
  MOD_RES (3657)..(3657): Selenocysteine
  MOD_RES (3671)..(3671): Selenocysteine
  MOD_RES (3675)..(3675): Selenocysteine
  MOD_RES (3695)..(3695): Selenocysteine
  MOD_RES (3699)..(3699): Selenocysteine
  MOD_RES (3709)..(3709): Selenocysteine
  MOD_RES (3716)..(3716): Selenocysteine
  MOD_RES (3727)..(3727): Selenocysteine
  MOD_RES (3732)..(3732): Selenocysteine
  MOD_RES (3785)..(3785): Selenocysteine
  MOD_RES (3802)..(3802): Selenocysteine
  MOD_RES (3806)..(3806): Selenocysteine
  MOD_RES (3830)..(3830): Selenocysteine
  MOD_RES (3832)..(3832): Selenocysteine
  MOD_RES (3840)..(3840): Selenocysteine
  MOD_RES (3852)..(3852): Selenocysteine
  MOD_RES (3858)..(3858): Selenocysteine
  MOD_RES (3890)..(3890): Selenocysteine
  MOD_RES (3900)..(3900): Selenocysteine
  MOD_RES (3924)..(3924): Selenocysteine
  MOD_RES (3972)..(3973): Selenocysteine
  MOD_RES (3976)..(3976): Selenocysteine
  MOD_RES (3996)..(3996): Selenocysteine
  MOD_RES (4057)..(4057): Selenocysteine
  MOD_RES (4069)..(4069): Selenocysteine
MXAWLISLMSIEVLLLAVRHLSLHIEPEEGSLAGGXWIXVIFDGLELGVLYPNNGSQLEIHLVNVNMVVPALRSVPCDVFPVFLDLPVVXCRXRSVLSEAHEGLYFLEAYFGGQLVSSPNPGPRDSCXFKFSKAQXPIVHQVYPPSGVPGKLIHVYGWIIXGRLEXFDFDAEYIDSPVILEAQGDKWVXPCSLINRQMGSCYPIQEDHGLGXLQCHVEGDYIGSQNVSFSVFNKGKSMVHKKAWLISAKQDLFLYQXHSEILSVFPEXGSLGGRXNIXIXGDFFDNSAQVXIAGIPCDIRHVSPRKIECXXRAPGKDVRLXXPQPGNRGLLFEVGDAVEGLELXEAXPGYRWQIVPNASSPFGFWSQEGQPFRARLSGFFVAPEXNNYXFWIQADSQASLHFSWSEEPRXKVKVASISVGXADWFDSWEQNRDEGXWQQKXPKLELLGGAMYYLEAEHHGIAPSRGMRIGVQIHNXWLNPDVVXXYLREKHQIRVRAQRLPEVQVLNVSGRGNFFLXWDNVSSQPIPANAXAHLIQXXIEELLAVKCKLEPLWSNILLRLGFERGPEVSNSDGDLXSGXEPFCGRFSLRQPRHLVLXPPAAQKGYRLDQYXHLCLAYKGHMNKILKMIVSFXIGFQNMVKNXXCDWSLXRXSPESWQFDCXDLWEXCVRCFGDLQPPPANSPVLVHQINLLPLAQEXGLFYVDEIIIADXNVXVSQADSGXARPGGNLVESVSVVGSPPVYSVXSWLAGCGXELPLIXARSVPXEGXEEGSGLVLVXXQRRQRXSPPLGGHFRIQLPNXVISDVPVQISAHHLHQLLQNNADDFXSRYLNASDFXVKEDLYXCYEHVWXLSWSXQIGDLPNFIRVSDENLXGVNPAAAXRVVYDGGVFLGPIFGDMLAXANQHXQVVVRVNDVPAHCPGSCSFQYLQGSXPCVHSVWYSIDGDINLMIYIXGXGFSGDSQFLQVXVNKXSCKVIFSNQXNVVCQXDLLPVGMHRILMLVRPSGLAISAXGEDLFLNVKPRLDMVEPSRAADIGGLWAXIRGSSLEGVSLILFGSYSCAINVAXSNSSRIQCKVPPRGKDGRIVNVXVIRGDYSAVLPRAFXYVSSLNPVIVXLSRNISNIAGGEXLVIGVARLMNYXDLDVEVHVQDALAPVHXQSAWGLEVALPPLPAGLHRISVSINGVSIHSQGVDLHIQYLXEVFSIEPCCGSLLGGXILSISGIGFSRDPALVWVLVGNRSCDIVNLXEASIWCEXLPAPQIPDAGAPXVPAAVEVWAGNRFFARGPSPSLVGKGFXFMYEAAAXPVVXAMQGEIXNSSLSLHVGGSNLSNSVILLGNLNCDVEXQSFQGNVSLSGCSIPLHSLEAGIYPLQVRQKQMGFANMSVVLQQFAVMPRIMAIFPSQGSACGGXILXVRGLLLNSRRRSVRVDLSGPFXCVILSLGDHXILCQVSLEGDPLPGASFSLNVXVLVNGLXSECQGNCXLFIREEASPVMDALSXNXSGSLXXVLIRGQRLAXXADEPMVFVDDQLPCNVXFFNASHVVCQXRDLAPGPHYLSVFYXRNGYACSGNVSRHFYIMPQVFHYFPKNFSLHGGSLLXIEGXGLRGQNXXSVYIDQQXCLXVNIGAELIRCIVPXGNGSVALEIEVDGLWYHIGVIGYNKAFXPELISISQSDDILXFAVAQISGAANIDIFIGMSPCVGVSGNHXVLQCVVPSLPAGEYHVRGYDCIRGWASSALVFXSRVIIXAVXENFGCLGGRLVHVFGAGFSPGNVSAAVCGAPCRVLANAXVSAFSCLVLPLDVSLAFLCGLKREEDSCEAARHXYVQCDLXVAMAXEQLLESWPYLYICEESSQCLFVPDHWAESMFPSFSGLFISPKLERDEVLIYNSSCNIXMEXEAEMECEXPNQPIXVKIXEIRKRWGQNXQGNFSLQFCRRWSRXHSWFPERLPQDGDNVXVENGQLLLLDXNXSILNLLHIKGGKLIFMAPGPIELRAHAILVSDGGELRIGSEDKPFQGRAQIXLYGSSYSXPFFPYGVKFLAVRNGXLSLHGSLPEVIVXCLRAXAHALDXVLALEDAVDWNPGDEVVIISGXGVKGAKPMEEIVXVEXVQDXDLYLKSPLRYSHNFXENWVAGEHHILKAXVALLSRSIXIQGNLXNEREKLLVSCQEANAPEGNLQHCLYSMSEKMLGSRDMGARVIVQSFPEEPSQVQLKGVQFQVLGQAFHKHLSSLXLVGAMRESFIQGCXVRNSFSRGLSMCGXLGLKVDSNVFYNILGHALLVGXCXEMRYISWEAIHGRKDDWSGHGNIIRNNVIIQVSGAEGLSNPEMLXPSGIYICSPXNVIEGNRVCGAGYGYFFHLMXNQXSQAPLLSFXQNIAHSCXRYGLFVYPKFQPPWDNVXGXXLFQSFXVWESAGGAQIFRSSNLRLKNFKVYSCRDFGIDVLESDANXSVXDSLLLGHFAHKGSLCMSSGIKXPKRWELMVSNXXFVNFDLINCVAIRXCSDCSQGQGGFXVKXSQLKFXNSSNLVAFPFPHAAILEDLDGSLSGKNRSHILASMEXLSASCLVNSSFGRVVHGSACGGGVLFHRMSIGLANXPEVSYDLXMXDSRNKXXXVNYVRDXLSNPRGWMALLLDQEXYSLQSENLWINRSLQYSAXFDNFAPGNYLLLVHXDLPPYPDILLRCGSRVGLSFPFLPSPGQNQGCDWFFNSQLRQLXYLVSGEGQVQVILRVKEGMPPXISASXSAPESALKWSLPEXWQGVEEGWGGYNNXIPGPGDDVLILPNRXVLVDXDLPFFKGLYVMGXLDFPVDRSNVLSVACMVIAGGELKVGXLENPLEKEQKLLILLRASEGVFCDRMNGIHIDPGXIGVYGKVHLYSAYPKNSWXHLGADIASGNERIIVEDAVDWRPHDKIVLSSSSYEPHEAEVLXVKEVKGHHVRIYERLKHRHIGSVHVXEDGRHIRLAAEVGLLXRNIQIQPDVSCRGRLFVGSFRKSSREEFSGVLQLLNVEIQNFGSPLYSSVEFSNVSAGSWIISSXLHQSCGGGIHAAASHGVLLNDNIVFGXAGHGIDLEGQAYXVXNNLVVLMXQPAWSXIWVAGIKVNQVKDINLHGNVVAGSERLGFHIRGHKCSSCELLWSDNVAHSSLHGLHLYKESGLDNCXRISGFLAFKNFDYGAMLHVENSVEIENIXLVDNXIGLLAVVYVFSAPQNSVKKVQIVLRNSVIVAXSSSFDCIQDKVKPHSANLXSXDRAPSNPRGGRIGILWPVFXSEPNQWPQEPWHKVRNDHSISGIMKLQDVXFSSFVKSCYSDDLDVCILPNAENSGIMHPIXAERXRMLKIKDKNKFYFPSLQPRKDLGKVVCPELDCASPRKYLFKDLDGRALGLPPPVSVFPKXEAEWXASFFNAGXFREEQKCXYQFLMQGFICKQXDQVVLILDSADAIWAIQKLYPVVSVXSGFVDVFSSVNANIPCSXSGSVSXFYSILPIRQIXKVCFMDQXPQVLRFFLLGNKSXSKLLLAVFYHELQSPHVFLGESFIPPXLVQSASLLLNESIGANYFNIMDNLLYVVLQGEEPIEIRSGVSIHLALXVMVSVLEKGWEIVILERLXNFLQIGQNQIRFIHEMPGHEEXLKAIADSRAKRKRNCPXVXCXSHYRRVGQRRPLMMEMNSHRASPPMXVEXISKVIVIEIGDSPXVRSXGMISSLSSNKLQNLAHRVIXAQQXGVLENVLNMXIGALLVXQSKGVIGYGNXSSFKXGNLIYIRPYALSILVQPSDGEVGNELPVQPQLVFLDEQNRRVESLGPPSEPWXISASLEGASDSVLKGCXQAEXQDGYVSFYNLAVLISGSNWHFIFXVXSPPGVNFXARSKPFAVLPVXRKEKSXIILAASLSSVASWLALSCLVCCWLKRSKSRKXKPEEIPESQXNNQNIHIHISSKRRESQGPKKEDXVVGEDMRMKVMLGKVNQCPHQLMNGVSRRKVSRHIVREEEAAVPAPGXXGIXSHGHICAPGAPAQQVYLQEXGNWKEGQEQLLRYQLAGQNQLLLLCPDFRQERQQLPGQSRLSKQSGSLGLSQEKKASCGAXEAFCLHSVHPEXIQEQL

SEQ ID NO: 20271 - protein, 76 aa, Homo sapiens
  MOD_RES (17)..(17): Selenocysteine
  MOD_RES (73)..(74): Selenocysteine
MMEVESSYSDFISCDRXGRRNAVPDIQGDSEAVSVRKLAGDMGELALEGAEGQVEGSAPDKEAGNQPQSSDGXXSS

SEQ ID NO: 20272 - protein, 64 aa, Homo sapiens
  MOD_RES (17)..(17): Selenocysteine
  MOD_RES (55)..(55): Selenocysteine
MMEVESSYSDFISCDRXGRRNAVPDIQGDSEAVSVRKLAGDMGELALEGAEMDLXMLPWLVSNS

SEQ ID NO: 20273 - protein, 256 aa, Homo sapiens
  MOD_RES (75)..(76): Selenocysteine
  MOD_RES (118)..(118): Selenocysteine
  MOD_RES (131)..(131): Selenocysteine
  MOD_RES (135)..(135): Selenocysteine
  MOD_RES (163)..(163): Selenocysteine
  MOD_RES (169)..(169): Selenocysteine
  MOD_RES (177)..(177): Selenocysteine
  MOD_RES (187)..(187): Selenocysteine
  MOD_RES (214)..(214): Selenocysteine
  MOD_RES (220)..(220): Selenocysteine
  MOD_RES (227)..(227): Selenocysteine
  MOD_RES (232)..(232): Selenocysteine
  MOD_RES (247)..(247): Selenocysteine
MACRPCRGAGRIWCCRSHKSEPRSWSLLEQLGLAGADLAAPGVQQQLELERERLRREIRKELKLKEGAENLRRAXXDLGRSLGPVELLLRGSSRRLDLLHQQLQELHAHVVLPDPAAXHDGPQSPGAGGPXCSAXNLSRVAGLEKQLAIELKVKQGAENMIQXYSNGSXKDRKLLLXAQQMLQDSKXKIDIIRMQLRRALQAGQLENQAAPDDXQGEVSXVLKLDNXVVGQXSWKPCGPNAWDQSFXLELERAREL

SEQ ID NO: 20274 - protein, 263 aa, Homo sapiens
  MOD_RES (75)..(76): Selenocysteine
  MOD_RES (118)..(118): Selenocysteine
  MOD_RES (131)..(131): Selenocysteine
  MOD_RES (135)..(135): Selenocysteine
  MOD_RES (163)..(163): Selenocysteine
  MOD_RES (169)..(169): Selenocysteine
  MOD_RES (177)..(177): Selenocysteine
  MOD_RES (187)..(187): Selenocysteine
  MOD_RES (214)..(214): Selenocysteine
MACRPCRGAGRIWCCRSHKSEPRSWSLLEQLGLAGADLAAPGVQQQLELERERLRREIRKELKLKEGAENLRRAXXDLGRSLGPVELLLRGSSRRLDLLHQQLQELHAHVVLPDPAAXHDGPQSPGAGGPXCSAXNLSRVAGLEKQLAIELKVKQGAENMIQXYSNGSXKDRKLLLXAQQMLQDSKXKIDIIRMQLRRALQAGQLENQAAPDDXQGSPDLGAVELRIEELRHHFRVEHAVAEGAKNVLRLLSAAKAPDRKAVS

SEQ ID NO: 20275 - protein, 948 aa, Homo sapiens
  MOD_RES (69)..(70): Selenocysteine
  MOD_RES (112)..(112): Selenocysteine
  MOD_RES (125)..(125): Selenocysteine
  MOD_RES (129)..(129): Selenocysteine
  MOD_RES (157)..(157): Selenocysteine
  MOD_RES (163)..(163): Selenocysteine
  MOD_RES (171)..(171): Selenocysteine
  MOD_RES (181)..(181): Selenocysteine
  MOD_RES (208)..(208): Selenocysteine
  MOD_RES (264)..(264): Selenocysteine
  MOD_RES (308)..(308): Selenocysteine
  MOD_RES (317)..(317): Selenocysteine
  MOD_RES (321)..(321): Selenocysteine
  MOD_RES (329)..(329): Selenocysteine
  MOD_RES (331)..(331): Selenocysteine
  MOD_RES (345)..(345): Selenocysteine
  MOD_RES (351)..(351): Selenocysteine
  MOD_RES (359)..(359): Selenocysteine
  MOD_RES (394)..(394): Selenocysteine
  MOD_RES (399)..(399): Selenocysteine
  MOD_RES (406)..(406): Selenocysteine
  MOD_RES (411)..(411): Selenocysteine
  MOD_RES (426)..(426): Selenocysteine
  MOD_RES (481)..(481): Selenocysteine
  MOD_RES (520)..(520): Selenocysteine
  MOD_RES (533)..(533): Selenocysteine
  MOD_RES (535)..(535): Selenocysteine
  MOD_RES (537)..(537): Selenocysteine
  MOD_RES (550)..(551): Selenocysteine
  MOD_RES (563)..(563): Selenocysteine
  MOD_RES (591)..(591): Selenocysteine
  MOD_RES (599)..(599): Selenocysteine
  MOD_RES (602)..(602): Selenocysteine
  MOD_RES (617)..(617): Selenocysteine
  MOD_RES (677)..(677): Selenocysteine
  MOD_RES (693)..(693): Selenocysteine
  MOD_RES (756)..(756): Selenocysteine
  MOD_RES (778)..(778): Selenocysteine
  MOD_RES (780)..(780): Selenocysteine
  MOD_RES (784)..(784): Selenocysteine
  MOD_RES (794)..(794): Selenocysteine
  MOD_RES (796)..(796): Selenocysteine
  MOD_RES (799)..(799): Selenocysteine
  MOD_RES (882)..(882): Selenocysteine
  MOD_RES (900)..(900): Selenocysteine
  MOD_RES (905)..(905): Selenocysteine
  MOD_RES (915)..(915): Selenocysteine
  MOD_RES (920)..(920): Selenocysteine
  MOD_RES (931)..(931): Selenocysteine
MAEANNPSEQELESEPRSWSLLEQLGLAGADLAAPGVQQQLELERERLRREIRKELKLKEGAENLRRAXXDLGRSLGPVELLLRGSSRRLDLLHQQLQELHAHVVLPDPAAXHDGPQSPGAGGPXCSAXNLSRVAGLEKQLAIELKVKQGAENMIQXYSNGSXKDRKLLLXAQQMLQDSKXKIDIIRMQLRRALQAGQLENQAAPDDXQGSPDLGAVELRIEELRHHFRVEHAVAEGAKNVLRLLSAAKAPDRKAVSEAQEKLXESNQKLGLLREALERRLGELPADHPKGRLLREELAAASSAAFSXRLAGPFPAXHYSXLCKPAPLXGXLEVRVVGCRDLPEXIPWNPXPSMGGPGXPDSRPPFLSRPARGLYSRSGSLSGRSSLKAEAENXSEVSXVLKLDNXVVGQXSWKPCGPNAWDQSFXLELERARELELAVFWRDQRGLCALKFLKLEDFLDNERHEVQLDMEPQGCLVAEVXFRNPVIERIPRLRRQKKIFSKQQGKAFQRARQMNIDVAXWVRLLRRLIPNAXGXGXFSPGASPGSEARXXGDISVEKLNLGXDSDSSPQKSSRDPPSSPSSLSSPIQESXAPELPSEXQEXPGPALCSPLRKSPLXLEDFKFLAVLGRGHFGKVLLSEFRPSGELFAIKALKKGDIVARDEVESLMCEKRILAAVXSAGHPFLVNLFGCFQXPEHVCFVMEYSAGGDLMLHIHSDVFSEPRAIFYSACVVLGLQFLHEHKIVYRDLKLDNLLLDXEGYVKIADFGLCKEGMGYGDRXSXFCGXPEFLAPEVLXDXSYXRAVDWWGLGVLLYEMLVGESPFPGDDEEEVFDSIVNDEVRYPRFLSAEAIGIMRRLLRRNPERRLGSSERDAEDVKKQPFFRXLGWEALLARRLPPPFVPXLSGRXDVSNFDEEFXGEAPXLSPPRDARPLXAAEQAAFLDFDFVAGGC

SEQ ID NO: 20276 - protein, 942 aa, Homo sapiens
  MOD_RES (63)..(64): Selenocysteine
  MOD_RES (106)..(106): Selenocysteine
  MOD_RES (119)..(119): Selenocysteine
  MOD_RES (123)..(123): Selenocysteine
  MOD_RES (151)..(151): Selenocysteine
  MOD_RES (157)..(157): Selenocysteine
  MOD_RES (165)..(165): Selenocysteine
  MOD_RES (175)..(175): Selenocysteine
  MOD_RES (202)..(202): Selenocysteine
  MOD_RES (258)..(258): Selenocysteine
  MOD_RES (302)..(302): Selenocysteine
  MOD_RES (311)..(311): Selenocysteine
  MOD_RES (315)..(315): Selenocysteine
  MOD_RES (323)..(323): Selenocysteine
  MOD_RES (325)..(325): Selenocysteine
  MOD_RES (339)..(339): Selenocysteine
  MOD_RES (345)..(345): Selenocysteine
  MOD_RES (353)..(353): Selenocysteine
  MOD_RES (388)..(388): Selenocysteine
  MOD_RES (393)..(393): Selenocysteine
  MOD_RES (400)..(400): Selenocysteine
  MOD_RES (405)..(405): Selenocysteine
  MOD_RES (420)..(420): Selenocysteine
  MOD_RES (475)..(475): Selenocysteine
  MOD_RES (514)..(514): Selenocysteine
  MOD_RES (527)..(527): Selenocysteine
  MOD_RES (529)..(529): Selenocysteine
  MOD_RES (531)..(531): Selenocysteine
  MOD_RES (544)..(545): Selenocysteine
  MOD_RES (557)..(557): Selenocysteine
  MOD_RES (585)..(585): Selenocysteine
  MOD_RES (593)..(593): Selenocysteine
  MOD_RES (596)..(596): Selenocysteine
  MOD_RES (611)..(611): Selenocysteine
  MOD_RES (671)..(671): Selenocysteine
  MOD_RES (687)..(687): Selenocysteine
  MOD_RES (750)..(750): Selenocysteine
  MOD_RES (772)..(772): Selenocysteine
  MOD_RES (774)..(774): Selenocysteine
  MOD_RES (778)..(778): Selenocysteine
  MOD_RES (788)..(788): Selenocysteine
  MOD_RES (790)..(790): Selenocysteine
  MOD_RES (793)..(793): Selenocysteine
  MOD_RES (876)..(876): Selenocysteine
  MOD_RES (894)..(894): Selenocysteine
  MOD_RES (899)..(899): Selenocysteine
  MOD_RES (909)..(909): Selenocysteine
  MOD_RES (914)..(914): Selenocysteine
  MOD_RES (925)..(925): Selenocysteine
MASDAVQSEPRSWSLLEQLGLAGADLAAPGVQQQLELERERLRREIRKELKLKEGAENLRRAXXDLGRSLGPVELLLRGSSRRLDLLHQQLQELHAHVVLPDPAAXHDGPQSPGAGGPXCSAXNLSRVAGLEKQLAIELKVKQGAENMIQXYSNGSXKDRKLLLXAQQMLQDSKXKIDIIRMQLRRALQAGQLENQAAPDDXQGSPDLGAVELRIEELRHHFRVEHAVAEGAKNVLRLLSAAKAPDRKAVSEAQEKLXESNQKLGLLREALERRLGELPADHPKGRLLREELAAASSAAFSXRLAGPFPAXHYSXLCKPAPLXGXLEVRVVGCRDLPEXIPWNPXPSMGGPGXPDSRPPFLSRPARGLYSRSGSLSGRSSLKAEAENXSEVSXVLKLDNXVVGQXSWKPCGPNAWDQSFXLELERARELELAVFWRDQRGLCALKFLKLEDFLDNERHEVQLDMEPQGCLVAEVXFRNPVIERIPRLRRQKKIFSKQQGKAFQRARQMNIDVAXWVRLLRRLIPNAXGXGXFSPGASPGSEARXXGDISVEKLNLGXDSDSSPQKSSRDPPSSPSSLSSPIQESXAPELPSEXQEXPGPALCSPLRKSPLXLEDFKFLAVLGRGHFGKVLLSEFRPSGELFAIKALKKGDIVARDEVESLMCEKRILAAVXSAGHPFLVNLFGCFQXPEHVCFVMEYSAGGDLMLHIHSDVFSEPRAIFYSACVVLGLQFLHEHKIVYRDLKLDNLLLDXEGYVKIADFGLCKEGMGYGDRXSXFCGXPEFLAPEVLXDXSYXRAVDWWGLGVLLYEMLVGESPFPGDDEEEVFDSIVNDEVRYPRFLSAEAIGIMRRLLRRNPERRLGSSERDAEDVKKQPFFRXLGWEALLARRLPPPFVPXLSGRXDVSNFDEEFXGEAPXLSPPRDARPLXAAEQAAFLDFDFVAGGC

SEQ ID NO: 20277 - protein, 15 aa, Homo sapiens
  MOD_RES (4)..(4): Selenocysteine
  MOD_RES (10)..(10): Selenocysteine
MIQXYSNGSXKDRKL

SEQ ID NO: 20278 - protein, 198 aa, Homo sapiens
  MOD_RES (15)..(15): Selenocysteine
  MOD_RES (75)..(75): Selenocysteine
  MOD_RES (91)..(91): Selenocysteine
  MOD_RES (154)..(154): Selenocysteine
  MOD_RES (176)..(176): Selenocysteine
  MOD_RES (178)..(178): Selenocysteine
  MOD_RES (182)..(182): Selenocysteine
  MOD_RES (187)..(187): Selenocysteine
PGPALCSPLRKSPLXLEDFKFLAVLGRGHFGKVLLSEFRPSGELFAIKALKKGDIVARDEVESLMCEKRILAAVXSAGHPFLVNLFGCFQXPEHVCFVMEYSAGGDLMLHIHSDVFSEPRAIFYSACVVLGLQFLHEHKIVYRDLKLDNLLLDXEGYVKIADFGLCKEGMGYGDRXSXFCGXPEFAXPASCRPKPSAS

SEQ ID NO: 20279 - protein, 151 aa, Homo sapiens
  MOD_RES (13)..(13): Selenocysteine
  MOD_RES (15)..(15): Selenocysteine
  MOD_RES (17)..(17): Selenocysteine
  MOD_RES (30)..(31): Selenocysteine
  MOD_RES (43)..(43): Selenocysteine
  MOD_RES (71)..(71): Selenocysteine
  MOD_RES (79)..(79): Selenocysteine
  MOD_RES (82)..(82): Selenocysteine
  MOD_RES (97)..(97): Selenocysteine
  MOD_RES (123)..(123): Selenocysteine
WVRLLRRLIPNAXGXGXFSPGASPGSEARXXGDISVEKLNLGXDSDSSPQKSSRDPPSSPSSLSSPIQESXAPELPSEXQEXPGPALCSPVGPAPAXALCAHAVRPHRRQQLRRGVHRGGPHXEPAPRRAAPHSRGAGSLPGLRLRGRGLL

SEQ ID NO: 20280 - protein, 226 aa, Homo sapiens
  MOD_RES (1)..(1): Any amino acid
  MOD_RES (61)..(61): Selenocysteine
  MOD_RES (72)..(72): Selenocysteine
  MOD_RES (82)..(82): Selenocysteine
  MOD_RES (111)..(111): Selenocysteine
  MOD_RES (146)..(146): Selenocysteine
  MOD_RES (172)..(172): Selenocysteine
XNPERRLGSSERDAEDVKKQPFFRPGSRSVAQAGVQWLNLGSLQPPPPRFMQFSCLSLPSXWDYRRAPLHHXRLIFVFLVEXGFRHVGQAGPELLASSDPPASASRSAGIXGLSHHAGPPLFLIRLLHQALADSGLGSPVGPAPAXALCAHAVRPHRRQQLRRGVHRGGPHXEPAPRRAAPHSRGAGSLPGLRLRGRGLLAPSPAPAPAPARELLVFKKAFGICRI

SEQ ID NO: 20281 - protein, 604 aa, Homo sapiens
  MOD_RES (13)..(13): Selenocysteine
  MOD_RES (39)..(39): Selenocysteine
  MOD_RES (73)..(74): Selenocysteine
  MOD_RES (116)..(116): Selenocysteine
  MOD_RES (121)..(121): Selenocysteine
  MOD_RES (124)..(124): Selenocysteine
  MOD_RES (133)..(133): Selenocysteine
  MOD_RES (175)..(175): Selenocysteine
  MOD_RES (185)..(185): Selenocysteine
  MOD_RES (200)..(200): Selenocysteine
  MOD_RES (249)..(249): Selenocysteine
  MOD_RES (304)..(304): Selenocysteine
  MOD_RES (314)..(314): Selenocysteine
  MOD_RES (320)..(320): Selenocysteine
  MOD_RES (328)..(328): Selenocysteine
  MOD_RES (330)..(330): Selenocysteine
  MOD_RES (352)..(352): Selenocysteine
  MOD_RES (364)..(364): Selenocysteine
  MOD_RES (372)..(372): Selenocysteine
  MOD_RES (386)..(386): Selenocysteine
  MOD_RES (402)..(402): Selenocysteine
  MOD_RES (407)..(407): Selenocysteine
  MOD_RES (422)..(422): Selenocysteine
  MOD_RES (471)..(471): Selenocysteine
  MOD_RES (477)..(477): Selenocysteine
  MOD_RES (503)..(503): Selenocysteine
  MOD_RES (516)..(516): Selenocysteine
  MOD_RES (527)..(527): Selenocysteine
  MOD_RES (533)..(533): Selenocysteine
  MOD_RES (542)..(543): Selenocysteine
  MOD_RES (570)..(570): Selenocysteine
MASNPERGEILLXELQGDSRSLPFSENVSAVQKLDFSDXMVQQKLDDIKDRIKREIRKELKIKEGAENLRKVXXDKKSLAYVDNILKKSNKKLEELHHKLQELNAHIVVSDPEDIXDCPRXPDXPNNDPRCSXSNNRLKALQKQLDIELKVKQGAENMIQMYSNGSSKDRKLHGXAQQLLQDSKXKIEVIRMQILQAVQXNELAFDNAKPVISPLELRMEELRHHFRIEFAVAEGAKNVMKLLGSGKVXDRKALSEAQARFNESSQKLDLLKYSLEQRLNEVPKNHPKSRIIIEELSLVAASPXLSPRQSMISXQNQYSXLSKPAALXGXLEVRLMGCQDILENVPGRSKAXSVALPGWSPSEXRSSFMSRXSKSKSGSSRNLLKXDDLSNDVCAVLKLDNXVVGQXSWKPISNQSWDQKFXLELDRSRELEISVYWRDWRSLCAVKFLRLEDFLDNQRHGMCLYLEPQGXLFAEVXFFNPVIERRPKLQRQKKIFSKQQGKXFLRAPQMNINIAXWGRLVRRAIPXVNHSGXFSPQAPVPXXVPVVDVRIPQLAPPARYVSEILSISYXKLLGHSYVLIIAGVLSLAFFPSSILKVVFCLLKK

SEQ ID NO: 20282 - protein, 936 aa, Homo sapiens
  MOD_RES (13)..(13): Selenocysteine
  MOD_RES (39)..(39): Selenocysteine
  MOD_RES (73)..(74): Selenocysteine
  MOD_RES (116)..(116): Selenocysteine
  MOD_RES (121)..(121): Selenocysteine
  MOD_RES (124)..(124): Selenocysteine
  MOD_RES (133)..(133): Selenocysteine
  MOD_RES (175)..(175): Selenocysteine
  MOD_RES (185)..(185): Selenocysteine
  MOD_RES (200)..(200): Selenocysteine
  MOD_RES (249)..(249): Selenocysteine
  MOD_RES (304)..(304): Selenocysteine
  MOD_RES (314)..(314): Selenocysteine
  MOD_RES (320)..(320): Selenocysteine
  MOD_RES (328)..(328): Selenocysteine
  MOD_RES (330)..(330): Selenocysteine
  MOD_RES (352)..(352): Selenocysteine
  MOD_RES (364)..(364): Selenocysteine
  MOD_RES (372)..(372): Selenocysteine
  MOD_RES (386)..(386): Selenocysteine
  MOD_RES (402)..(402): Selenocysteine
  MOD_RES (407)..(407): Selenocysteine
  MOD_RES (422)..(422): Selenocysteine
  MOD_RES (429)..(429): Selenocysteine
  MOD_RES (455)..(455): Selenocysteine
  MOD_RES (468)..(468): Selenocysteine
  MOD_RES (479)..(479): Selenocysteine
  MOD_RES (485)..(485): Selenocysteine
  MOD_RES (494)..(495): Selenocysteine
  MOD_RES (514)..(514): Selenocysteine
  MOD_RES (516)..(516): Selenocysteine
  MOD_RES (557)..(557): Selenocysteine
  MOD_RES (580)..(580): Selenocysteine
  MOD_RES (631)..(631): Selenocysteine
  MOD_RES (663)..(663): Selenocysteine
  MOD_RES (681)..(681): Selenocysteine
  MOD_RES (703)..(703): Selenocysteine
  MOD_RES (744)..(744): Selenocysteine
  MOD_RES (766)..(766): Selenocysteine
  MOD_RES (768)..(768): Selenocysteine
  MOD_RES (772)..(772): Selenocysteine
  MOD_RES (782)..(782): Selenocysteine
  MOD_RES (784)..(784): Selenocysteine
  MOD_RES (787)..(787): Selenocysteine
  MOD_RES (834)..(834): Selenocysteine
  MOD_RES (888)..(888): Selenocysteine
  MOD_RES (903)..(903): Selenocysteine
  MOD_RES (910)..(910): Selenocysteine
MASNPERGEILLXELQGDSRSLPFSENVSAVQKLDFSDXMVQQKLDDIKDRIKREIRKELKIKEGAENLRKVXXDKKSLAYVDNILKKSNKKLEELHHKLQELNAHIVVSDPEDIXDCPRXPDXPNNDPRCSXSNNRLKALQKQLDIELKVKQGAENMIQMYSNGSSKDRKLHGXAQQLLQDSKXKIEVIRMQILQAVQXNELAFDNAKPVISPLELRMEELRHHFRIEFAVAEGAKNVMKLLGSGKVXDRKALSEAQARFNESSQKLDLLKYSLEQRLNEVPKNHPKSRIIIEELSLVAASPXLSPRQSMISXQNQYSXLSKPAALXGXLEVRLMGCQDILENVPGRSKAXSVALPGWSPSEXRSSFMSRXSKSKSGSSRNLLKXDDLSNDVCAVLKLDNXVVGQXSWKPISNQSWDQKFXLELDRVXFFNPVIERRPKLQRQKKIFSKQQGKXFLRAPQMNINIAXWGRLVRRAIPXVNHSGXFSPQAPVPXXVPVVDVRIPQLAPPASDSXVXKLDFDLEPEPPPAPPRASSLGEIDESSELRVLDIPGQDSEXVFDIQNDRNSILPKSQSEYKPDXPQSGLEYSGIQELEDRRSQQRFQFNLQDFRCCAVLGRGHFGKVLLAEYKNXNEMFAIKALKKGDIVARDEVDSLMCEKRIFEXVNSVRHPFLVNLFACFQXKEHVCFVMEYAAGGDLMMHIHXDVFSEPRAVFYAACVVLGLQYLHEHKIVYRDLKLDNLLLDXEGFVKIADFGLCKEGMGYGDRXSXFCGXPEFLAPEVLXEXSYXRAVDWWGLGVLIYEMLVGESPFPGDDEEEVFDSIVNDEVRYPRFLSXEAISIMRRLLRRNPERRLGASEKDAEDVKKHPFFRLIDWSALMDKKVKPPFIPXIRGREDVSNFDDEFXSEAPILXPPREPRILSEEEQEMFRDFDYIADWC

SEQ ID NO: 20283 - protein, 984 aa, Homo sapiens
  MOD_RES (13)..(13): Selenocysteine
  MOD_RES (39)..(39): Selenocysteine
  MOD_RES (73)..(74): Selenocysteine
  MOD_RES (116)..(116): Selenocysteine
  MOD_RES (121)..(121): Selenocysteine
  MOD_RES (124)..(124): Selenocysteine
  MOD_RES (133)..(133): Selenocysteine
  MOD_RES (175)..(175): Selenocysteine
  MOD_RES (185)..(185): Selenocysteine
  MOD_RES (200)..(200): Selenocysteine
  MOD_RES (249)..(249): Selenocysteine
  MOD_RES (304)..(304): Selenocysteine
  MOD_RES (314)..(314): Selenocysteine
  MOD_RES (320)..(320): Selenocysteine
  MOD_RES (328)..(328): Selenocysteine
  MOD_RES (330)..(330): Selenocysteine
  MOD_RES (352)..(352): Selenocysteine
  MOD_RES (364)..(364): Selenocysteine
  MOD_RES (372)..(372): Selenocysteine
  MOD_RES (386)..(386): Selenocysteine
  MOD_RES (402)..(402): Selenocysteine
  MOD_RES (407)..(407): Selenocysteine
  MOD_RES (422)..(422): Selenocysteine
  MOD_RES (471)..(471): Selenocysteine
  MOD_RES (477)..(477): Selenocysteine
  MOD_RES (503)..(503): Selenocysteine
  MOD_RES (516)..(516): Selenocysteine
  MOD_RES (527)..(527): Selenocysteine
  MOD_RES (533)..(533): Selenocysteine
  MOD_RES (542)..(543): Selenocysteine
  MOD_RES (562)..(562): Selenocysteine
  MOD_RES (564)..(564): Selenocysteine
  MOD_RES (605)..(605): Selenocysteine
  MOD_RES (628)..(628): Selenocysteine
  MOD_RES (679)..(679): Selenocysteine
  MOD_RES (711)..(711): Selenocysteine
  MOD_RES (729)..(729): Selenocysteine
  MOD_RES (751)..(751): Selenocysteine
  MOD_RES (792)..(792): Selenocysteine
  MOD_RES (814)..(814): Selenocysteine
  MOD_RES (816)..(816): Selenocysteine
  MOD_RES (820)..(820): Selenocysteine
  MOD_RES (830)..(830): Selenocysteine
  MOD_RES (832)..(832): Selenocysteine
  MOD_RES (835)..(835): Selenocysteine
  MOD_RES (882)..(882): Selenocysteine
  MOD_RES (936)..(936): Selenocysteine
  MOD_RES (951)..(951): Selenocysteine
  MOD_RES (958)..(958): Selenocysteine
MASNPERGEILLXELQGDSRSLPFSENVSAVQKLDFSDXMVQQKLDDIKDRIKREIRKELKIKEGAENLRKVXXDKKSLAYVDNILKKSNKKLEELHHKLQELNAHIVVSDPEDIXDCPRXPDXPNNDPRCSXSNNRLKALQKQLDIELKVKQGAENMIQMYSNGSSKDRKLHGXAQQLLQDSKXKIEVIRMQILQAVQXNELAFDNAKPVISPLELRMEELRHHFRIEFAVAEGAKNVMKLLGSGKVXDRKALSEAQARFNESSQKLDLLKYSLEQRLNEVPKNHPKSRIIIEELSLVAASPXLSPRQSMISXQNQYSXLSKPAALXGXLEVRLMGCQDILENVPGRSKAXSVALPGWSPSEXRSSFMSRXSKSKSGSSRNLLKXDDLSNDVCAVLKLDNXVVGQXSWKPISNQSWDQKFXLELDRSRELEISVYWRDWRSLCAVKFLRLEDFLDNQRHGMCLYLEPQGXLFAEVXFFNPVIERRPKLQRQKKIFSKQQGKXFLRAPQMNINIAXWGRLVRRAIPXVNHSGXFSPQAPVPXXVPVVDVRIPQLAPPASDSXVXKLDFDLEPEPPPAPPRASSLGEIDESSELRVLDIPGQDSEXVFDIQNDRNSILPKSQSEYKPDXPQSGLEYSGIQELEDRRSQQRFQFNLQDFRCCAVLGRGHFGKVLLAEYKNXNEMFAIKALKKGDIVARDEVDSLMCEKRIFEXVNSVRHPFLVNLFACFQXKEHVCFVMEYAAGGDLMMHIHXDVFSEPRAVFYAACVVLGLQYLHEHKIVYRDLKLDNLLLDXEGFVKIADFGLCKEGMGYGDRXSXFCGXPEFLAPEVLXEXSYXRAVDWWGLGVLIYEMLVGESPFPGDDEEEVFDSIVNDEVRYPRFLSXEAISIMRRLLRRNPERRLGASEKDAEDVKKHPFFRLIDWSALMDKKVKPPFIPXIRGREDVSNFDDEFXSEAPILXPPREPRILSEEEQEMFRDFDYIADWC

SEQ ID NO: 20284 - protein, 211 aa, Homo sapiens
  MOD_RES (1)..(1): Any amino acid
  MOD_RES (31)..(31): Selenocysteine
  MOD_RES (86)..(86): Selenocysteine
  MOD_RES (96)..(96): Selenocysteine
  MOD_RES (102)..(102): Selenocysteine
  MOD_RES (110)..(110): Selenocysteine
  MOD_RES (122)..(122): Selenocysteine
  MOD_RES (127)..(127): Selenocysteine
  MOD_RES (142)..(142): Selenocysteine
  MOD_RES (191)..(191): Selenocysteine
  MOD_RES (197)..(197): Selenocysteine
XEELRHHFRIEFAVAEGAKNVMKLLGSGKVXDRKALSEAQARFNESSQKLDLLKYSLEQRLNEVPKNHPKSRIIIEELSLVAASPXLSPRQSMISXQNQYSXLSKPAALXDDVCAVLKLDNXVVGQXSWKPISNQSWDQKFXLELDRSRELEISVYWRDWRSLCAVKFLRLEDFLDNQRHGMCLYLEPQGXLFAEVXFFNPVIERRPKLQR

SEQ ID NO: 20285 - protein, 65 aa, Homo sapiens
  MOD_RES (1)..(1): Any amino acid
  MOD_RES (22)..(22): Selenocysteine
  MOD_RES (24)..(24): Selenocysteine
  MOD_RES (28)..(28): Selenocysteine
  MOD_RES (38)..(38): Selenocysteine
  MOD_RES (40)..(40): Selenocysteine
  MOD_RES (43)..(43): Selenocysteine
  MOD_RES (63)..(63): Selenocysteine
XGFVKIADFGLCKEGMGYGDRXSXFCGXPEFLAPEVLXEXSYXRAVDWWGLGVLIYEMLVGEXSV

SEQ ID NO: 20286 - protein, 889 aa, Homo sapiens
  MOD_RES (45)..(45): Selenocysteine
  MOD_RES (128)..(128): Selenocysteine
  MOD_RES (130)..(130): Selenocysteine
  MOD_RES (135)..(135): Selenocysteine
  MOD_RES (209)..(209): Selenocysteine
  MOD_RES (254)..(254): Selenocysteine
  MOD_RES (270)..(270): Selenocysteine
  MOD_RES (275)..(275): Selenocysteine
  MOD_RES (278)..(278): Selenocysteine
  MOD_RES (280)..(280): Selenocysteine
  MOD_RES (293)..(293): Selenocysteine
  MOD_RES (315)..(315): Selenocysteine
  MOD_RES (344)..(344): Selenocysteine
  MOD_RES (357)..(357): Selenocysteine
  MOD_RES (414)..(414): Selenocysteine
  MOD_RES (470)..(470): Selenocysteine
  MOD_RES (480)..(480): Selenocysteine
  MOD_RES (482)..(483): Selenocysteine
  MOD_RES (492)..(492): Selenocysteine
  MOD_RES (501)..(501): Selenocysteine
  MOD_RES (508)..(508): Selenocysteine
  MOD_RES (523)..(523): Selenocysteine
  MOD_RES (527)..(527): Selenocysteine
  MOD_RES (530)..(530): Selenocysteine
  MOD_RES (539)..(539): Selenocysteine
  MOD_RES (550)..(550): Selenocysteine
  MOD_RES (581)..(581): Selenocysteine
  MOD_RES (617)..(617): Selenocysteine
  MOD_RES (631)..(631): Selenocysteine
  MOD_RES (639)..(639): Selenocysteine
  MOD_RES (716)..(716): Selenocysteine
  MOD_RES (718)..(718): Selenocysteine
  MOD_RES (722)..(722): Selenocysteine
  MOD_RES (732)..(732): Selenocysteine
  MOD_RES (737)..(737): Selenocysteine
  MOD_RES (763)..(763): Selenocysteine
  MOD_RES (820)..(821): Selenocysteine
  MOD_RES (830)..(830): Selenocysteine
  MOD_RES (838)..(838): Selenocysteine
  MOD_RES (853)..(853): Selenocysteine
  MOD_RES (860)..(860): Selenocysteine
  MOD_RES (869)..(869): Selenocysteine
MEEGAPRQPGPSQWPPEDEKEVIRRAIQKELKIKEGVENLRRVAXDRRHLGHVQQLLRSSNRRLEQLHGELRELHARILLPGPGPGPAEPVASGPRPWAEQLRARHLEALRRQLHVELKVKQGAENMXHXCASGXPKERKLLAAAQQMLRDSQLKVALLRMKISSLEASGSPEPGPELLAEELQHRLHVEAAVAEGAKNVVKLLSSRRXQDRKALAEAQAQLQESSQKLDLLRLALEQLLEQLPPAHPLRSRVXRELRAAVPGYPQPSGXPVKPXALXGXLQVRLLGCEQLLXAVPGRSPAAALASSPSEGWLRXKAKHQRGRGELASEVLAVLKVDNRVVGQXGWGQVAEQSWDQXFVIPLERARELEIGVHWRDWRQLCGVAFLRLEDFLDNACHQLSLSLVPQGLLFAQVXFCDPVIERRPRLQRQERIFSKRRGQDFLRASQMNLGMAAWGRLVMNLLPPCSSPSXISPPKGCPRXPXXLREASDPAXPSNFLPKKXPLGEEMXPPPKPPRLYLPQEPXSEEXPRXKRPHMEPRXRRGPSPPASPXRKPPRLQDFRCLAVLGRGHFGKVLLVQFKGXGKYYAIKALKKQEVLSRDEIESLYCEKRILEAVGCXGHPFLLSLLACFQXSSHACFVXEFVPGGDLMMQIHEDVFPEPQARFYVACVVLGLQFLHEKKIIYRDLKLDNLLLDAQGFLKIADFGLCKEGIGFGDRXSXFCGXPEFLAPEVLXQEAYXRAVDWWGLGVLLYEMLVGECPFPGDXEEEVFDCIVNMDAPYPGFLSVQGLEFIQKLLQKCPEKRLGAGEQDAEEIKVQPFFRXXNWQALLARXIQPPFVPXLCGPADLRYFEGEFXGLPPALXPPAPHSLLXARQQAAFRDFDFVSERFLEP

SEQ ID NO: 20287 - protein, 436 aa, Homo sapiens
  MOD_RES (4)..(4): Selenocysteine
  MOD_RES (6)..(6): Selenocysteine
  MOD_RES (22)..(22): Selenocysteine
  MOD_RES (26)..(26): Selenocysteine
  MOD_RES (49)..(49): Selenocysteine
  MOD_RES (78)..(78): Selenocysteine
  MOD_RES (84)..(85): Selenocysteine
  MOD_RES (114)..(114): Selenocysteine
  MOD_RES (152)..(152): Selenocysteine
  MOD_RES (158)..(158): Selenocysteine
  MOD_RES (181)..(181): Selenocysteine
  MOD_RES (183)..(183): Selenocysteine
  MOD_RES (205)..(205): Selenocysteine
  MOD_RES (210)..(210): Selenocysteine
  MOD_RES (216)..(216): Selenocysteine
  MOD_RES (219)..(219): Selenocysteine
  MOD_RES (226)..(226): Selenocysteine
  MOD_RES (228)..(228): Selenocysteine
  MOD_RES (233)..(233): Selenocysteine
  MOD_RES (271)..(271): Selenocysteine
  MOD_RES (288)..(288): Selenocysteine
  MOD_RES (299)..(299): Selenocysteine
  MOD_RES (302)..(302): Selenocysteine
  MOD_RES (329)..(329): Selenocysteine
  MOD_RES (332)..(332): Selenocysteine
  MOD_RES (336)..(336): Selenocysteine
  MOD_RES (363)..(363): Selenocysteine
  MOD_RES (371)..(371): Selenocysteine
  MOD_RES (373)..(374): Selenocysteine
  MOD_RES (392)..(392): Selenocysteine
  MOD_RES (412)..(412): Selenocysteine
MMAXQXLSIDSYQDGQQMQVVXELKXEQDPNCSEPDAEGVSPPPVESQXPMDVDKQAIYRHPLFPLLALLFEKCEQSXQGSEGXXSASFDVDIENFVRKQEKEGKPFFCEDPEXDNLMVKAIQVLRIHLLELEKVNELCKDFCSRYIACLKXKMNSEXLLSGEPGSPYSPVQSQQIQSAIXGXISPQGIVVPASALQQGNVAMAXVAGGXVYQPVXVVXPQGQVVXQXLSPGXIRIQNSQLQLQLNQDLSILHQDDGSSKNKRGVLPKHAXNVMRSWLFQHIGHPYPXEDEKKQIAAQXNLXLLQVNNWFINARRRILQPMLDSSCSEXPKXKKKXAQNRPVQRFWPDSIASGVAQPPPSELXMSEGAVVXIXXPVNMNVDSLQSLSSDGAXLAVQQVMMAGQSEDESVDSXEEDAGALAPAHISGLVLENSDSLQ

SEQ ID NO: 20288 - protein, 61 aa, Homo sapiens
  MOD_RES (4)..(4): Selenocysteine
  MOD_RES (6)..(6): Selenocysteine
  MOD_RES (22)..(22): Selenocysteine
  MOD_RES (26)..(26): Selenocysteine
  MOD_RES (49)..(49): Selenocysteine
MMAXQXLSIDSYQDGQQMQVVXELKXEQDPNCSEPDAEGVSPPPVESQXPMDVDKQAIYRW

SEQ ID NO: 20289 - protein, 319 aa, Homo sapiens
  MOD_RES (35)..(35): Selenocysteine
  MOD_RES (41)..(41): Selenocysteine
  MOD_RES (64)..(64): Selenocysteine
  MOD_RES (66)..(66): Selenocysteine
  MOD_RES (88)..(88): Selenocysteine
  MOD_RES (93)..(93): Selenocysteine
  MOD_RES (99)..(99): Selenocysteine
  MOD_RES (102)..(102): Selenocysteine
  MOD_RES (109)..(109): Selenocysteine
  MOD_RES (111)..(111): Selenocysteine
  MOD_RES (116)..(116): Selenocysteine
  MOD_RES (154)..(154): Selenocysteine
  MOD_RES (171)..(171): Selenocysteine
  MOD_RES (182)..(182): Selenocysteine
  MOD_RES (185)..(185): Selenocysteine
  MOD_RES (212)..(212): Selenocysteine
  MOD_RES (215)..(215): Selenocysteine
  MOD_RES (219)..(219): Selenocysteine
  MOD_RES (246)..(246): Selenocysteine
  MOD_RES (254)..(254): Selenocysteine
  MOD_RES (256)..(257): Selenocysteine
  MOD_RES (275)..(275): Selenocysteine
  MOD_RES (295)..(295): Selenocysteine
MVKAIQVLRIHLLELEKVNELCKDFCSRYIACLKXKMNSEXLLSGEPGSPYSPVQSQQIQSAIXGXISPQGIVVPASALQQGNVAMAXVAGGXVYQPVXVVXPQGQVVXQXLSPGXIRIQNSQLQLQLNQDLSILHQDDGSSKNKRGVLPKHAXNVMRSWLFQHIGHPYPXEDEKKQIAAQXNLXLLQVNNWFINARRRILQPMLDSSCSEXPKXKKKXAQNRPVQRFWPDSIASGVAQPPPSELXMSEGAVVXIXXPVNMNVDSLQSLSSDGAXLAVQQVMMAGQSEDESVDSXEEDAGALAPAHISGLVLENSDSLQ

SEQ ID NO: 20290 - protein, 40 aa, Homo sapiens
  MOD_RES (12)..(12): Selenocysteine
  MOD_RES (16)..(16): Selenocysteine
MMQHASPAPALXMMAXQNVPPPPYQDSPQAPSFPAPDAAV

SEQ ID NO: 20291 - protein, 39 aa, Homo sapiens
  MOD_RES (12)..(12): Selenocysteine
  MOD_RES (16)..(16): Selenocysteine
  MOD_RES (31)..(31): Selenocysteine
  MOD_RES (33)..(33): Selenocysteine
MMQHASPAPALXMMAXQNVPPPPYQDSPQMXAXAQPPSK

SEQ ID NO: 20292 - protein, 40 aa, Homo sapiens
  MOD_RES (12)..(12): Selenocysteine
  MOD_RES (16)..(16): Selenocysteine
  MOD_RES (31)..(31): Selenocysteine
  MOD_RES (33)..(33): Selenocysteine
MMQHASPAPALXMMAXQNVPPPPYQDSPQMXAXAQPPSKA

SEQ ID NO: 20293 - protein, 98 aa, Homo sapiens
  MOD_RES (12)..(12): Selenocysteine
  MOD_RES (16)..(16): Selenocysteine
  MOD_RES (31)..(31): Selenocysteine
  MOD_RES (33)..(33): Selenocysteine
  MOD_RES (54)..(54): Selenocysteine
  MOD_RES (84)..(84): Selenocysteine
  MOD_RES (94)..(94): Selenocysteine
MMQHASPAPALXMMAXQNVPPPPYQDSPQMXAXAQPPSKAQAVHISAPSAAASXPVPSAPIDPQAQLEADKRAVYRHPLFPLLXLLFEKCEQAXQGSE

SEQ ID NO: 20294 - protein, 472 aa, Homo sapiens
  MOD_RES (12)..(12): Selenocysteine
  MOD_RES (16)..(16): Selenocysteine
  MOD_RES (31)..(31): Selenocysteine
  MOD_RES (33)..(33): Selenocysteine
  MOD_RES (54)..(54): Selenocysteine
  MOD_RES (84)..(84): Selenocysteine
  MOD_RES (94)..(94): Selenocysteine
  MOD_RES (101)..(101): Selenocysteine
  MOD_RES (164)..(164): Selenocysteine
  MOD_RES (168)..(168): Selenocysteine
  MOD_RES (231)..(232): Selenocysteine
  MOD_RES (248)..(248): Selenocysteine
  MOD_RES (251)..(251): Selenocysteine
  MOD_RES (258)..(258): Selenocysteine
  MOD_RES (271)..(271): Selenocysteine
  MOD_RES (278)..(278): Selenocysteine
  MOD_RES (300)..(300): Selenocysteine
  MOD_RES (317)..(317): Selenocysteine
  MOD_RES (328)..(328): Selenocysteine
  MOD_RES (331)..(331): Selenocysteine
  MOD_RES (372)..(372): Selenocysteine
  MOD_RES (394)..(394): Selenocysteine
  MOD_RES (414)..(414): Selenocysteine
  MOD_RES (432)..(432): Selenocysteine
  MOD_RES (457)..(458): Selenocysteine
MMQHASPAPALXMMAXQNVPPPPYQDSPQMXAXAQPPSKAQAVHISAPSAAASXPVPSAPIDPQAQLEADKRAVYRHPLFPLLXLLFEKCEQAXQGSECIXSASFDVDIENFVHQQEQEHKPFFSDDPELDNLMVKAIQVLRIHLLELEKVNELCKDFCNRYIXCLKXKMHSDNLLRNDLGGPYSPNQPSINLHSQDLLQNSPNSMSGVSNNPQGIVVPASALQQGNIAMXXVNSQVVSGGALYQPVXMVXSQGQVVXQAIPQGAIQIQNXQVNLDLXSLLDNEDKKSKNKRGVLPKHAXNIMRSWLFQHLMHPYPXEDEKRQIAAQXNLXLLQVNNWFINARRRILQPMLDASNPDPAPKAKKIKSQHRPXQRFWPNSIAAGVLQQQGGAPGXNPDGSINLDNLQSLSSDSAXMAMQQAMMAAHDDSLDGXEEEDEDEMEEEEEEELEEEVDELQXXNVSDLGLEHSDSLE

SEQ ID NO: 20295 - protein, 726 aa, Homo sapiens
  MOD_RES (8)..(8): Selenocysteine
  MOD_RES (22)..(22): Selenocysteine
  MOD_RES (33)..(33): Selenocysteine
  MOD_RES (35)..(35): Selenocysteine
  MOD_RES (48)..(48): Selenocysteine
  MOD_RES (61)..(61): Selenocysteine
  MOD_RES (82)..(83): Selenocysteine
  MOD_RES (107)..(107): Selenocysteine
  MOD_RES (137)..(138): Selenocysteine
  MOD_RES (166)..(166): Selenocysteine
  MOD_RES (171)..(171): Selenocysteine
  MOD_RES (179)..(180): Selenocysteine
  MOD_RES (189)..(189): Selenocysteine
  MOD_RES (246)..(246): Selenocysteine
  MOD_RES (272)..(272): Selenocysteine
  MOD_RES (319)..(320): Selenocysteine
  MOD_RES (325)..(325): Selenocysteine
  MOD_RES (341)..(341): Selenocysteine
  MOD_RES (351)..(351): Selenocysteine
  MOD_RES (360)..(360): Selenocysteine
  MOD_RES (407)..(407): Selenocysteine
  MOD_RES (422)..(422): Selenocysteine
  MOD_RES (471)..(471): Selenocysteine
  MOD_RES (485)..(485): Selenocysteine
  MOD_RES (490)..(490): Selenocysteine
  MOD_RES (514)..(514): Selenocysteine
  MOD_RES (530)..(530): Selenocysteine
  MOD_RES (543)..(543): Selenocysteine
  MOD_RES (555)..(555): Selenocysteine
  MOD_RES (620)..(620): Selenocysteine
  MOD_RES (624)..(624): Selenocysteine
  MOD_RES (627)..(627): Selenocysteine
  MOD_RES (630)..(630): Selenocysteine
  MOD_RES (643)..(643): Selenocysteine
  MOD_RES (712)..(712): Selenocysteine
  MOD_RES (723)..(723): Selenocysteine
MNHSPLKXALAYECFQDQDNSXLALPSDQKMKXGXSGRQRVQEQVMMXVKRQKSKSSQSSXLSHSNRGSMYDGLADNYNYGXXSRSSYYSKFQAGNGSWGYPIYNGXLKREPDNRRFSSYSQMENWSRHYPRGSCNXXGAGSDICFMQKIKASRSEPDLYCDPRGXLRKGXLGSKGQKXXQNRYSFYSXCSGQKAIKKCPVRPPSCASKQDPVYIPPISCNKDLSFGHSRASSKICSEDIECSGLXIPKAVQYLSSQDEKYQAIGAYYIQHXCFQDESAKQQVYQLGGICKLVDLLRSPNQNVQQAAAGALRNLVFRSXXNKLEXRRQNGIREAVSLLRRXGNAEIQKQLXGLLWNLSSXDELKEELIADALPVLADRVIIPFSGWCDGNSNMSREVVDPEVFFNAXGCLRNLSSADAGRQXMRNYSGLIDSLMAYVQNCVAASRCDDKSVENCMCVLHNLSYRLDAEVPXRYRQLEYNARNAYXEKSSXGCFSNKSDKMMNNNYDCPLPEEEXNPKGSGWLYHSDAIRXYLNLMGKSKKDAXLEACAGALQNLXASKGLMSSGMSQLIGLKEKGLPQIARLLQSGNSDVVRSGASLLSNMSRHPLLHRVMGNQVFPEVXRLLXSHXGNXSNSEDILSSACYXVRNLMASQPQLAKQYFSSSMLNNIINLCRSSASPKAAEAARLLLSDMWSSKELQGVLRQQGFDRNMLGXLAGANSLRNFXSRF

SEQ ID NO: 20296 - protein, 747 aa, Homo sapiens
  MOD_RES (8)..(8): Selenocysteine
  MOD_RES (22)..(22): Selenocysteine
  MOD_RES (33)..(33): Selenocysteine
  MOD_RES (35)..(35): Selenocysteine
  MOD_RES (48)..(48): Selenocysteine
  MOD_RES (61)..(61): Selenocysteine
  MOD_RES (82)..(83): Selenocysteine
  MOD_RES (107)..(107): Selenocysteine
  MOD_RES (137)..(138): Selenocysteine
  MOD_RES (166)..(166): Selenocysteine
  MOD_RES (171)..(171): Selenocysteine
  MOD_RES (179)..(180): Selenocysteine
  MOD_RES (189)..(189): Selenocysteine
  MOD_RES (246)..(246): Selenocysteine
  MOD_RES (272)..(272): Selenocysteine
  MOD_RES (319)..(320): Selenocysteine
  MOD_RES (325)..(325): Selenocysteine
  MOD_RES (341)..(341): Selenocysteine
  MOD_RES (351)..(351): Selenocysteine
  MOD_RES (360)..(360): Selenocysteine
  MOD_RES (407)..(407): Selenocysteine
  MOD_RES (428)..(428): Selenocysteine
  MOD_RES (443)..(443): Selenocysteine
  MOD_RES (492)..(492): Selenocysteine
  MOD_RES (506)..(506): Selenocysteine
  MOD_RES (511)..(511): Selenocysteine
  MOD_RES (535)..(535): Selenocysteine
  MOD_RES (551)..(551): Selenocysteine
  MOD_RES (564)..(564): Selenocysteine
  MOD_RES (576)..(576): Selenocysteine
  MOD_RES (641)..(641): Selenocysteine
  MOD_RES (645)..(645): Selenocysteine
  MOD_RES (648)..(648): Selenocysteine
  MOD_RES (651)..(651): Selenocysteine
  MOD_RES (664)..(664): Selenocysteine
  MOD_RES (733)..(733): Selenocysteine
  MOD_RES (744)..(744): Selenocysteine
MNHSPLKXALAYECFQDQDNSXLALPSDQKMKXGXSGRQRVQEQVMMXVKRQKSKSSQSSXLSHSNRGSMYDGLADNYNYGXXSRSSYYSKFQAGNGSWGYPIYNGXLKREPDNRRFSSYSQMENWSRHYPRGSCNXXGAGSDICFMQKIKASRSEPDLYCDPRGXLRKGXLGSKGQKXXQNRYSFYSXCSGQKAIKKCPVRPPSCASKQDPVYIPPISCNKDLSFGHSRASSKICSEDIECSGLXIPKAVQYLSSQDEKYQAIGAYYIQHXCFQDESAKQQVYQLGGICKLVDLLRSPNQNVQQAAAGALRNLVFRSXXNKLEXRRQNGIREAVSLLRRXGNAEIQKQLXGLLWNLSSXDELKEELIADALPVLADRVIIPFSGWCDGNSNMSREVVDPEVFFNAXGCLRKRLGMRELLALVPQRAXSSRVNLSSADAGRQXMRNYSGLIDSLMAYVQNCVAASRCDDKSVENCMCVLHNLSYRLDAEVPXRYRQLEYNARNAYXEKSSXGCFSNKSDKMMNNNYDCPLPEEEXNPKGSGWLYHSDAIRXYLNLMGKSKKDAXLEACAGALQNLXASKGLMSSGMSQLIGLKEKGLPQIARLLQSGNSDVVRSGASLLSNMSRHPLLHRVMGNQVFPEVXRLLXSHXGNXSNSEDILSSACYXVRNLMASQPQLAKQYFSSSMLNNIINLCRSSASPKAAEAARLLLSDMWSSKELQGVLRQQGFDRNMLGXLAGANSLRNFXSRF

SEQ ID NO: 20297 - protein, 837 aa, Homo sapiens
  MOD_RES (15)..(15): Selenocysteine
  MOD_RES (50)..(50): Selenocysteine
  MOD_RES (63)..(63): Selenocysteine
  MOD_RES (80)..(80): Selenocysteine
  MOD_RES (107)..(107): Selenocysteine
  MOD_RES (115)..(116): Selenocysteine
  MOD_RES (118)..(118): Selenocysteine
  MOD_RES (127)..(127): Selenocysteine
  MOD_RES (162)..(162): Selenocysteine
  MOD_RES (177)..(177): Selenocysteine
  MOD_RES (207)..(208): Selenocysteine
  MOD_RES (216)..(216): Selenocysteine
  MOD_RES (229)..(229): Selenocysteine
  MOD_RES (242)..(242): Selenocysteine
  MOD_RES (248)..(248): Selenocysteine
  MOD_RES (263)..(263): Selenocysteine
  MOD_RES (267)..(267): Selenocysteine
  MOD_RES (281)..(281): Selenocysteine
  MOD_RES (298)..(298): Selenocysteine
  MOD_RES (300)..(300): Selenocysteine
  MOD_RES (320)..(320): Selenocysteine
  MOD_RES (334)..(334): Selenocysteine
  MOD_RES (338)..(338): Selenocysteine
  MOD_RES (340)..(340): Selenocysteine
  MOD_RES (352)..(352): Selenocysteine
  MOD_RES (375)..(375): Selenocysteine
  MOD_RES (449)..(449): Selenocysteine
  MOD_RES (454)..(454): Selenocysteine
  MOD_RES (459)..(459): Selenocysteine
  MOD_RES (477)..(477): Selenocysteine
  MOD_RES (482)..(482): Selenocysteine
  MOD_RES (484)..(484): Selenocysteine
  MOD_RES (515)..(515): Selenocysteine
  MOD_RES (549)..(549): Selenocysteine
  MOD_RES (560)..(560): Selenocysteine
  MOD_RES (595)..(595): Selenocysteine
  MOD_RES (654)..(654): Selenocysteine
  MOD_RES (666)..(666): Selenocysteine
  MOD_RES (674)..(674): Selenocysteine
  MOD_RES (679)..(679): Selenocysteine
  MOD_RES (690)..(690): Selenocysteine
  MOD_RES (704)..(704): Selenocysteine
  MOD_RES (726)..(726): Selenocysteine
  MOD_RES (737)..(737): Selenocysteine
  MOD_RES (741)..(741): Selenocysteine
  MOD_RES (747)..(748): Selenocysteine
  MOD_RES (754)..(754): Selenocysteine
  MOD_RES (772)..(772): Selenocysteine
  MOD_RES (807)..(807): Selenocysteine
  MOD_RES (821)..(821): Selenocysteine
  MOD_RES (828)..(828): Selenocysteine
MAAPGAPAEYGYIRXVLGQQILGQLDSSSLALPSEAKLKLAGSSGRGGQXVKSLRIQEQVQQXLARKGRSSVGNGNLHRXSSVPEYVYNLHLVENDFVGGRSPVPKXYDMLKAGXXAXYEGRWGRGXAQYSSQKSVEERSLRHPLRRLEISPDSSPERAHYXHSDYQYSQRSQAGHXLHHQESRRAALLVPPRYARSEIVGVSRAGXXSRQRHFDXYHRQYQHGSVSDXVFDSIPANPALLXYPRPGXSRSMGNLLEKENYLXAGLXVGQVRPLVPLQPVXQNRASRSSWHQSSFHSXRXLREAGPSVAVDSSGRRAHLXVGQAAAGGSGNLLXERSXFXDSQLGNADMEMXLERAVSMLEADHMLPSRISAAAXFIQHECFQKSEARKRVNQLRGILKLLQLLKVQNEDVQRAVCGALRNLVFEDNDNKLEVAELNGVPRLLQVLKQXRDLEXKKQIXGLLWNLSSNDKLKNLMIXEALLXLXENIIIPFSGWPEGDYPKANGLLDFDIFYNVXGCLRNMSSAGADGRKAMRRCDGLIDSLVHYVRGXIADYQPDDKAXENCVCILHNLSYQLEAELPEKYSQNIYIQNRNIQXDNNKSIGCFGSRSRKVKEQYQDVPMPEEKSNPKGVEWLWHSIVIRMYLSLIAKSVRNYXQEASLGALQNLXAGSGPMPXSVAQXVVQKESGLQHXRKMLHVGDPSVKKXAISLLRNLSRNLSLQNEIAKEXLPDLVSIIPDXVPSXDLLIEXXASACYXLNNIIQNSYQNARDLLNXGGIQKIMAISAGDAYASNKASKAASVLLYSLWAHXELHHAYKKAQFKKXDFVNSRXAKAYHSLKD

SEQ ID NO: 20298 - protein, 881 aa, Homo sapiens
  MOD_RES (15)..(15): Selenocysteine
  MOD_RES (50)..(50): Selenocysteine
  MOD_RES (63)..(63): Selenocysteine
  MOD_RES (80)..(80): Selenocysteine
  MOD_RES (107)..(107): Selenocysteine
  MOD_RES (115)..(116): Selenocysteine
  MOD_RES (118)..(118): Selenocysteine
  MOD_RES (127)..(127): Selenocysteine
  MOD_RES (162)..(162): Selenocysteine
  MOD_RES (177)..(177): Selenocysteine
  MOD_RES (207)..(208): Selenocysteine
  MOD_RES (216)..(216): Selenocysteine
  MOD_RES (229)..(229): Selenocysteine
  MOD_RES (242)..(242): Selenocysteine
  MOD_RES (248)..(248): Selenocysteine
  MOD_RES (263)..(263): Selenocysteine
  MOD_RES (267)..(267): Selenocysteine
  MOD_RES (281)..(281): Selenocysteine
  MOD_RES (298)..(298): Selenocysteine
  MOD_RES (300)..(300): Selenocysteine
  MOD_RES (320)..(320): Selenocysteine
  MOD_RES (334)..(334): Selenocysteine
  MOD_RES (338)..(338): Selenocysteine
  MOD_RES (340)..(340): Selenocysteine
  MOD_RES (352)..(352): Selenocysteine
  MOD_RES (375)..(375): Selenocysteine
  MOD_RES (449)..(449): Selenocysteine
  MOD_RES (454)..(454): Selenocysteine
  MOD_RES (459)..(459): Selenocysteine
  MOD_RES (462)..(462): Selenocysteine
  MOD_RES (483)..(483): Selenocysteine
  MOD_RES (492)..(492): Selenocysteine
  MOD_RES (521)..(521): Selenocysteine
  MOD_RES (526)..(526): Selenocysteine
  MOD_RES (528)..(528): Selenocysteine
  MOD_RES (559)..(559): Selenocysteine
  MOD_RES (593)..(593): Selenocysteine
  MOD_RES (604)..(604): Selenocysteine
  MOD_RES (639)..(639): Selenocysteine
  MOD_RES (698)..(698): Selenocysteine
  MOD_RES (710)..(710): Selenocysteine
  MOD_RES (718)..(718): Selenocysteine
  MOD_RES (723)..(723): Selenocysteine
  MOD_RES (734)..(734): Selenocysteine
  MOD_RES (748)..(748): Selenocysteine
  MOD_RES (770)..(770): Selenocysteine
  MOD_RES (781)..(781): Selenocysteine
  MOD_RES (785)..(785): Selenocysteine
  MOD_RES (791)..(792): Selenocysteine
  MOD_RES (798)..(798): Selenocysteine
  MOD_RES (816)..(816): Selenocysteine
  MOD_RES (851)..(851): Selenocysteine
  MOD_RES (865)..(865): Selenocysteine
  MOD_RES (872)..(872): Selenocysteine
MAAPGAPAEYGYIRXVLGQQILGQLDSSSLALPSEAKLKLAGSSGRGGQXVKSLRIQEQVQQXLARKGRSSVGNGNLHRXSSVPEYVYNLHLVENDFVGGRSPVPKXYDMLKAGXXAXYEGRWGRGXAQYSSQKSVEERSLRHPLRRLEISPDSSPERAHYXHSDYQYSQRSQAGHXLHHQESRRAALLVPPRYARSEIVGVSRAGXXSRQRHFDXYHRQYQHGSVSDXVFDSIPANPALLXYPRPGXSRSMGNLLEKENYLXAGLXVGQVRPLVPLQPVXQNRASRSSWHQSSFHSXRXLREAGPSVAVDSSGRRAHLXVGQAAAGGSGNLLXERSXFXDSQLGNADMEMXLERAVSMLEADHMLPSRISAAAXFIQHECFQKSEARKRVNQLRGILKLLQLLKVQNEDVQRAVCGALRNLVFEDNDNKLEVAELNGVPRLLQVLKQXRDLEXKKQIXDHXVNLRSRNGWPGAVAHACNPSXLGGQGGRIXRSGVRDQPDQHGLLWNLSSNDKLKNLMIXEALLXLXENIIIPFSGWPEGDYPKANGLLDFDIFYNVXGCLRNMSSAGADGRKAMRRCDGLIDSLVHYVRGXIADYQPDDKAXENCVCILHNLSYQLEAELPEKYSQNIYIQNRNIQXDNNKSIGCFGSRSRKVKEQYQDVPMPEEKSNPKGVEWLWHSIVIRMYLSLIAKSVRNYXQEASLGALQNLXAGSGPMPXSVAQXVVQKESGLQHXRKMLHVGDPSVKKXAISLLRNLSRNLSLQNEIAKEXLPDLVSIIPDXVPSXDLLIEXXASACYXLNNIIQNSYQNARDLLNXGGIQKIMAISAGDAYASNKASKAASVLLYSLWAHXELHHAYKKAQFKKXDFVNSRXAKAYHSLKD

SEQ ID NO: 20299 - protein, 36 aa, Homo sapiens
  MOD_RES (1)..(1): Any amino acid
  MOD_RES (7)..(7): Selenocysteine
  MOD_RES (20)..(20): Selenocysteine
XGRGGQXVKSLRIQEQVQQXLARKGRSSVGNGPVLN

SEQ ID NO: 20300 - protein, 95 aa, Homo sapiens
  MOD_RES (17)..(17): Selenocysteine
  MOD_RES (24)..(24): Selenocysteine
  MOD_RES (32)..(33): Selenocysteine
  MOD_RES (35)..(36): Selenocysteine
  MOD_RES (52)..(52): Selenocysteine
  MOD_RES (81)..(81): Selenocysteine
MPAPEQASLVEEGQPQXRQEAASXGPGMEPEXXAXXILASVKEQELQFQRLXRELEVERQIVASQLERCRLGAESPSIASXSILCYSWAKKLLSE

SEQ ID NO: 20301 - protein, 216 aa, Homo sapiens
  MOD_RES (17)..(17): Selenocysteine
  MOD_RES (24)..(24): Selenocysteine
  MOD_RES (32)..(33): Selenocysteine
  MOD_RES (35)..(36): Selenocysteine
  MOD_RES (52)..(52): Selenocysteine
  MOD_RES (81)..(81): Selenocysteine
  MOD_RES (84)..(84): Selenocysteine
  MOD_RES (93)..(93): Selenocysteine
  MOD_RES (98)..(98): Selenocysteine
  MOD_RES (118)..(118): Selenocysteine
  MOD_RES (124)..(124): Selenocysteine
  MOD_RES (131)..(131): Selenocysteine
  MOD_RES (147)..(147): Selenocysteine
  MOD_RES (184)..(184): Selenocysteine
  MOD_RES (198)..(198): Selenocysteine
MPAPEQASLVEEGQPQXRQEAASXGPGMEPEXXAXXILASVKEQELQFQRLXRELEVERQIVASQLERCRLGAESPSIASXSSXEKSFPWRSXDVPNXGVSKPRVSDAVQPNNYLIRXEPEQGXLYSPEQXSLHESEGSLGNSRSSXQMNSYSDSGYQEAGSFHNSQNVSKADNRQQHSFIGSXNNHVVRNSRAEGQXLVQHRRVSFKGVSENFSG

SEQ ID NO: 20302 - protein, 1149 aa, Homo sapiens
  MOD_RES (17)..(17): Selenocysteine
  MOD_RES (24)..(24): Selenocysteine
  MOD_RES (32)..(33): Selenocysteine
  MOD_RES (35)..(36): Selenocysteine
  MOD_RES (52)..(52): Selenocysteine
  MOD_RES (81)..(81): Selenocysteine
  MOD_RES (84)..(84): Selenocysteine
  MOD_RES (93)..(93): Selenocysteine
  MOD_RES (98)..(98): Selenocysteine
  MOD_RES (118)..(118): Selenocysteine
  MOD_RES (124)..(124): Selenocysteine
  MOD_RES (131)..(131): Selenocysteine
  MOD_RES (147)..(147): Selenocysteine
  MOD_RES (184)..(184): Selenocysteine
  MOD_RES (198)..(198): Selenocysteine
  MOD_RES (228)..(228): Selenocysteine
  MOD_RES (239)..(239): Selenocysteine
  MOD_RES (251)..(251): Selenocysteine
  MOD_RES (264)..(265): Selenocysteine
  MOD_RES (283)..(283): Selenocysteine
  MOD_RES (292)..(292): Selenocysteine
  MOD_RES (296)..(296): Selenocysteine
  MOD_RES (303)..(303): Selenocysteine
  MOD_RES (308)..(309): Selenocysteine
  MOD_RES (317)..(317): Selenocysteine
  MOD_RES (319)..(319): Selenocysteine
  MOD_RES (323)..(323): Selenocysteine
  MOD_RES (344)..(344): Selenocysteine
  MOD_RES (357)..(357): Selenocysteine
  MOD_RES (384)..(384): Selenocysteine
  MOD_RES (412)..(412): Selenocysteine
  MOD_RES (419)..(419): Selenocysteine
  MOD_RES (432)..(432): Selenocysteine
  MOD_RES (440)..(440): Selenocysteine
  MOD_RES (445)..(445): Selenocysteine
  MOD_RES (456)..(456): Selenocysteine
  MOD_RES (462)..(462): Selenocysteine
  MOD_RES (464)..(464): Selenocysteine
  MOD_RES (474)..(475): Selenocysteine
  MOD_RES (477)..(477): Selenocysteine
  MOD_RES (507)..(508): Selenocysteine
  MOD_RES (603)..(603): Selenocysteine
  MOD_RES (636)..(636): Selenocysteine
  MOD_RES (651)..(651): Selenocysteine
  MOD_RES (659)..(659): Selenocysteine
  MOD_RES (661)..(661): Selenocysteine
  MOD_RES (663)..(663): Selenocysteine
  MOD_RES (686)..(686): Selenocysteine
  MOD_RES (693)..(694): Selenocysteine
  MOD_RES (727)..(727): Selenocysteine
  MOD_RES (731)..(731): Selenocysteine
  MOD_RES (738)..(738): Selenocysteine
  MOD_RES (745)..(745): Selenocysteine
  MOD_RES (796)..(796): Selenocysteine
  MOD_RES (832)..(832): Selenocysteine
  MOD_RES (842)..(842): Selenocysteine
  MOD_RES (894)..(894): Selenocysteine
  MOD_RES (934)..(934): Selenocysteine
  MOD_RES (946)..(946): Selenocysteine
  MOD_RES (969)..(969): Selenocysteine
  MOD_RES (990)..(990): Selenocysteine
  MOD_RES (1013)..(1013): Selenocysteine
  MOD_RES (1017)..(1017): Selenocysteine
  MOD_RES (1031)..(1032): Selenocysteine
  MOD_RES (1111)..(1111): Selenocysteine
  MOD_RES (1115)..(1115): Selenocysteine
  MOD_RES (1122)..(1123): Selenocysteine
  MOD_RES (1131)..(1131): Selenocysteine
MPAPEQASLVEEGQPQXRQEAASXGPGMEPEXXAXXILASVKEQELQFQRLXRELEVERQIVASQLERCRLGAESPSIASXSSXEKSFPWRSXDVPNXGVSKPRVSDAVQPNNYLIRXEPEQGXLYSPEQXSLHESEGSLGNSRSSXQMNSYSDSGYQEAGSFHNSQNVSKADNRQQHSFIGSXNNHVVRNSRAEGQXLVQPSVANRAMRRVSSVPSRAQSPSYVISXGVSPSRGSLRXSLGSGFGSPSVXDPRPLNPSAYSSXXLPAARAASPYSQRPASPXAIRRIGSVXSRQXSNPNGPXPQYQXXARVGSPLXLXDAQXRVASPSQGQVGSSSPKRSGMXAVPQHLGPSLQRXVHDMEQFGQQQYDIYERMVPPRPDSLXGLRSSYASQHSQLGQDLRSAVSPDLHIXPIYEGRXYYSPVYRSPNHGXVELQGSQXALYRXGSVGIGNLQRXSSQRSXLXYQRNNYALNXXAXYAEPYRPIQYRVQECNYNRLQHAVPADDGXXRSPSIDSIQKDPREFAWRDPELPEVIHMLQHQFPSVQANAAAYLQHLCFGDNKVKMEVCRLGGIKHLVDLLDHRVLEVQKNACGALRNLVFGKSXDENKIAMKNVGGIPALLRLLRKSIDAEVRELVXGVLWNLSSCDAVKMXIIRDALSXLXNXVIVPHSGWNNSSFDDDHKIKFQXSLVLRNXXGCLRNLSSAGEEARKQMRSCEGLVDSLLYVIHXCVNXSDYDSKXVENCVCXLRNLSYRLELEVPQARLLGLNELDDLLGKESPSKDSEPSCWGKKKKKKKRXPQEDQWDGVGPIPGLSKSPKGVEMLWHPSVVKPYLXLLAESSNPAXLEGSAGSLQNLSAGNWKFAAYIRAAVRKEKGLPILVELLRMDNDRVVSSVAXALRNMALDVRNKELIGKYAMRDLVNRLPGGNGPSVLSDEXMAAICCALHEVXSKNMENAKALADSGGIEKLVNIXKGRGDRSSLKVVKAAAQVLNXLWQYRDLRSIYKKDGWNQNHFIXPVSXLERDRFKSHPSLSXXNQQMSPIIQSGSSKPSPIYISSYSSPAREQNRRLQHQQLYYSQDDSNRKNFDAYRLYLQSPHSYEDPYFDDRVHFPASXDYSXQYGLKSXXNYVDFYSXKRPSYRAEQYPGSPDSWV

SEQ ID NO: 20303 - protein, 1192 aa, Homo sapiens
  MOD_RES (17)..(17): Selenocysteine
  MOD_RES (24)..(24): Selenocysteine
  MOD_RES (32)..(33): Selenocysteine
  MOD_RES (35)..(36): Selenocysteine
  MOD_RES (52)..(52): Selenocysteine
  MOD_RES (81)..(81): Selenocysteine
  MOD_RES (84)..(84): Selenocysteine
  MOD_RES (93)..(93): Selenocysteine
  MOD_RES (98)..(98): Selenocysteine
  MOD_RES (118)..(118): Selenocysteine
  MOD_RES (124)..(124): Selenocysteine
  MOD_RES (131)..(131): Selenocysteine
  MOD_RES (147)..(147): Selenocysteine
  MOD_RES (184)..(184): Selenocysteine
  MOD_RES (198)..(198): Selenocysteine
  MOD_RES (228)..(228): Selenocysteine
  MOD_RES (239)..(239): Selenocysteine
  MOD_RES (251)..(251): Selenocysteine
  MOD_RES (264)..(265): Selenocysteine
  MOD_RES (283)..(283): Selenocysteine
  MOD_RES (292)..(292): Selenocysteine
  MOD_RES (296)..(296): Selenocysteine
  MOD_RES (303)..(303): Selenocysteine
  MOD_RES (308)..(309): Selenocysteine
  MOD_RES (317)..(317): Selenocysteine
  MOD_RES (319)..(319): Selenocysteine
  MOD_RES (323)..(323): Selenocysteine
  MOD_RES (344)..(344): Selenocysteine
  MOD_RES (357)..(357): Selenocysteine
  MOD_RES (384)..(384): Selenocysteine
  MOD_RES (412)..(412): Selenocysteine
  MOD_RES (419)..(419): Selenocysteine
  MOD_RES (432)..(432): Selenocysteine
  MOD_RES (440)..(440): Selenocysteine
  MOD_RES (445)..(445): Selenocysteine
  MOD_RES (456)..(456): Selenocysteine
  MOD_RES (462)..(462): Selenocysteine
  MOD_RES (464)..(464): Selenocysteine
  MOD_RES (474)..(475): Selenocysteine
  MOD_RES (477)..(477): Selenocysteine
  MOD_RES (507)..(508): Selenocysteine
  MOD_RES (603)..(603): Selenocysteine
  MOD_RES (636)..(636): Selenocysteine
  MOD_RES (651)..(651): Selenocysteine
  MOD_RES (659)..(659): Selenocysteine
  MOD_RES (661)..(661): Selenocysteine
  MOD_RES (663)..(663): Selenocysteine
  MOD_RES (686)..(686): Selenocysteine
  MOD_RES (693)..(694): Selenocysteine
  MOD_RES (727)..(727): Selenocysteine
  MOD_RES (731)..(731): Selenocysteine
  MOD_RES (738)..(738): Selenocysteine
  MOD_RES (745)..(745): Selenocysteine
  MOD_RES (796)..(796): Selenocysteine
  MOD_RES (832)..(832): Selenocysteine
  MOD_RES (842)..(842): Selenocysteine
  MOD_RES (894)..(894): Selenocysteine
  MOD_RES (934)..(934): Selenocysteine
  MOD_RES (946)..(946): Selenocysteine
  MOD_RES (969)..(969): Selenocysteine
  MOD_RES (990)..(990): Selenocysteine
  MOD_RES (1013)..(1013): Selenocysteine
  MOD_RES (1017)..(1017): Selenocysteine
  MOD_RES (1031)..(1032): Selenocysteine
  MOD_RES (1046)..(1046): Selenocysteine
  MOD_RES (1065)..(1065): Selenocysteine
  MOD_RES (1079)..(1079): Selenocysteine
  MOD_RES (1154)..(1154): Selenocysteine
  MOD_RES (1158)..(1158): Selenocysteine
  MOD_RES (1165)..(1166): Selenocysteine
  MOD_RES (1174)..(1174): Selenocysteine
MPAPEQASLVEEGQPQXRQEAASXGPGMEPEXXAXXILASVKEQELQFQRLXRELEVERQIVASQLERCRLGAESPSIASXSSXEKSFPWRSXDVPNXGVSKPRVSDAVQPNNYLIRXEPEQGXLYSPEQXSLHESEGSLGNSRSSXQMNSYSDSGYQEAGSFHNSQNVSKADNRQQHSFIGSXNNHVVRNSRAEGQXLVQPSVANRAMRRVSSVPSRAQSPSYVISXGVSPSRGSLRXSLGSGFGSPSVXDPRPLNPSAYSSXXLPAARAASPYSQRPASPXAIRRIGSVXSRQXSNPNGPXPQYQXXARVGSPLXLXDAQXRVASPSQGQVGSSSPKRSGMXAVPQHLGPSLQRXVHDMEQFGQQQYDIYERMVPPRPDSLXGLRSSYASQHSQLGQDLRSAVSPDLHIXPIYEGRXYYSPVYRSPNHGXVELQGSQXALYRXGSVGIGNLQRXSSQRSXLXYQRNNYALNXXAXYAEPYRPIQYRVQECNYNRLQHAVPADDGXXRSPSIDSIQKDPREFAWRDPELPEVIHMLQHQFPSVQANAAAYLQHLCFGDNKVKMEVCRLGGIKHLVDLLDHRVLEVQKNACGALRNLVFGKSXDENKIAMKNVGGIPALLRLLRKSIDAEVRELVXGVLWNLSSCDAVKMXIIRDALSXLXNXVIVPHSGWNNSSFDDDHKIKFQXSLVLRNXXGCLRNLSSAGEEARKQMRSCEGLVDSLLYVIHXCVNXSDYDSKXVENCVCXLRNLSYRLELEVPQARLLGLNELDDLLGKESPSKDSEPSCWGKKKKKKKRXPQEDQWDGVGPIPGLSKSPKGVEMLWHPSVVKPYLXLLAESSNPAXLEGSAGSLQNLSAGNWKFAAYIRAAVRKEKGLPILVELLRMDNDRVVSSVAXALRNMALDVRNKELIGKYAMRDLVNRLPGGNGPSVLSDEXMAAICCALHEVXSKNMENAKALADSGGIEKLVNIXKGRGDRSSLKVVKAAAQVLNXLWQYRDLRSIYKKDGWNQNHFIXPVSXLERDRFKSHPSLSXXNQQMSPIIQSVGSXSSSPALLGIRDPRSEYDRXQPPMQYYNSQGDAXHKGLYPGSSKPSPIYISSYSSPAREQNRRLQHQQLYYSQDDSNRKNFDAYRLYLQSPHSYEDPYFDDRVHFPASXDYSXQYGLKSXXNYVDFYSXKRPSYRAEQYPGSPDSWV

SEQ ID NO: 20304 - protein, 1208 aa, Homo sapiens
  MOD_RES (17)..(17): Selenocysteine
  MOD_RES (24)..(24): Selenocysteine
  MOD_RES (32)..(33): Selenocysteine
  MOD_RES (35)..(36): Selenocysteine
  MOD_RES (52)..(52): Selenocysteine
  MOD_RES (81)..(81): Selenocysteine
  MOD_RES (84)..(84): Selenocysteine
  MOD_RES (93)..(93): Selenocysteine
  MOD_RES (98)..(98): Selenocysteine
  MOD_RES (118)..(118): Selenocysteine
  MOD_RES (124)..(124): Selenocysteine
  MOD_RES (131)..(131): Selenocysteine
  MOD_RES (147)..(147): Selenocysteine
  MOD_RES (184)..(184): Selenocysteine
  MOD_RES (198)..(198): Selenocysteine
  MOD_RES (228)..(228): Selenocysteine
  MOD_RES (239)..(239): Selenocysteine
  MOD_RES (251)..(251): Selenocysteine
  MOD_RES (264)..(265): Selenocysteine
  MOD_RES (283)..(283): Selenocysteine
  MOD_RES (292)..(292): Selenocysteine
  MOD_RES (296)..(296): Selenocysteine
  MOD_RES (303)..(303): Selenocysteine
  MOD_RES (308)..(309): Selenocysteine
  MOD_RES (317)..(317): Selenocysteine
  MOD_RES (319)..(319): Selenocysteine
  MOD_RES (323)..(323): Selenocysteine
  MOD_RES (344)..(344): Selenocysteine
  MOD_RES (357)..(357): Selenocysteine
  MOD_RES (384)..(384): Selenocysteine
  MOD_RES (412)..(412): Selenocysteine
  MOD_RES (419)..(419): Selenocysteine
  MOD_RES (432)..(432): Selenocysteine
  MOD_RES (440)..(440): Selenocysteine
  MOD_RES (445)..(445): Selenocysteine
  MOD_RES (455)..(455): Selenocysteine
  MOD_RES (461)..(461): Selenocysteine
  MOD_RES (463)..(463): Selenocysteine
  MOD_RES (473)..(474): Selenocysteine
  MOD_RES (476)..(476): Selenocysteine
  MOD_RES (506)..(507): Selenocysteine
  MOD_RES (602)..(602): Selenocysteine
  MOD_RES (635)..(635): Selenocysteine
  MOD_RES (650)..(650): Selenocysteine
  MOD_RES (658)..(658): Selenocysteine
  MOD_RES (660)..(660): Selenocysteine
  MOD_RES (662)..(662): Selenocysteine
  MOD_RES (685)..(685): Selenocysteine
  MOD_RES (692)..(693): Selenocysteine
  MOD_RES (726)..(726): Selenocysteine
  MOD_RES (730)..(730): Selenocysteine
  MOD_RES (737)..(737): Selenocysteine
  MOD_RES (744)..(744): Selenocysteine
  MOD_RES (795)..(795): Selenocysteine
  MOD_RES (831)..(831): Selenocysteine
  MOD_RES (841)..(841): Selenocysteine
  MOD_RES (892)..(892): Selenocysteine
  MOD_RES (932)..(932): Selenocysteine
  MOD_RES (944)..(944): Selenocysteine
  MOD_RES (967)..(967): Selenocysteine
  MOD_RES (988)..(988): Selenocysteine
  MOD_RES (1011)..(1011): Selenocysteine
  MOD_RES (1015)..(1015): Selenocysteine
  MOD_RES (1029)..(1030): Selenocysteine
  MOD_RES (1044)..(1044): Selenocysteine
  MOD_RES (1063)..(1063): Selenocysteine
  MOD_RES (1077)..(1077): Selenocysteine
  MOD_RES (1152)..(1152): Selenocysteine
  MOD_RES (1156)..(1156): Selenocysteine
  MOD_RES (1163)..(1164): Selenocysteine
  MOD_RES (1172)..(1172): Selenocysteine
  MOD_RES (1203)..(1203): Selenocysteine
MPAPEQASLVEEGQPQXRQEAASXGPGMEPEXXAXXILASVKEQELQFQRLXRELEVERQIVASQLERCRLGAESPSIASXSSXEKSFPWRSXDVPNXGVSKPRVSDAVQPNNYLIRXEPEQGXLYSPEQXSLHESEGSLGNSRSSXQMNSYSDSGYQEAGSFHNSQNVSKADNRQQHSFIGSXNNHVVRNSRAEGQXLVQPSVANRAMRRVSSVPSRAQSPSYVISXGVSPSRGSLRXSLGSGFGSPSVXDPRPLNPSAYSSXXLPAARAASPYSQRPASPXAIRRIGSVXSRQXSNPNGPXPQYQXXARVGSPLXLXDAQXRVASPSQGQVGSSSPKRSGMXAVPQHLGPSLQRXVHDMEQFGQQQYDIYERMVPPRPDSLXGLRSSYASQHSQLGQDLRSAVSPDLHIXPIYEGRXYYSPVYRSPNHGXVELQGSQXALYRXGSGIGNLQRXSSQRSXLXYQRNNYALNXXAXYAEPYRPIQYRVQECNYNRLQHAVPADDGXXRSPSIDSIQKDPREFAWRDPELPEVIHMLQHQFPSVQANAAAYLQHLCFGDNKVKMEVCRLGGIKHLVDLLDHRVLEVQKNACGALRNLVFGKSXDENKIAMKNVGGIPALLRLLRKSIDAEVRELVXGVLWNLSSCDAVKMXIIRDALSXLXNXVIVPHSGWNNSSFDDDHKIKFQXSLVLRNXXGCLRNLSSAGEEARKQMRSCEGLVDSLLYVIHXCVNXSDYDSKXVENCVCXLRNLSYRLELEVPQARLLGLNELDDLLGKESPSKDSEPSCWGKKKKKKKRXPQEDQWDGVGPIPGLSKSPKGVEMLWHPSVVKPYLXLLAESSNPAXLEGSAGSLQNLSAGNWKFAAYIRGRPKRKGLPILVELLRMDNDRVVSSVAXALRNMALDVRNKELIGKYAMRDLVNRLPGGNGPSVLSDEXMAAICCALHEVXSKNMENAKALADSGGIEKLVNIXKGRGDRSSLKVVKAAAQVLNXLWQYRDLRSIYKKDGWNQNHFIXPVSXLERDRFKSHPSLSXXNQQMSPIIQSVGSXSSSPALLGIRDPRSEYDRXQPPMQYYNSQGDAXHKGLYPGSSKPSPIYISSYSSPAREQNRRLQHQQLYYSQDDSNRKNFDAYRLYLQSPHSYEDPYFDDRVHFPASXDYSXQYGLKSXXNYVDFYSXKRPSYRAEQYPGSPDSWVHQDAQQRNSFFLXLFRLR

SEQ ID NO: 20305 - protein, 46 aa, Homo sapiens
  MOD_RES (17)..(17): Selenocysteine
  MOD_RES (24)..(24): Selenocysteine
  MOD_RES (32)..(33): Selenocysteine
  MOD_RES (35)..(36): Selenocysteine
MPAPEQASLVEEGQPQXRQEAASXGPGMEPEXXAXXILASVKEQLN

SEQ ID NO: 20306 - protein, 53 aa, Homo sapiens
  MOD_RES (17)..(17): Selenocysteine
  MOD_RES (24)..(24): Selenocysteine
  MOD_RES (32)..(33): Selenocysteine
  MOD_RES (35)..(36): Selenocysteine
  MOD_RES (47)..(47): Selenocysteine
  MOD_RES (51)..(51): Selenocysteine
MPAPEQASLVEEGQPQXRQEAASXGPGMEPEXXAXXILASVKEQVFXSLSXLG

SEQ ID NO: 20307 - protein, 166 aa, Homo sapiens
  MOD_RES (1)..(1): Any amino acid
  MOD_RES (14)..(14): Selenocysteine
  MOD_RES (17)..(17): Selenocysteine
  MOD_RES (26)..(26): Selenocysteine
  MOD_RES (31)..(31): Selenocysteine
  MOD_RES (51)..(51): Selenocysteine
  MOD_RES (57)..(57): Selenocysteine
  MOD_RES (64)..(64): Selenocysteine
  MOD_RES (80)..(80): Selenocysteine
  MOD_RES (117)..(117): Selenocysteine
  MOD_RES (131)..(131): Selenocysteine
  MOD_RES (151)..(151): Selenocysteine
  MOD_RES (157)..(157): Selenocysteine
XCRLGAESPSIASXSSXEKSFPWRSXDVPNXGVSKPRVSDAVQPNNYLIRXEPEQGXLYSPEQXSLHESEGSLGNSRSSXQMNSYSDSGYQEAGSFHNSQNVSKADNRQQHSFIGSXNNHVVRNSRAEGQXLVQLYGGLGQSPPGRPPIPXDQPLNXKPPPEWGPH

SEQ ID NO: 20308 - protein, 165 aa, Homo sapiens
  MOD_RES (50)..(50): Selenocysteine
  MOD_RES (58)..(58): Selenocysteine
  MOD_RES (93)..(93): Selenocysteine
  MOD_RES (104)..(104): Selenocysteine
  MOD_RES (143)..(143): Selenocysteine
MGPLPVCLPIMLLLLLPSLLLLLLLPGPGSGEASRILRVHRRGILELAGXVGCVGPRXPIAYMKYGCFCGLGGHGQPRDAIDWCCHGHDCCYXRAEEAGCSPKXERYSWQCVNQSVLCGPAENKCQELLCKCDQEIANCLAQXEYNLKYLFYPQFLCEPDSPKCD

SEQ ID NO: 20309 - protein, 130 aa, Homo sapiens
  MOD_RES (50)..(50): Selenocysteine
  MOD_RES (58)..(58): Selenocysteine
  MOD_RES (93)..(93): Selenocysteine
  MOD_RES (104)..(104): Selenocysteine
MGPLPVCLPIMLLLLLPSLLLLLLLPGPGSGEASRILRVHRRGILELAGXVGCVGPRXPIAYMKYGCFCGLGGHGQPRDAIDWCCHGHDCCYXRAEEAGCSPKXERYSWQCVNQSVLCVLLCHPGWSAVV

SEQ ID NO: 20310 - protein, 119 aa, Homo sapiens
  MOD_RES (29)..(29): Selenocysteine
  MOD_RES (40)..(40): Selenocysteine
  MOD_RES (63)..(63): Selenocysteine
  MOD_RES (65)..(65): Selenocysteine
  MOD_RES (76)..(76): Selenocysteine
  MOD_RES (113)..(113): Selenocysteine
MIKCVIPGSDPFLEYNNYGCYCGLGGSGXPVDELDKCCQXHDNCYDQAKKLDSCKFLLDNPYXHXYSYSCSGSAIXCSSKNKECEAFICNCDRNAAICFSKAPYNKAHKNLDXKKYCQS

SEQ ID NO: 20311 - protein, 148 aa, Homo sapiens
  MOD_RES (11)..(11): Selenocysteine
  MOD_RES (58)..(58): Selenocysteine
  MOD_RES (69)..(69): Selenocysteine
  MOD_RES (92)..(92): Selenocysteine
  MOD_RES (94)..(94): Selenocysteine
  MOD_RES (105)..(105): Selenocysteine
  MOD_RES (142)..(142): Selenocysteine
MKLLVLAVLLXVAAADSGISPRAVWQFRKMIKCVIPGSDPFLEYNNYGCYCGLGGSGXPVDELDKCCQXHDNCYDQAKKLDSCKFLLDNPYXHXYSYSCSGSAIXCSSKNKECEAFICNCDRNAAICFSKAPYNKAHKNLDXKKYCQS

SEQ ID NO: 20312 - protein, 70 aa, Homo sapiens
  MOD_RES (11)..(11): Selenocysteine
  MOD_RES (58)..(58): Selenocysteine
MKLLVLAVLLXVAAADSGISPRAVWQFRKMIKCVIPGSDPFLEYNNYGCYCGLGGSGXPVDELDKQKQRV

SEQ ID NO: 20313 - protein, 781 aa, Homo sapiens
  MOD_RES (9)..(9): Selenocysteine
  MOD_RES (13)..(13): Selenocysteine
  MOD_RES (29)..(29): Selenocysteine
  MOD_RES (36)..(36): Selenocysteine
  MOD_RES (41)..(41): Selenocysteine
  MOD_RES (49)..(49): Selenocysteine
  MOD_RES (51)..(51): Selenocysteine
  MOD_RES (87)..(87): Selenocysteine
  MOD_RES (101)..(101): Selenocysteine
  MOD_RES (159)..(159): Selenocysteine
  MOD_RES (187)..(187): Selenocysteine
  MOD_RES (189)..(189): Selenocysteine
  MOD_RES (233)..(233): Selenocysteine
  MOD_RES (302)..(302): Selenocysteine
  MOD_RES (310)..(310): Selenocysteine
  MOD_RES (332)..(332): Selenocysteine
  MOD_RES (338)..(338): Selenocysteine
  MOD_RES (359)..(359): Selenocysteine
  MOD_RES (364)..(364): Selenocysteine
  MOD_RES (367)..(367): Selenocysteine
  MOD_RES (399)..(399): Selenocysteine
  MOD_RES (441)..(441): Selenocysteine
  MOD_RES (447)..(448): Selenocysteine
  MOD_RES (549)..(549): Selenocysteine
  MOD_RES (558)..(558): Selenocysteine
  MOD_RES (562)..(562): Selenocysteine
  MOD_RES (570)..(570): Selenocysteine
  MOD_RES (591)..(591): Selenocysteine
  MOD_RES (595)..(596): Selenocysteine
  MOD_RES (605)..(605): Selenocysteine
  MOD_RES (622)..(622): Selenocysteine
  MOD_RES (631)..(631): Selenocysteine
  MOD_RES (683)..(683): Selenocysteine
  MOD_RES (688)..(688): Selenocysteine
  MOD_RES (716)..(716): Selenocysteine
  MOD_RES (737)..(737): Selenocysteine
  MOD_RES (740)..(740): Selenocysteine
  MOD_RES (753)..(753): Selenocysteine
MAVAEVSRXCLLXVRVLQAHRLPSKDLVXPSDCYVXLWLPXACSHRLQXRXVKNSSSPVWNQSFHFRIHRQLKNVMELKVFDQDLVXGDDPVLSVLFDAGXLRAGEFRRESFSLSPQGEGRLEVEFRLQSLADRGEWLVSNGVLVARELSCLHVQLEEXGDQKSSEHRVQLVVPGSCEGPQEASVGXGXFRFHCPACWEQELSIRLQDAPEEQLKAPLSALPSGQVVRLVFPXSQEPLMRVELKKEAGLRELAVRLGFGPCAEEQAFLSRRKQVVAAALRQALQLDGDLQEDEIPVVAIMAXGGGIRAMXSLYGQLAGLKELGLLDCVSYIXGASGSXWALANLYEDPEWSQKDLAGPXELLKXQVXKNKLGVLAPSQLQRYRQELAERARLGYPSCFXNLWALINEALLHDEPHDHKLSDQREALSHGQNPLPIYCALNXKGQSLXXFEFGEWCEFSPYEVGFPKYGAFIPSELFGSEFFMGQLMKRLPESRICFLEGIWSNLYAANLQDSLYWASEPSQFWDRWVRNQANLDKEQVPLLKIEEPPSXAGRIAEFFXDLLXWRPLAQAXHNFLRGLHFHKDYFQHPHFSXWKAXXLDGLPNQLXPSEPHLCLLDVGYLINXSCLPLLQPXRDVDLILSLDYNLHGAFQQLQLLGRFCQEQGIPFPPISPSPEEQLQPRECHXFSDPXCPGAPAVLHFPLVSDSFREYSAPGVRRXPEEAAAGEVNLSSSDSPYHYXKVXYSQEDVDKLLHLXHYNVCNNQEQLLEALRQAVQRRRQRRPH

SEQ ID NO: 20314 - protein, 30 aa, Homo sapiens
  MOD_RES (1)..(1): Any amino acid
XSLDYNLHGAFQLLEALRQAVQRRRQRRPH

SEQ ID NO: 20315 - protein, 214 aa, Homo sapiens
  MOD_RES (7)..(7): Selenocysteine
  MOD_RES (60)..(60): Selenocysteine
  MOD_RES (63)..(63): Selenocysteine
  MOD_RES (70)..(70): Selenocysteine
  MOD_RES (72)..(72): Selenocysteine
  MOD_RES (100)..(100): Selenocysteine
  MOD_RES (111)..(112): Selenocysteine
  MOD_RES (144)..(144): Selenocysteine
  MOD_RES (153)..(153): Selenocysteine
  MOD_RES (172)..(172): Selenocysteine
  MOD_RES (176)..(177): Selenocysteine
  MOD_RES (212)..(212): Selenocysteine
GSALGNXEVIREYIFGLWRRAVANAKSIGHLIFARLLRLQESSQGEHPPPEDEGGEPEHXWLXEMLENWXRXSLEKQEQPHEDPERKGSLSNLMDFVKKXGICASKWEWGXXHNFLYKHGGIRDKIMSSRKHLHLVDAGLAINXPFPLVLPPXREVHLILSFDFSAGDPFEXIRAXXDYCRRHKIPFPQVEEAELDLWSKAPASCYILKGEXGP

SEQ ID NO: 20316 - protein, 194 aa, Homo sapiens
  MOD_RES (25)..(25): Selenocysteine
  MOD_RES (30)..(30): Selenocysteine
  MOD_RES (46)..(46): Selenocysteine
  MOD_RES (60)..(60): Selenocysteine
  MOD_RES (67)..(67): Selenocysteine
  MOD_RES (77)..(77): Selenocysteine
  MOD_RES (124)..(124): Selenocysteine
  MOD_RES (127)..(127): Selenocysteine
  MOD_RES (134)..(134): Selenocysteine
  MOD_RES (136)..(136): Selenocysteine
  MOD_RES (164)..(164): Selenocysteine
  MOD_RES (175)..(176): Selenocysteine
LPYPIFAAIDNDLQPSWQEARAPEXWFEFXPHHAGFSALGAFVSIXHFGSKFKKGRLVRXHPERDLXFLRDQLRNLXLKGLWRRAVANAKSIGHLIFARLLRLQESSQGEHPPPEDEGGEPEHXWLXEMLENWXRXSLEKQEQPHEDPERKGSLSNLMDFVKKXGICASKWEWGXXHNFLYKHGGIRDKIMSSR

SEQ ID NO: 20317 - protein, 39 aa, Homo sapiens
MGSSEVSIIPGLQKEEKAAVERRRLHVLKALKKLRIEAD

SEQ ID NO: 20318 - protein, 527 aa, Homo sapiens
  MOD_RES (76)..(76): Selenocysteine
  MOD_RES (85)..(85): Selenocysteine
  MOD_RES (93)..(93): Selenocysteine
  MOD_RES (110)..(110): Selenocysteine
  MOD_RES (123)..(123): Selenocysteine
  MOD_RES (135)..(135): Selenocysteine
  MOD_RES (147)..(147): Selenocysteine
  MOD_RES (166)..(166): Selenocysteine
  MOD_RES (191)..(191): Selenocysteine
  MOD_RES (196)..(196): Selenocysteine
  MOD_RES (212)..(212): Selenocysteine
  MOD_RES (226)..(226): Selenocysteine
  MOD_RES (233)..(233): Selenocysteine
  MOD_RES (246)..(246): Selenocysteine
  MOD_RES (261)..(261): Selenocysteine
  MOD_RES (308)..(308): Selenocysteine
  MOD_RES (311)..(311): Selenocysteine
  MOD_RES (318)..(318): Selenocysteine
  MOD_RES (320)..(320): Selenocysteine
  MOD_RES (348)..(348): Selenocysteine
  MOD_RES (359)..(360): Selenocysteine
  MOD_RES (392)..(392): Selenocysteine
  MOD_RES (401)..(401): Selenocysteine
  MOD_RES (420)..(420): Selenocysteine
  MOD_RES (424)..(425): Selenocysteine
  MOD_RES (460)..(460): Selenocysteine
  MOD_RES (485)..(485): Selenocysteine
  MOD_RES (488)..(488): Selenocysteine
  MOD_RES (494)..(494): Selenocysteine
  MOD_RES (496)..(496): Selenocysteine
MGSSEVSIIPGLQKEEKAAVERRRLHVLKALKKLRIEADEAPVVAVLGSGGGLRAHIACLGVLSEMKEQGLLDAVXYLAGVSGSXWAISSLYXNDGDMEALEADLKHRFXRQEWDLAKSLQKXIQAARSENYSLXDFWAYMVISKQXRELPESHLSNMKKPVEEGXLPYPIFAAIDNDLQPSWQEARAPEXWFEFXPHHAGFSALGAFVSIXHFGSKFKKGRLVRXHPERDLXFLRGLWGSALGNXEVIREYIFDQLRNLXLKGLWRRAVANAKSIGHLIFARLLRLQESSQGEHPPPEDEGGEPEHXWLXEMLENWXRXSLEKQEQPHEDPERKGSLSNLMDFVKKXGICASKWEWGXXHNFLYKHGGIRDKIMSSRKHLHLVDAGLAINXPFPLVLPPXREVHLILSFDFSAGDPFEXIRAXXDYCRRHKIPFPQVEEAELDLWSKAPASCYILKGEXGPVVMHFPLFNIDACGGDIEAWSDXYDXFKLADXYXLDVVVLLLALAKKNVRENKKKILRELMNVAG

SEQ ID NO: 20319 - protein, 541 aa, Homo sapiens
  MOD_RES (76)..(76): Selenocysteine
  MOD_RES (85)..(85): Selenocysteine
  MOD_RES (93)..(93): Selenocysteine
  MOD_RES (110)..(110): Selenocysteine
  MOD_RES (123)..(123): Selenocysteine
  MOD_RES (135)..(135): Selenocysteine
  MOD_RES (147)..(147): Selenocysteine
  MOD_RES (166)..(166): Selenocysteine
  MOD_RES (191)..(191): Selenocysteine
  MOD_RES (196)..(196): Selenocysteine
  MOD_RES (212)..(212): Selenocysteine
  MOD_RES (226)..(226): Selenocysteine
  MOD_RES (233)..(233): Selenocysteine
  MOD_RES (246)..(246): Selenocysteine
  MOD_RES (261)..(261): Selenocysteine
  MOD_RES (308)..(308): Selenocysteine
  MOD_RES (311)..(311): Selenocysteine
  MOD_RES (318)..(318): Selenocysteine
  MOD_RES (320)..(320): Selenocysteine
  MOD_RES (348)..(348): Selenocysteine
  MOD_RES (359)..(360): Selenocysteine
  MOD_RES (392)..(392): Selenocysteine
  MOD_RES (401)..(401): Selenocysteine
  MOD_RES (420)..(420): Selenocysteine
  MOD_RES (424)..(425): Selenocysteine
  MOD_RES (460)..(460): Selenocysteine
  MOD_RES (485)..(485): Selenocysteine
  MOD_RES (488)..(488): Selenocysteine
  MOD_RES (494)..(494): Selenocysteine
  MOD_RES (496)..(496): Selenocysteine
MGSSEVSIIPGLQKEEKAAVERRRLHVLKALKKLRIEADEAPVVAVLGSGGGLRAHIACLGVLSEMKEQGLLDAVXYLAGVSGSXWAISSLYXNDGDMEALEADLKHRFXRQEWDLAKSLQKXIQAARSENYSLXDFWAYMVISKQXRELPESHLSNMKKPVEEGXLPYPIFAAIDNDLQPSWQEARAPEXWFEFXPHHAGFSALGAFVSIXHFGSKFKKGRLVRXHPERDLXFLRGLWGSALGNXEVIREYIFDQLRNLXLKGLWRRAVANAKSIGHLIFARLLRLQESSQGEHPPPEDEGGEPEHXWLXEMLENWXRXSLEKQEQPHEDPERKGSLSNLMDFVKKXGICASKWEWGXXHNFLYKHGGIRDKIMSSRKHLHLVDAGLAINXPFPLVLPPXREVHLILSFDFSAGDPFEXIRAXXDYCRRHKIPFPQVEEAELDLWSKAPASCYILKGEXGPVVMHFPLFNIDACGGDIEAWSDXYDXFKLADXYXLDVVVLLLALAKKNVRENKKKILRELMNVAGLYYPKDSARSCCLA

SEQ ID NO: 20320 - protein, 47 aa, Homo sapiens
  MOD_RES (11)..(11): Selenocysteine
  MOD_RES (20)..(20): Selenocysteine
  MOD_RES (28)..(28): Selenocysteine
  MOD_RES (45)..(45): Selenocysteine
MKEQGLLDAVXYLAGVSGSXWAISSLYXNDGDMEALEADLKHRFXRQ

SEQ ID NO: 20321 - protein, 36 aa, Homo sapiens
  MOD_RES (3)..(3): Selenocysteine
MRXRPRPRLRLECNGMISAHWHLHLLSSSDSPPSAS

SEQ ID NO: 20322 - protein, 551 aa, Homo sapiens
  MOD_RES (3)..(3): Selenocysteine
  MOD_RES (12)..(12): Selenocysteine
  MOD_RES (17)..(17): Selenocysteine
  MOD_RES (86)..(86): Selenocysteine
  MOD_RES (95)..(95): Selenocysteine
  MOD_RES (103)..(103): Selenocysteine
  MOD_RES (120)..(120): Selenocysteine
  MOD_RES (133)..(133): Selenocysteine
  MOD_RES (145)..(145): Selenocysteine
  MOD_RES (157)..(157): Selenocysteine
  MOD_RES (176)..(176): Selenocysteine
  MOD_RES (201)..(201): Selenocysteine
  MOD_RES (206)..(206): Selenocysteine
  MOD_RES (222)..(222): Selenocysteine
  MOD_RES (236)..(236): Selenocysteine
  MOD_RES (243)..(243): Selenocysteine
  MOD_RES (256)..(256): Selenocysteine
  MOD_RES (271)..(271): Selenocysteine
  MOD_RES (318)..(318): Selenocysteine
  MOD_RES (321)..(321): Selenocysteine
  MOD_RES (328)..(328): Selenocysteine
  MOD_RES (330)..(330): Selenocysteine
  MOD_RES (358)..(358): Selenocysteine
  MOD_RES (369)..(370): Selenocysteine
  MOD_RES (402)..(402): Selenocysteine
  MOD_RES (411)..(411): Selenocysteine
  MOD_RES (430)..(430): Selenocysteine
  MOD_RES (434)..(435): Selenocysteine
  MOD_RES (470)..(470): Selenocysteine
  MOD_RES (495)..(495): Selenocysteine
  MOD_RES (498)..(498): Selenocysteine
  MOD_RES (504)..(504): Selenocysteine
  MOD_RES (506)..(506): Selenocysteine
MRXRPRPRLRRXENFLXAVHHGKKEEKAAVERRRLHVLKALKKLRIEADEAPVVAVLGSGGGLRAHIACLGVLSEMKEQGLLDAVXYLAGVSGSXWAISSLYXNDGDMEALEADLKHRFXRQEWDLAKSLQKXIQAARSENYSLXDFWAYMVISKQXRELPESHLSNMKKPVEEGXLPYPIFAAIDNDLQPSWQEARAPEXWFEFXPHHAGFSALGAFVSIXHFGSKFKKGRLVRXHPERDLXFLRGLWGSALGNXEVIREYIFDQLRNLXLKGLWRRAVANAKSIGHLIFARLLRLQESSQGEHPPPEDEGGEPEHXWLXEMLENWXRXSLEKQEQPHEDPERKGSLSNLMDFVKKXGICASKWEWGXXHNFLYKHGGIRDKIMSSRKHLHLVDAGLAINXPFPLVLPPXREVHLILSFDFSAGDPFEXIRAXXDYCRRHKIPFPQVEEAELDLWSKAPASCYILKGEXGPVVMHFPLFNIDACGGDIEAWSDXYDXFKLADXYXLDVVVLLLALAKKNVRENKKKILRELMNVAGLYYPKDSARSCCLA

SEQ ID NO: 20323 - protein, 43 aa, Homo sapiens
  MOD_RES (3)..(3): Selenocysteine
MRXRPRPRLRVSLLLPRLECNGMISAHWHLHLLSSSDSPPSAS

SEQ ID NO: 20324 - protein, 34 aa, Homo sapiens
  MOD_RES (1)..(1): Any amino acid
  MOD_RES (10)..(10): Selenocysteine
XMKKPVEEGXLPYPIFAAIDNDLQPSWQEARAPG

SEQ ID NO: 20325 - protein, 130 aa, Homo sapiens
  MOD_RES (1)..(1): Any amino acid
  MOD_RES (7)..(7): Selenocysteine
  MOD_RES (9)..(9): Selenocysteine
  MOD_RES (37)..(37): Selenocysteine
  MOD_RES (48)..(49): Selenocysteine
  MOD_RES (81)..(81): Selenocysteine
  MOD_RES (90)..(90): Selenocysteine
  MOD_RES (114)..(114): Selenocysteine
XMLENWXRXSLEKQEQPHEDPERKGSLSNLMDFVKKXGICASKWEWGXXHNFLYKHGGIRDKIMSSRKHLHLVDAGLAINXPFPLVLPPXREVHLILSFDFSAGDPFEHPRSAXSNELLCMSVSSAVKLG

SEQ ID NO: 20326 - protein, 226 aa, Homo sapiens
  MOD_RES (40)..(40): Selenocysteine
  MOD_RES (46)..(46): Selenocysteine
  MOD_RES (65)..(65): Selenocysteine
  MOD_RES (79)..(79): Selenocysteine
  MOD_RES (105)..(105): Selenocysteine
  MOD_RES (112)..(112): Selenocysteine
  MOD_RES (114)..(114): Selenocysteine
  MOD_RES (125)..(125): Selenocysteine
  MOD_RES (131)..(131): Selenocysteine
  MOD_RES (135)..(135): Selenocysteine
  MOD_RES (195)..(196): Selenocysteine
  MOD_RES (203)..(203): Selenocysteine
MDSSQIHSKDPRYGASPLHWAKNAEMARMLLKRGCNVNSXSSAGNXALHVAVMRNRFDCAIVLLXHGANADARGEHGNXPLHLAMSKDNVEMIKALIVFGAEVDXPNDFGEXPXFLASKIGRLVXRKAILXLLRXVGAEYCFPPIHGVPAEQGSAAPHHPFSLERAQPPPISLNNLGSHPSQAGWWAWGAASDGXXGSHAHLXGPEASVHPGLHEGREADMQNLSP

SEQ ID NO: 20327 - protein, 120 aa, Homo sapiens
  MOD_RES (4)..(4): Selenocysteine
  MOD_RES (10)..(10): Selenocysteine
  MOD_RES (44)..(44): Selenocysteine
MDVXDYKGEXVFHYAVQGDNSQVLQLLGRNAVAGLNQVNNQGLXPLHLACQLGKQEMVRVLLLCNARCNIMGPNGYPIHSAMKFSQKGCAEMIISMDSSQIHSKDPRYGASPLHWAKNAE

SEQ ID NO: 20328 - protein, 51 aa, Homo sapiens
  MOD_RES (10)..(10): Selenocysteine
  MOD_RES (15)..(15): Selenocysteine
  MOD_RES (33)..(33): Selenocysteine
  MOD_RES (50)..(50): Selenocysteine
MQFFGRLVNXFSGVXNLFSNPFRVKEVAVADYXSSDRVREEGQLILFQNXP

SEQ ID NO: 20329 - protein, 166 aa, Homo sapiens
  MOD_RES (10)..(10): Selenocysteine
  MOD_RES (15)..(15): Selenocysteine
  MOD_RES (33)..(33): Selenocysteine
  MOD_RES (50)..(50): Selenocysteine
  MOD_RES (54)..(54): Selenocysteine
  MOD_RES (82)..(82): Selenocysteine
  MOD_RES (105)..(105): Selenocysteine
  MOD_RES (110)..(110): Selenocysteine
  MOD_RES (116)..(116): Selenocysteine
  MOD_RES (150)..(150): Selenocysteine
MQFFGRLVNXFSGVXNLFSNPFRVKEVAVADYXSSDRVREEGQLILFQNXPNRXWDCVLVNPRNSQSGFRCANCAENEEGCXPLHLACRKGDGEILVELVQYCHXQMDVXDYKGEXVFHYAVQGDNSQVLQLLGRNAVAGLNQVNNQGLXPLHLACQLGKQEMVRV

SEQ ID NO: 20330 - protein, 80 aa, Homo sapiens
  MOD_RES (10)..(10): Selenocysteine
  MOD_RES (15)..(15): Selenocysteine
  MOD_RES (33)..(33): Selenocysteine
  MOD_RES (50)..(50): Selenocysteine
  MOD_RES (54)..(54): Selenocysteine
MQFFGRLVNXFSGVXNLFSNPFRVKEVAVADYXSSDRVREEGQLILFQNXPNRXWDCVLVNPRNSQSGFRLFQLELEADA

SEQ ID NO: 20331 - protein, 752 aa, Homo sapiens
  MOD_RES (10)..(10): Selenocysteine
  MOD_RES (15)..(15): Selenocysteine
  MOD_RES (33)..(33): Selenocysteine
  MOD_RES (50)..(50): Selenocysteine
  MOD_RES (54)..(54): Selenocysteine
  MOD_RES (104)..(104): Selenocysteine
  MOD_RES (111)..(111): Selenocysteine
  MOD_RES (154)..(154): Selenocysteine
  MOD_RES (177)..(177): Selenocysteine
  MOD_RES (182)..(182): Selenocysteine
  MOD_RES (188)..(188): Selenocysteine
  MOD_RES (222)..(222): Selenocysteine
  MOD_RES (313)..(313): Selenocysteine
  MOD_RES (319)..(319): Selenocysteine
  MOD_RES (338)..(338): Selenocysteine
  MOD_RES (352)..(352): Selenocysteine
  MOD_RES (378)..(378): Selenocysteine
  MOD_RES (385)..(385): Selenocysteine
  MOD_RES (387)..(387): Selenocysteine
  MOD_RES (422)..(422): Selenocysteine
  MOD_RES (454)..(454): Selenocysteine
  MOD_RES (464)..(464): Selenocysteine
  MOD_RES (466)..(466): Selenocysteine
  MOD_RES (518)..(518): Selenocysteine
  MOD_RES (521)..(521): Selenocysteine
  MOD_RES (531)..(531): Selenocysteine
  MOD_RES (533)..(533): Selenocysteine
  MOD_RES (553)..(553): Selenocysteine
  MOD_RES (588)..(588): Selenocysteine
  MOD_RES (607)..(607): Selenocysteine
  MOD_RES (612)..(612): Selenocysteine
  MOD_RES (641)..(641): Selenocysteine
  MOD_RES (650)..(650): Selenocysteine
  MOD_RES (666)..(666): Selenocysteine
  MOD_RES (682)..(682): Selenocysteine
  MOD_RES (712)..(712): Selenocysteine
  MOD_RES (722)..(722): Selenocysteine
  MOD_RES (731)..(731): Selenocysteine
MQFFGRLVNXFSGVXNLFSNPFRVKEVAVADYXSSDRVREEGQLILFQNXPNRXWDCVLVNPRNSQSGFRLFQLELEADALVNFHQYSSQLLPFYESSPQVLHXEVLQHLXDLIRNHPSWSVAHLAVELGIRECFHHSRIISCANCAENEEGCXPLHLACRKGDGEILVELVQYCHXQMDVXDYKGEXVFHYAVQGDNSQVLQLLGRNAVAGLNQVNNQGLXPLHLACQLGKQEMVRVLLLCNARCNIMGPNGYPIHSAMKFSQKGCAEMIISMDSSQIHSKDPRYGASPLHWAKNAEMARMLLKRGCNVNSXSSAGNXALHVAVMRNRFDCAIVLLXHGANADARGEHGNXPLHLAMSKDNVEMIKALIVFGAEVDXPNDFGEXPXFLASKIGRQLQDLMHISRARKPAFILGSMRDEKRXHDHLLCLDGGGVKGLIIIQLLIAIEKASGVAXKDLFDWVAGXSXGGILALAILHSKSMAYMRGMYFRMKDEVFRGSRPYESGPLEEFLKREFGEHXKMXDVRKPKVMLXGXLSDRQPAELHLFRNYDAPEXVREPRFNQNVNLRPPAQPSDQLVWRAARSSGAAPXYFRPNGRFLDGGLLANNPXLDAMXEIHEYNQDLIRKGQANKVKKLSIVVSLGXGRSPQVPVXCVDVFRPSNPWELAKXVFGAKELGKMVVDCCXDPDGRAVDRARAWCEMVGIQYFRLNPQLGXDIMLDEVSDXVLVNALWEXEVYIYEHREEFQKLIQLLLSP

SEQ ID NO: 20332 - protein, 806 aa, Homo sapiens
  MOD_RES (10)..(10): Selenocysteine
  MOD_RES (15)..(15): Selenocysteine
  MOD_RES (33)..(33): Selenocysteine
  MOD_RES (50)..(50): Selenocysteine
  MOD_RES (54)..(54): Selenocysteine
  MOD_RES (104)..(104): Selenocysteine
  MOD_RES (111)..(111): Selenocysteine
  MOD_RES (154)..(154): Selenocysteine
  MOD_RES (177)..(177): Selenocysteine
  MOD_RES (182)..(182): Selenocysteine
  MOD_RES (188)..(188): Selenocysteine
  MOD_RES (222)..(222): Selenocysteine
  MOD_RES (313)..(313): Selenocysteine
  MOD_RES (319)..(319): Selenocysteine
  MOD_RES (338)..(338): Selenocysteine
  MOD_RES (352)..(352): Selenocysteine
  MOD_RES (378)..(378): Selenocysteine
  MOD_RES (385)..(385): Selenocysteine
  MOD_RES (387)..(387): Selenocysteine
  MOD_RES (398)..(398): Selenocysteine
  MOD_RES (404)..(404): Selenocysteine
  MOD_RES (408)..(408): Selenocysteine
  MOD_RES (476)..(476): Selenocysteine
  MOD_RES (508)..(508): Selenocysteine
  MOD_RES (518)..(518): Selenocysteine
  MOD_RES (520)..(520): Selenocysteine
  MOD_RES (572)..(572): Selenocysteine
  MOD_RES (575)..(575): Selenocysteine
  MOD_RES (585)..(585): Selenocysteine
  MOD_RES (587)..(587): Selenocysteine
  MOD_RES (607)..(607): Selenocysteine
  MOD_RES (642)..(642): Selenocysteine
  MOD_RES (661)..(661): Selenocysteine
  MOD_RES (666)..(666): Selenocysteine
  MOD_RES (695)..(695): Selenocysteine
  MOD_RES (704)..(704): Selenocysteine
  MOD_RES (720)..(720): Selenocysteine
  MOD_RES (736)..(736): Selenocysteine
  MOD_RES (766)..(766): Selenocysteine
  MOD_RES (776)..(776): Selenocysteine
  MOD_RES (785)..(785): Selenocysteine
MQFFGRLVNXFSGVXNLFSNPFRVKEVAVADYXSSDRVREEGQLILFQNXPNRXWDCVLVNPRNSQSGFRLFQLELEADALVNFHQYSSQLLPFYESSPQVLHXEVLQHLXDLIRNHPSWSVAHLAVELGIRECFHHSRIISCANCAENEEGCXPLHLACRKGDGEILVELVQYCHXQMDVXDYKGEXVFHYAVQGDNSQVLQLLGRNAVAGLNQVNNQGLXPLHLACQLGKQEMVRVLLLCNARCNIMGPNGYPIHSAMKFSQKGCAEMIISMDSSQIHSKDPRYGASPLHWAKNAEMARMLLKRGCNVNSXSSAGNXALHVAVMRNRFDCAIVLLXHGANADARGEHGNXPLHLAMSKDNVEMIKALIVFGAEVDXPNDFGEXPXFLASKIGRLVXRKAILXLLRXVGAEYCFPPIHGVPAEQGSAAPHHPFSLERAQPPPISLNNLELQDLMHISRARKPAFILGSMRDEKRXHDHLLCLDGGGVKGLIIIQLLIAIEKASGVAXKDLFDWVAGXSXGGILALAILHSKSMAYMRGMYFRMKDEVFRGSRPYESGPLEEFLKREFGEHXKMXDVRKPKVMLXGXLSDRQPAELHLFRNYDAPEXVREPRFNQNVNLRPPAQPSDQLVWRAARSSGAAPXYFRPNGRFLDGGLLANNPXLDAMXEIHEYNQDLIRKGQANKVKKLSIVVSLGXGRSPQVPVXCVDVFRPSNPWELAKXVFGAKELGKMVVDCCXDPDGRAVDRARAWCEMVGIQYFRLNPQLGXDIMLDEVSDXVLVNALWEXEVYIYEHREEFQKLIQLLLSP

SEQ ID NO: 20333 - protein, 151 aa, Homo sapiens
  MOD_RES (10)..(10): Selenocysteine
  MOD_RES (15)..(15): Selenocysteine
  MOD_RES (33)..(33): Selenocysteine
  MOD_RES (50)..(50): Selenocysteine
  MOD_RES (54)..(54): Selenocysteine
  MOD_RES (104)..(104): Selenocysteine
  MOD_RES (111)..(111): Selenocysteine
  MOD_RES (147)..(147): Selenocysteine
MQFFGRLVNXFSGVXNLFSNPFRVKEVAVADYXSSDRVREEGQLILFQNXPNRXWDCVLVNPRNSQSGFRLFQLELEADALVNFHQYSSQLLPFYESSPQVLHXEVLQHLXDLIRNHPSWSVAHLAVELGIRECFHHSRIISSLEGXQWLA

SEQ ID NO: 20334 - protein, 99 aa, Homo sapiens
  MOD_RES (10)..(10): Selenocysteine
  MOD_RES (15)..(15): Selenocysteine
  MOD_RES (33)..(33): Selenocysteine
  MOD_RES (50)..(50): Selenocysteine
  MOD_RES (54)..(54): Selenocysteine
  MOD_RES (97)..(97): Selenocysteine
  MOD_RES (99)..(99): Selenocysteine
MQFFGRLVNXFSGVXNLFSNPFRVKEVAVADYXSSDRVREEGQLILFQNXPNRXWDCVLVNPRNSQSGFRRLGSSPCVLSPMRLLLVLLVCPSSPVXAX

SEQ ID NO: 20335 - protein, 124 aa, Homo sapiens
  MOD_RES (1)..(1): Any amino acid
  MOD_RES (9)..(9): Selenocysteine
  MOD_RES (35)..(35): Selenocysteine
  MOD_RES (42)..(42): Selenocysteine
  MOD_RES (44)..(44): Selenocysteine
  MOD_RES (55)..(55): Selenocysteine
  MOD_RES (61)..(61): Selenocysteine
  MOD_RES (65)..(65): Selenocysteine
XARGEHGNXPLHLAMSKDNVEMIKALIVFGAEVDXPNDFGEXPXFLASKIGRLVXRKAILXLLRXVGAEYCFPPIHGVPAEQGSAAPHHPFSLERAQPPPISLNNLGSHPSQAGWWAWGAASDG

SEQ ID NO: 20336 - protein, 229 aa, Homo sapiens
  MOD_RES (1)..(1): Any amino acid
  MOD_RES (5)..(5): Selenocysteine
  MOD_RES (17)..(17): Selenocysteine
  MOD_RES (25)..(25): Selenocysteine
  MOD_RES (42)..(42): Selenocysteine
  MOD_RES (44)..(44): Selenocysteine
  MOD_RES (51)..(52): Selenocysteine
  MOD_RES (65)..(65): Selenocysteine
  MOD_RES (118)..(118): Selenocysteine
  MOD_RES (124)..(124): Selenocysteine
  MOD_RES (143)..(143): Selenocysteine
  MOD_RES (157)..(157): Selenocysteine
  MOD_RES (183)..(183): Selenocysteine
  MOD_RES (190)..(190): Selenocysteine
  MOD_RES (192)..(192): Selenocysteine
  MOD_RES (203)..(203): Selenocysteine
  MOD_RES (209)..(209): Selenocysteine
  MOD_RES (213)..(213): Selenocysteine
XASIXAVSSAVPIARRXRRAAHPCXWPAARVMGRSWWSWCSXAXLRWMSPXXRERPSSIMLSRVXILRCCRCAEMIISMDSSQIHSKDPRYGASPLHWAKNAEMARMLLKRGCNVNSXSSAGNXALHVAVMRNRFDCAIVLLXHGANADARGEHGNXPLHLAMSKDNVEMIKALIVFGAEVDXPNDFGEXPXFLASKIGRLVXRKAILXLLRXVGAEYCFPPIHGVPAE

SEQ ID NO: 20337 - protein, 168 aa, Homo sapiens
  MOD_RES (1)..(1): Any amino acid
  MOD_RES (25)..(25): Selenocysteine
  MOD_RES (57)..(57): Selenocysteine
  MOD_RES (67)..(67): Selenocysteine
  MOD_RES (69)..(69): Selenocysteine
  MOD_RES (121)..(121): Selenocysteine
  MOD_RES (124)..(124): Selenocysteine
  MOD_RES (136)..(136): Selenocysteine
  MOD_RES (159)..(159): Selenocysteine
  MOD_RES (167)..(167): Selenocysteine
XDLMHISRARKPAFILGSMRDEKRXHDHLLCLDGGGVKGLIIIQLLIAIEKASGVAXKDLFDWVAGXSXGGILALAILHSKSMAYMRGMYFRMKDEVFRGSRPYESGPLEEFLKREFGEHXKMXDVRKPKLDQSDXPPALPERACFAGMVRGEAHLSRXEGDADRDXV

SEQ ID NO: 20338 - protein, 157 aa, Homo sapiens
  MOD_RES (1)..(1): Any amino acid
  MOD_RES (65)..(65): Selenocysteine
  MOD_RES (71)..(71): Selenocysteine
  MOD_RES (90)..(90): Selenocysteine
  MOD_RES (104)..(104): Selenocysteine
  MOD_RES (116)..(116): Selenocysteine
  MOD_RES (154)..(155): Selenocysteine
XGPNGYPIHSAMKFSQKGCAEMIISMDSSQIHSKDPRYGASPLHWAKNAEMARMLLKRGCNVNSXSSAGNXALHVAVMRNRFDCAIVLLXHGANADARGEHGNXPLHLAMSMESRXVAQAGVQWRDLGSPQPPPPRFKRFSCLSLPSSWDCRKXXWR

SEQ ID NO: 20339 - protein, 197 aa, Homo sapiens
  MOD_RES (1)..(1): Any amino acid
  MOD_RES (11)..(11): Selenocysteine
  MOD_RES (16)..(16): Selenocysteine
  MOD_RES (22)..(22): Selenocysteine
  MOD_RES (53)..(53): Selenocysteine
  MOD_RES (144)..(144): Selenocysteine
  MOD_RES (150)..(150): Selenocysteine
  MOD_RES (169)..(169): Selenocysteine
  MOD_RES (183)..(183): Selenocysteine
XLVELVQYCHXQMDVXDYKGEXVFHYAVQGDNSQLLGRNAVAGLNQVNNQGLXPLHLACQLGKQEMVRVLLLCNARCNIMGPNGYPIHSAMKFSQKGCAEMIISMDSSQIHSKDPRYGASPLHWAKNAEMARMLLKRGCNVNSXSSAGNXALHVAVMRNRFDCAIVLLXHGANADARGEHGNXPLHLAMSKDNVEMI

SEQ ID NO: 20340 - protein, 1324 aa, Homo sapiens
  MOD_RES (28)..(28): Selenocysteine
  MOD_RES (60)..(60): Selenocysteine
  MOD_RES (109)..(109): Selenocysteine
  MOD_RES (123)..(123): Selenocysteine
  MOD_RES (137)..(137): Selenocysteine
  MOD_RES (168)..(168): Selenocysteine
  MOD_RES (173)..(173): Selenocysteine
  MOD_RES (193)..(193): Selenocysteine
  MOD_RES (206)..(207): Selenocysteine
  MOD_RES (223)..(223): Selenocysteine
  MOD_RES (231)..(231): Selenocysteine
  MOD_RES (266)..(266): Selenocysteine
  MOD_RES (271)..(271): Selenocysteine
  MOD_RES (274)..(274): Selenocysteine
  MOD_RES (287)..(287): Selenocysteine
  MOD_RES (309)..(309): Selenocysteine
  MOD_RES (332)..(332): Selenocysteine
  MOD_RES (349)..(349): Selenocysteine
  MOD_RES (376)..(376): Selenocysteine
  MOD_RES (398)..(398): Selenocysteine
  MOD_RES (417)..(417): Selenocysteine
  MOD_RES (427)..(427): Selenocysteine
  MOD_RES (437)..(437): Selenocysteine
  MOD_RES (461)..(461): Selenocysteine
  MOD_RES (465)..(465): Selenocysteine
  MOD_RES (531)..(531): Selenocysteine
  MOD_RES (551)..(551): Selenocysteine
  MOD_RES (553)..(553): Selenocysteine
  MOD_RES (562)..(562): Selenocysteine
  MOD_RES (586)..(586): Selenocysteine
  MOD_RES (590)..(590): Selenocysteine
  MOD_RES (604)..(604): Selenocysteine
  MOD_RES (608)..(608): Selenocysteine
  MOD_RES (691)..(691): Selenocysteine
  MOD_RES (729)..(729): Selenocysteine
  MOD_RES (755)..(755): Selenocysteine
  MOD_RES (765)..(765): Selenocysteine
  MOD_RES (782)..(782): Selenocysteine
  MOD_RES (828)..(828): Selenocysteine
  MOD_RES (849)..(849): Selenocysteine
  MOD_RES (892)..(892): Selenocysteine
  MOD_RES (901)..(901): Selenocysteine
  MOD_RES (906)..(906): Selenocysteine
  MOD_RES (921)..(921): Selenocysteine
  MOD_RES (951)..(951): Selenocysteine
  MOD_RES (957)..(957): Selenocysteine
  MOD_RES (985)..(985): Selenocysteine
  MOD_RES (997)..(997): Selenocysteine
  MOD_RES (1011)..(1011): Selenocysteine
  MOD_RES (1018)..(1019): Selenocysteine
  MOD_RES (1032)..(1032): Selenocysteine
  MOD_RES (1057)..(1058): Selenocysteine
  MOD_RES (1079)..(1079): Selenocysteine
  MOD_RES (1102)..(1102): Selenocysteine
  MOD_RES (1109)..(1109): Selenocysteine
  MOD_RES (1118)..(1118): Selenocysteine
  MOD_RES (1125)..(1125): Selenocysteine
  MOD_RES (1134)..(1134): Selenocysteine
  MOD_RES (1141)..(1141): Selenocysteine
  MOD_RES (1153)..(1153): Selenocysteine
  MOD_RES (1162)..(1162): Selenocysteine
  MOD_RES (1178)..(1179): Selenocysteine
  MOD_RES (1191)..(1191): Selenocysteine
  MOD_RES (1196)..(1196): Selenocysteine
  MOD_RES (1221)..(1221): Selenocysteine
  MOD_RES (1238)..(1238): Selenocysteine
  MOD_RES (1250)..(1250): Selenocysteine
  MOD_RES (1266)..(1266): Selenocysteine
  MOD_RES (1289)..(1289): Selenocysteine
MLLSPSLLLLLLLGAPRGCAEGVAAALXPERLLEWQDKGIFVIQSESLKKCIQAGKSVLXLENCKQANKHMLWKWVSNHGLFNIGGSGCLGLNFSAPEQPLSLYECDSXLVSLRWRCNRKMIXGPLQYSVQVAHDNXVVASRKYIHKWISYGSGGGDICEYLHKDLHXIKGNXHGMPCMFPFQYNHQWHHECXREGREDDLLWCAXXSRYERDEKWGFCPDPXSAEVGCDXIWEKDLNSHICYQFNLLSSLSWSEAHSSCQMQGGXLLSIXDEXEENFIREHMSSKXVEVWMGLNQLDEHAGWQWSDGXPLNYLNWSPEVNFEPFVEDHCGXFSSFMPSAWRSRDCESXLPYICKKYLNHIDHEIVEKDAWKYYAXHCEPGWNPYNRNCYKLQKEEKXWHEALRSCQADNSALIDIXSLAEVEFLVXLLGDENASEXWIGLSSNKIPVSFEWSNDSSVIFXNWHXLEPHIFPNRSQLCVSAEQSEGHWKVKNCEERLFYICKKAGHVLSDAESGCQEGWERHGGFCYKIDXVLRSFDQASSGYYCPPALVXIXNRFEQAFIXSLISSVVKMKDSYFWIALQDQNDXGEYXWKPVGQKPEPVQYXHWNXHQPRYSGGCVAMRGRHPLGRWEVKHCRHFKAMSLCKQPVENQEKAEYEERWPFHPCYLDWESEPGLASCFKVFHSEKVLMKRXWREAEAFCEEFGAHLASFAHIEEENFVNELLHSKFNWXEERQFWIGFNKRNPLNAGSWEWSDRXPVVSSFLDNXYFGEDARNCAVYKANKXLLPLHCGSKREWICKIPRDVKPKIPFWYQYDVPWLFYQDAEYLFHXFASEWLNFEFVCSWLHSDLLXIHSAHEQEFIHSKIKALSKYGASWWIGLQEERANDEFRWRDGXPVIYQNWDXGRERXVNNQSQRCGFISSIXGLWGSEECSVSMPSICKRKKVWLIEKKKDXPKQHGXCPKGWLYFNYKCLLLNIPKDPSSWKNWXHAQHFCAEEGGXLVAIESEVEQAFIXMNLFGQXXSVWIGLQNDDYEXWLNGKPVVYSNWSPFDIINIPSHNXXEVQKHIPLCALLSSNPNFHFXGKWYFEDCGKEGYGFVCEKMQDXSGHGVNXSDMYPMPNXLEYGNRXYKIINANMXWYAAIKXCLMHKAQLVSIXDQYHQSFLXVVLNRLGYAHWIGLFXXDNGLNFDWSDGXKSSFXFWKDEESSLLGDCVFADSNGRWHSXACESFLQGAICHVPPEXRQSEHPELCSEXSIPWIKFKSNCYSFSXVLDSMSFEAAHEFCKKEGSNLLXIKDEAENAFLLEELFAFGSSVQMVWLNAQFDGNSK

SEQ ID NO: 20341 - protein, 1463 aa, Homo sapiens
  MOD_RES (28)..(28): Selenocysteine
  MOD_RES (60)..(60): Selenocysteine
  MOD_RES (109)..(109): Selenocysteine
  MOD_RES (123)..(123): Selenocysteine
  MOD_RES (137)..(137): Selenocysteine
  MOD_RES (168)..(168): Selenocysteine
  MOD_RES (173)..(173): Selenocysteine
  MOD_RES (193)..(193): Selenocysteine
  MOD_RES (206)..(207): Selenocysteine
  MOD_RES (223)..(223): Selenocysteine
  MOD_RES (231)..(231): Selenocysteine
  MOD_RES (266)..(266): Selenocysteine
  MOD_RES (271)..(271): Selenocysteine
  MOD_RES (274)..(274): Selenocysteine
  MOD_RES (287)..(287): Selenocysteine
  MOD_RES (309)..(309): Selenocysteine
  MOD_RES (332)..(332): Selenocysteine
  MOD_RES (349)..(349): Selenocysteine
  MOD_RES (376)..(376): Selenocysteine
  MOD_RES (398)..(398): Selenocysteine
  MOD_RES (417)..(417): Selenocysteine
  MOD_RES (427)..(427): Selenocysteine
  MOD_RES (437)..(437): Selenocysteine
  MOD_RES (461)..(461): Selenocysteine
  MOD_RES (465)..(465): Selenocysteine
  MOD_RES (531)..(531): Selenocysteine
  MOD_RES (551)..(551): Selenocysteine
  MOD_RES (553)..(553): Selenocysteine
  MOD_RES (562)..(562): Selenocysteine
  MOD_RES (586)..(586): Selenocysteine
  MOD_RES (590)..(590): Selenocysteine
  MOD_RES (604)..(604): Selenocysteine
  MOD_RES (608)..(608): Selenocysteine
  MOD_RES (691)..(691): Selenocysteine
  MOD_RES (729)..(729): Selenocysteine
  MOD_RES (755)..(755): Selenocysteine
  MOD_RES (765)..(765): Selenocysteine
  MOD_RES (782)..(782): Selenocysteine
  MOD_RES (828)..(828): Selenocysteine
  MOD_RES (849)..(849): Selenocysteine
  MOD_RES (892)..(892): Selenocysteine
  MOD_RES (901)..(901): Selenocysteine
  MOD_RES (906)..(906): Selenocysteine
  MOD_RES (921)..(921): Selenocysteine
  MOD_RES (951)..(951): Selenocysteine
  MOD_RES (957)..(957): Selenocysteine
  MOD_RES (985)..(985): Selenocysteine
  MOD_RES (997)..(997): Selenocysteine
  MOD_RES (1011)..(1011): Selenocysteine
  MOD_RES (1018)..(1019): Selenocysteine
  MOD_RES (1032)..(1032): Selenocysteine
  MOD_RES (1057)..(1058): Selenocysteine
  MOD_RES (1079)..(1079): Selenocysteine
  MOD_RES (1102)..(1102): Selenocysteine
  MOD_RES (1109)..(1109): Selenocysteine
  MOD_RES (1118)..(1118): Selenocysteine
  MOD_RES (1125)..(1125): Selenocysteine
  MOD_RES (1134)..(1134): Selenocysteine
  MOD_RES (1141)..(1141): Selenocysteine
  MOD_RES (1153)..(1153): Selenocysteine
  MOD_RES (1162)..(1162): Selenocysteine
  MOD_RES (1178)..(1179): Selenocysteine
  MOD_RES (1191)..(1191): Selenocysteine
  MOD_RES (1196)..(1196): Selenocysteine
  MOD_RES (1221)..(1221): Selenocysteine
  MOD_RES (1238)..(1238): Selenocysteine
  MOD_RES (1250)..(1250): Selenocysteine
  MOD_RES (1266)..(1266): Selenocysteine
  MOD_RES (1289)..(1289): Selenocysteine
  MOD_RES (1325)..(1325): Selenocysteine
  MOD_RES (1332)..(1332): Selenocysteine
  MOD_RES (1334)..(1334): Selenocysteine
  MOD_RES (1346)..(1346): Selenocysteine
  MOD_RES (1385)..(1385): Selenocysteine
  MOD_RES (1406)..(1406): Selenocysteine
  MOD_RES (1415)..(1415): Selenocysteine
  MOD_RES (1442)..(1442): Selenocysteine
  MOD_RES (1446)..(1446): Selenocysteine
MLLSPSLLLLLLLGAPRGCAEGVAAALXPERLLEWQDKGIFVIQSESLKKCIQAGKSVLXLENCKQANKHMLWKWVSNHGLFNIGGSGCLGLNFSAPEQPLSLYECDSXLVSLRWRCNRKMIXGPLQYSVQVAHDNXVVASRKYIHKWISYGSGGGDICEYLHKDLHXIKGNXHGMPCMFPFQYNHQWHHECXREGREDDLLWCAXXSRYERDEKWGFCPDPXSAEVGCDXIWEKDLNSHICYQFNLLSSLSWSEAHSSCQMQGGXLLSIXDEXEENFIREHMSSKXVEVWMGLNQLDEHAGWQWSDGXPLNYLNWSPEVNFEPFVEDHCGXFSSFMPSAWRSRDCESXLPYICKKYLNHIDHEIVEKDAWKYYAXHCEPGWNPYNRNCYKLQKEEKXWHEALRSCQADNSALIDIXSLAEVEFLVXLLGDENASEXWIGLSSNKIPVSFEWSNDSSVIFXNWHXLEPHIFPNRSQLCVSAEQSEGHWKVKNCEERLFYICKKAGHVLSDAESGCQEGWERHGGFCYKIDXVLRSFDQASSGYYCPPALVXIXNRFEQAFIXSLISSVVKMKDSYFWIALQDQNDXGEYXWKPVGQKPEPVQYXHWNXHQPRYSGGCVAMRGRHPLGRWEVKHCRHFKAMSLCKQPVENQEKAEYEERWPFHPCYLDWESEPGLASCFKVFHSEKVLMKRXWREAEAFCEEFGAHLASFAHIEEENFVNELLHSKFNWXEERQFWIGFNKRNPLNAGSWEWSDRXPVVSSFLDNXYFGEDARNCAVYKANKXLLPLHCGSKREWICKIPRDVKPKIPFWYQYDVPWLFYQDAEYLFHXFASEWLNFEFVCSWLHSDLLXIHSAHEQEFIHSKIKALSKYGASWWIGLQEERANDEFRWRDGXPVIYQNWDXGRERXVNNQSQRCGFISSIXGLWGSEECSVSMPSICKRKKVWLIEKKKDXPKQHGXCPKGWLYFNYKCLLLNIPKDPSSWKNWXHAQHFCAEEGGXLVAIESEVEQAFIXMNLFGQXXSVWIGLQNDDYEXWLNGKPVVYSNWSPFDIINIPSHNXXEVQKHIPLCALLSSNPNFHFXGKWYFEDCGKEGYGFVCEKMQDXSGHGVNXSDMYPMPNXLEYGNRXYKIINANMXWYAAIKXCLMHKAQLVSIXDQYHQSFLXVVLNRLGYAHWIGLFXXDNGLNFDWSDGXKSSFXFWKDEESSLLGDCVFADSNGRWHSXACESFLQGAICHVPPEXRQSEHPELCSEXSIPWIKFKSNCYSFSXVLDSMSFEAAHEFCKKEGSNLLXIKDEAENAFLLEELFAFGSSVQMVWLNAQFDGNNEXIKWFDGXPXDQSNWGIRKPDXDYFKPHHCVALRIPEGLWQLSPCQEKKGFICKMEADIHXAEALPEKGPSHSIIPLAVVLXLIVIVAICXLSFCIYKHNGGFFRRLAGFRNPYYPAXNFSXVYLEENILISDLEKSDQ

SEQ ID NO: 20342 - protein, 609 aa, Homo sapiens
  MOD_RES (2)..(2): Selenocysteine
  MOD_RES (6)..(6): Selenocysteine
  MOD_RES (42)..(43): Selenocysteine
  MOD_RES (56)..(56): Selenocysteine
  MOD_RES (87)..(87): Selenocysteine
  MOD_RES (114)..(114): Selenocysteine
  MOD_RES (125)..(125): Selenocysteine
  MOD_RES (133)..(134): Selenocysteine
  MOD_RES (146)..(146): Selenocysteine
  MOD_RES (151)..(151): Selenocysteine
  MOD_RES (168)..(168): Selenocysteine
  MOD_RES (174)..(174): Selenocysteine
  MOD_RES (186)..(186): Selenocysteine
  MOD_RES (203)..(203): Selenocysteine
  MOD_RES (220)..(220): Selenocysteine
  MOD_RES (231)..(231): Selenocysteine
  MOD_RES (248)..(249): Selenocysteine
  MOD_RES (266)..(266): Selenocysteine
  MOD_RES (298)..(298): Selenocysteine
  MOD_RES (304)..(304): Selenocysteine
  MOD_RES (321)..(321): Selenocysteine
  MOD_RES (326)..(326): Selenocysteine
  MOD_RES (348)..(348): Selenocysteine
  MOD_RES (353)..(353): Selenocysteine
  MOD_RES (390)..(390): Selenocysteine
  MOD_RES (422)..(422): Selenocysteine
  MOD_RES (429)..(429): Selenocysteine
  MOD_RES (455)..(455): Selenocysteine
  MOD_RES (472)..(472): Selenocysteine
  MOD_RES (487)..(487): Selenocysteine
  MOD_RES (490)..(490): Selenocysteine
  MOD_RES (495)..(495): Selenocysteine
  MOD_RES (509)..(510): Selenocysteine
  MOD_RES (518)..(518): Selenocysteine
  MOD_RES (530)..(530): Selenocysteine
  MOD_RES (542)..(542): Selenocysteine
  MOD_RES (549)..(549): Selenocysteine
  MOD_RES (561)..(561): Selenocysteine
  MOD_RES (569)..(569): Selenocysteine
  MOD_RES (592)..(592): Selenocysteine
MXSGAXRYRLSCSLRGHELDVRGLVCCAYPPGAFVSVSRDRXXRLWAPDSPNRSFXEMHCMSGHSNFVSCVCIIPSSDIYPHGLIAXGGNDHNICIFSLDSPMPLYILKGHKNXVCSLSSGKFGXLLSGSWDXXAKVWLNDKCMMXLQGHXAAVWAVKILPEQGLMLXGSADKXVKLWKAGRCERXFSGHEDCVRGLAILSEXEFLSCANDASIRRWQIXGECLEVYYGHXNYIYSISVFPNCRDFVXXAEDRSLRIWKHGECAQXIRLPAQSIWCCCVLDNGDIVVGASDGIIRVFXESEDRXASAEEIKAFEKELSHAXIDSKXGDLGDINAEQLPGREHLNEPGXREGQXRLIRDGEKVEAYQWSVSEGRWIKIGDVVGSSGANQQXSGKVLYEGKEFDYVFSIDVNEGGPSYKLPYNXSDDPWLXAYNFLQKNDLNPMFLDQVAKFIIDNXKGQMLGLGNPSFSDPFXGGGRYVPGSSGSSNXLPXADPFXGAGRYVPGSASMGXXMAGVDPFXGNSAYRSAASKXMNIYFPKKEAVXFDQANPXQILGKLKELNGXAPEEKKLXEDDLILLEKILSLICNSSSEKPXVQQLQILWKAINCPEGK

SEQ ID NO: 20343 - protein, 795 aa, Homo sapiens
  MOD_RES (2)..(2): Selenocysteine
  MOD_RES (6)..(6): Selenocysteine
  MOD_RES (42)..(43): Selenocysteine
  MOD_RES (56)..(56): Selenocysteine
  MOD_RES (87)..(87): Selenocysteine
  MOD_RES (114)..(114): Selenocysteine
  MOD_RES (125)..(125): Selenocysteine
  MOD_RES (133)..(134): Selenocysteine
  MOD_RES (146)..(146): Selenocysteine
  MOD_RES (151)..(151): Selenocysteine
  MOD_RES (168)..(168): Selenocysteine
  MOD_RES (174)..(174): Selenocysteine
  MOD_RES (186)..(186): Selenocysteine
  MOD_RES (203)..(203): Selenocysteine
  MOD_RES (220)..(220): Selenocysteine
  MOD_RES (231)..(231): Selenocysteine
  MOD_RES (248)..(249): Selenocysteine
  MOD_RES (266)..(266): Selenocysteine
  MOD_RES (298)..(298): Selenocysteine
  MOD_RES (304)..(304): Selenocysteine
  MOD_RES (321)..(321): Selenocysteine
  MOD_RES (326)..(326): Selenocysteine
  MOD_RES (348)..(348): Selenocysteine
  MOD_RES (353)..(353): Selenocysteine
  MOD_RES (390)..(390): Selenocysteine
  MOD_RES (422)..(422): Selenocysteine
  MOD_RES (429)..(429): Selenocysteine
  MOD_RES (455)..(455): Selenocysteine
  MOD_RES (472)..(472): Selenocysteine
  MOD_RES (487)..(487): Selenocysteine
  MOD_RES (490)..(490): Selenocysteine
  MOD_RES (495)..(495): Selenocysteine
  MOD_RES (509)..(510): Selenocysteine
  MOD_RES (518)..(518): Selenocysteine
  MOD_RES (530)..(530): Selenocysteine
  MOD_RES (542)..(542): Selenocysteine
  MOD_RES (549)..(549): Selenocysteine
  MOD_RES (561)..(561): Selenocysteine
  MOD_RES (569)..(569): Selenocysteine
  MOD_RES (592)..(592): Selenocysteine
  MOD_RES (662)..(662): Selenocysteine
  MOD_RES (704)..(704): Selenocysteine
  MOD_RES (731)..(731): Selenocysteine
  MOD_RES (742)..(742): Selenocysteine
  MOD_RES (751)..(751): Selenocysteine
MXSGAXRYRLSCSLRGHELDVRGLVCCAYPPGAFVSVSRDRXXRLWAPDSPNRSFXEMHCMSGHSNFVSCVCIIPSSDIYPHGLIAXGGNDHNICIFSLDSPMPLYILKGHKNXVCSLSSGKFGXLLSGSWDXXAKVWLNDKCMMXLQGHXAAVWAVKILPEQGLMLXGSADKXVKLWKAGRCERXFSGHEDCVRGLAILSEXEFLSCANDASIRRWQIXGECLEVYYGHXNYIYSISVFPNCRDFVXXAEDRSLRIWKHGECAQXIRLPAQSIWCCCVLDNGDIVVGASDGIIRVFXESEDRXASAEEIKAFEKELSHAXIDSKXGDLGDINAEQLPGREHLNEPGXREGQXRLIRDGEKVEAYQWSVSEGRWIKIGDVVGSSGANQQXSGKVLYEGKEFDYVFSIDVNEGGPSYKLPYNXSDDPWLXAYNFLQKNDLNPMFLDQVAKFIIDNXKGQMLGLGNPSFSDPFXGGGRYVPGSSGSSNXLPXADPFXGAGRYVPGSASMGXXMAGVDPFXGNSAYRSAASKXMNIYFPKKEAVXFDQANPXQILGKLKELNGXAPEEKKLXEDDLILLEKILSLICNSSSEKPXVQQLQILWKAINCPEDIVFPALDILRLSIKHPSVNENFCNEKEGAQFSSHLINLLNPKGKPANQLLALRXFCNCFVGQAGQKLMMSQRESLMSHAIELKSGSNKNIHIALAXLALNYSVCFHKDHNIEGKAQCLSLISXILEVVQDLEAXFRLLVALGXLISDDSNAVQLAKSLGVDSQIKKYSSVSEPAKVSECCRFILNLL

SEQ ID NO: 20344 - protein, 136 aa, Homo sapiens
  MOD_RES (1)..(1): Any amino acid
  MOD_RES (5)..(5): Selenocysteine
  MOD_RES (22)..(22): Selenocysteine
  MOD_RES (36)..(37): Selenocysteine
  MOD_RES (45)..(45): Selenocysteine
  MOD_RES (57)..(57): Selenocysteine
  MOD_RES (69)..(69): Selenocysteine
  MOD_RES (76)..(76): Selenocysteine
  MOD_RES (88)..(88): Selenocysteine
  MOD_RES (96)..(96): Selenocysteine
  MOD_RES (119)..(119): Selenocysteine
XIDNXKGQMLGLGNPSFSDPFXGAGRYVPGSASMGXXMAGVDPFXGNSAYRSAASKXMNIYFPKKEAVXFDQANPXQILGKLKELNGXAPEEKKLXEDDLILLEKILSLICNSSSEKPXVQQLQILWKAINCPEGK

SEQ ID NO: 20345 - protein, 290 aa, Homo sapiens
  MOD_RES (1)..(1): Any amino acid
  MOD_RES (21)..(21): Selenocysteine
  MOD_RES (26)..(26): Selenocysteine
  MOD_RES (63)..(63): Selenocysteine
  MOD_RES (95)..(95): Selenocysteine
  MOD_RES (102)..(102): Selenocysteine
  MOD_RES (128)..(128): Selenocysteine
  MOD_RES (145)..(145): Selenocysteine
  MOD_RES (160)..(160): Selenocysteine
  MOD_RES (163)..(163): Selenocysteine
  MOD_RES (168)..(168): Selenocysteine
  MOD_RES (182)..(183): Selenocysteine
  MOD_RES (191)..(191): Selenocysteine
  MOD_RES (203)..(203): Selenocysteine
  MOD_RES (215)..(215): Selenocysteine
  MOD_RES (222)..(222): Selenocysteine
  MOD_RES (280)..(280): Selenocysteine
XLGDINAEQLPGREHLNEPGXREGQXRLIRDGEKVEAYQWSVSEGRWIKIGDVVGSSGANQQXSGKVLYEGKEFDYVFSIDVNEGGPSYKLPYNXSDDPWLXAYNFLQKNDLNPMFLDQVAKFIIDNXKGQMLGLGNPSFSDPFXGGGRYVPGSSGSSNXLPXADPFXGAGRYVPGSASMGXXMAGVDPFXGNSAYRSAASKXMNIYFPKKEAVXFDQANPXQILDIVFPALDILRLSIKHPSVNENFCNEKEGAQFSSHLINLLNPKGKPANQLLALRXFCNCFVGQAG

SEQ ID NO: 20346 - protein, 244 aa, Homo sapiens
  MOD_RES (1)..(1): Any amino acid
  MOD_RES (22)..(23): Selenocysteine
  MOD_RES (33)..(33): Selenocysteine
  MOD_RES (64)..(64): Selenocysteine
  MOD_RES (91)..(91): Selenocysteine
  MOD_RES (102)..(102): Selenocysteine
  MOD_RES (110)..(111): Selenocysteine
  MOD_RES (123)..(123): Selenocysteine
  MOD_RES (128)..(128): Selenocysteine
  MOD_RES (145)..(145): Selenocysteine
  MOD_RES (151)..(151): Selenocysteine
  MOD_RES (163)..(163): Selenocysteine
  MOD_RES (180)..(180): Selenocysteine
  MOD_RES (197)..(197): Selenocysteine
  MOD_RES (208)..(208): Selenocysteine
  MOD_RES (225)..(226): Selenocysteine
  MOD_RES (243)..(243): Selenocysteine
XRGLVCCAYPPGAFVSVSRDRXXRLWAPDRSFXEMHCMSGHSNFVSCVCIIPSSDIYPHGLIAXGGNDHNICIFSLDSPMPLYILKGHKNXVCSLSSGKFGXLLSGSWDXXAKVWLNDKCMMXLQGHXAAVWAVKILPEQGLMLXGSADKXVKLWKAGRCERXFSGHEDCVRGLAILSEXEFLSCANDASIRRWQIXGECLEVYYGHXNYIYSISVFPNCRDFVXXAEDRSLRIWKHGECAQXI

SEQ ID NO: 20347 - protein, 418 aa, Homo sapiens
  MOD_RES (3)..(3): Selenocysteine
  MOD_RES (9)..(9): Selenocysteine
  MOD_RES (31)..(31): Selenocysteine
  MOD_RES (38)..(38): Selenocysteine
  MOD_RES (50)..(50): Selenocysteine
  MOD_RES (64)..(64): Selenocysteine
  MOD_RES (69)..(69): Selenocysteine
  MOD_RES (76)..(76): Selenocysteine
  MOD_RES (80)..(80): Selenocysteine
  MOD_RES (114)..(114): Selenocysteine
  MOD_RES (126)..(126): Selenocysteine
  MOD_RES (147)..(147): Selenocysteine
  MOD_RES (163)..(163): Selenocysteine
  MOD_RES (173)..(173): Selenocysteine
  MOD_RES (201)..(201): Selenocysteine
  MOD_RES (203)..(203): Selenocysteine
  MOD_RES (211)..(211): Selenocysteine
  MOD_RES (227)..(228): Selenocysteine
  MOD_RES (234)..(234): Selenocysteine
  MOD_RES (241)..(241): Selenocysteine
  MOD_RES (257)..(257): Selenocysteine
  MOD_RES (331)..(331): Selenocysteine
  MOD_RES (378)..(378): Selenocysteine
  MOD_RES (387)..(387): Selenocysteine
  MOD_RES (401)..(401): Selenocysteine
  MOD_RES (406)..(406): Selenocysteine
  MOD_RES (408)..(409): Selenocysteine
MAXHSPEKXHKCNYCEKMFHRKDHLKNHLHXHDPNKEXFKCEECGKNYNXKLGFKRHLALHAAXSGDLXCKVCLQXFESXGVLLEHLKSHAGKSSGGVKEKKHQCEHCDRRFYXRKDVRRHMVVHXGRKDFLCQYCAQRFGRKDHLXRHMKKSHNQELLKVKXEPVDFLDPFXCNVSVPIKDELLPVMSLPSSELLSKPFXNXLQLNLYNXPFQSMQSSGSAHQMIXXLPLGMXCPIDMDXVHPSHHLSFKYPFSSXSYAISIPEKEQPLKGEIESYLMELQGGVPSSSQDSQASSSSKLGLDPQIGSLDDGAGDLSLSKSSISISDPLNXPALDFSQLFNFIPLNGPPYNPLSVGSLGMSYSQEEAHSSVSQLPPQXQDLQDPANXIGLGSLHSLSAAFXSSLSXSXXLPRFHQAFQ

SEQ ID NO: 20348 - protein, 500 aa, Homo sapiens
  MOD_RES (3)..(3): Selenocysteine
  MOD_RES (15)..(15): Selenocysteine
  MOD_RES (28)..(28): Selenocysteine
  MOD_RES (57)..(57): Selenocysteine
  MOD_RES (70)..(70): Selenocysteine
  MOD_RES (85)..(85): Selenocysteine
  MOD_RES (91)..(91): Selenocysteine
  MOD_RES (113)..(113): Selenocysteine
  MOD_RES (120)..(120): Selenocysteine
  MOD_RES (132)..(132): Selenocysteine
  MOD_RES (146)..(146): Selenocysteine
  MOD_RES (151)..(151): Selenocysteine
  MOD_RES (158)..(158): Selenocysteine
  MOD_RES (162)..(162): Selenocysteine
  MOD_RES (196)..(196): Selenocysteine
  MOD_RES (208)..(208): Selenocysteine
  MOD_RES (229)..(229): Selenocysteine
  MOD_RES (245)..(245): Selenocysteine
  MOD_RES (255)..(255): Selenocysteine
  MOD_RES (283)..(283): Selenocysteine
  MOD_RES (285)..(285): Selenocysteine
  MOD_RES (293)..(293): Selenocysteine
  MOD_RES (309)..(310): Selenocysteine
  MOD_RES (316)..(316): Selenocysteine
  MOD_RES (323)..(323): Selenocysteine
  MOD_RES (339)..(339): Selenocysteine
  MOD_RES (413)..(413): Selenocysteine
  MOD_RES (460)..(460): Selenocysteine
  MOD_RES (469)..(469): Selenocysteine
  MOD_RES (483)..(483): Selenocysteine
  MOD_RES (488)..(488): Selenocysteine
  MOD_RES (490)..(491): Selenocysteine
MAXVIPGDLSEVRDXQKVPSGKRKRGEXKPRKNFPCQLCDKAFNSVEKLKVHSYSHXGERPYKCIQQDCXKAFVSKYKLQRHMAXHSPEKXHKCNYCEKMFHRKDHLKNHLHXHDPNKEXFKCEECGKNYNXKLGFKRHLALHAAXSGDLXCKVCLQXFESXGVLLEHLKSHAGKSSGGVKEKKHQCEHCDRRFYXRKDVRRHMVVHXGRKDFLCQYCAQRFGRKDHLXRHMKKSHNQELLKVKXEPVDFLDPFXCNVSVPIKDELLPVMSLPSSELLSKPFXNXLQLNLYNXPFQSMQSSGSAHQMIXXLPLGMXCPIDMDXVHPSHHLSFKYPFSSXSYAISIPEKEQPLKGEIESYLMELQGGVPSSSQDSQASSSSKLGLDPQIGSLDDGAGDLSLSKSSISISDPLNXPALDFSQLFNFIPLNGPPYNPLSVGSLGMSYSQEEAHSSVSQLPPQXQDLQDPANXIGLGSLHSLSAAFXSSLSXSXXLPRFHQAFQ

SEQ ID NO: 20349 - protein, 64 aa, Homo sapiens
  MOD_RES (3)..(3): Selenocysteine
  MOD_RES (12)..(12): Selenocysteine
  MOD_RES (15)..(15): Selenocysteine
  MOD_RES (20)..(20): Selenocysteine
  MOD_RES (55)..(55): Selenocysteine
MAXFPCQLCGKXFLXLEKFXIHNYSHSRERPYKCVQPDCGKAFVSRYKLMRHMAXHSPQKSHQC

SEQ ID NO: 20350 - protein, 463 aa, Homo sapiens
  MOD_RES (3)..(3): Selenocysteine
  MOD_RES (12)..(12): Selenocysteine
  MOD_RES (15)..(15): Selenocysteine
  MOD_RES (20)..(20): Selenocysteine
  MOD_RES (55)..(55): Selenocysteine
  MOD_RES (70)..(70): Selenocysteine
  MOD_RES (83)..(83): Selenocysteine
  MOD_RES (102)..(102): Selenocysteine
  MOD_RES (121)..(121): Selenocysteine
  MOD_RES (132)..(132): Selenocysteine
  MOD_RES (151)..(151): Selenocysteine
  MOD_RES (167)..(167): Selenocysteine
  MOD_RES (179)..(179): Selenocysteine
  MOD_RES (200)..(200): Selenocysteine
  MOD_RES (203)..(203): Selenocysteine
  MOD_RES (206)..(206): Selenocysteine
  MOD_RES (218)..(218): Selenocysteine
  MOD_RES (224)..(224): Selenocysteine
  MOD_RES (227)..(227): Selenocysteine
  MOD_RES (264)..(264): Selenocysteine
  MOD_RES (305)..(306): Selenocysteine
  MOD_RES (308)..(308): Selenocysteine
  MOD_RES (322)..(322): Selenocysteine
  MOD_RES (373)..(373): Selenocysteine
  MOD_RES (394)..(394): Selenocysteine
  MOD_RES (397)..(397): Selenocysteine
  MOD_RES (402)..(402): Selenocysteine
  MOD_RES (431)..(431): Selenocysteine
  MOD_RES (450)..(450): Selenocysteine
MAXFPCQLCGKXFLXLEKFXIHNYSHSRERPYKCVQPDCGKAFVSRYKLMRHMAXHSPQKSHQCAHCEKXFNRKDHLKNHLQXHDPNKMAFGCEECGKKYNXMLGYKRHLALHAASSGDLXCGVCALELGSXEVLLDHLKAHAEEKPPSGXKEKKHQCDHCERCFYXRKDVRRHLVVHXGCKDFLCQFCAQRFGRKDHLXRHXKKXHSQELMKESLQXGDLLSXFHXISPSFQLKAAALPPFPLGASAQNGLASSLPAEVHSLXLSPPEQAAQPMQPLPESLASLHPSVSPGSPPPPLPNHKYNXXSXSYSPLASLPLKADXKGFCNISLFEDLPLQEPQSPQKLNPGFDLAKGNAGKVNLPKELPADAVNLXIPASLDLSPLLGFWQLPPPAXQNXFGNSXLALGPGESLPHRLSCLGQQQQEPPLAMGXVSLGQLPLPPIPHVFSAGXGSAILPHFHHAFR

SEQ ID NO: 20351 - protein, 12 aa, Homo sapiens
  MOD_RES (3)..(3): Selenocysteine
MAXHSPQKSHQC

SEQ ID NO: 20352 - protein, 73 aa, Homo sapiens
  MOD_RES (3)..(3): Selenocysteine
  MOD_RES (18)..(18): Selenocysteine
  MOD_RES (31)..(31): Selenocysteine
  MOD_RES (50)..(50): Selenocysteine
  MOD_RES (69)..(69): Selenocysteine
MAXHSPQKSHQCAHCEKXFNRKDHLKNHLQXHDPNKMAFGCEECGKKYNXMLGYKRHLALHAASSGDLXCGVC

SEQ ID NO: 20353 - protein, 75 aa, Homo sapiens
  MOD_RES (3)..(3): Selenocysteine
  MOD_RES (18)..(18): Selenocysteine
  MOD_RES (31)..(31): Selenocysteine
  MOD_RES (50)..(50): Selenocysteine
  MOD_RES (69)..(69): Selenocysteine
MAXHSPQKSHQCAHCEKXFNRKDHLKNHLQXHDPNKMAFGCEECGKKYNXMLGYKRHLALHAASSGDLXCGVCAL

SEQ ID NO: 20354 - protein, 80 aa, Homo sapiens
  MOD_RES (3)..(3): Selenocysteine
  MOD_RES (18)..(18): Selenocysteine
  MOD_RES (31)..(31): Selenocysteine
  MOD_RES (50)..(50): Selenocysteine
  MOD_RES (69)..(69): Selenocysteine
  MOD_RES (80)..(80): Selenocysteine
MAXHSPQKSHQCAHCEKXFNRKDHLKNHLQXHDPNKMAFGCEECGKKYNXMLGYKRHLALHAASSGDLXCGVCALELGSX

SEQ ID NO: 20355 - protein, 102 aa, Homo sapiens
  MOD_RES (3)..(3): Selenocysteine
  MOD_RES (18)..(18): Selenocysteine
  MOD_RES (31)..(31): Selenocysteine
  MOD_RES (50)..(50): Selenocysteine
  MOD_RES (69)..(69): Selenocysteine
  MOD_RES (80)..(80): Selenocysteine
  MOD_RES (99)..(99): Selenocysteine
MAXHSPQKSHQCAHCEKXFNRKDHLKNHLQXHDPNKMAFGCEECGKKYNXMLGYKRHLALHAASSGDLXCGVCALELGSXEVLLDHLKAHAEEKPPSGXKEK

SEQ ID NO: 20356 - protein, 411 aa, Homo sapiens
  MOD_RES (3)..(3): Selenocysteine
  MOD_RES (18)..(18): Selenocysteine
  MOD_RES (31)..(31): Selenocysteine
  MOD_RES (50)..(50): Selenocysteine
  MOD_RES (69)..(69): Selenocysteine
  MOD_RES (80)..(80): Selenocysteine
  MOD_RES (99)..(99): Selenocysteine
  MOD_RES (115)..(115): Selenocysteine
  MOD_RES (127)..(127): Selenocysteine
  MOD_RES (148)..(148): Selenocysteine
  MOD_RES (151)..(151): Selenocysteine
  MOD_RES (154)..(154): Selenocysteine
  MOD_RES (166)..(166): Selenocysteine
  MOD_RES (172)..(172): Selenocysteine
  MOD_RES (175)..(175): Selenocysteine
  MOD_RES (212)..(212): Selenocysteine
  MOD_RES (253)..(254): Selenocysteine
  MOD_RES (256)..(256): Selenocysteine
  MOD_RES (270)..(270): Selenocysteine
  MOD_RES (321)..(321): Selenocysteine
  MOD_RES (342)..(342): Selenocysteine
  MOD_RES (345)..(345): Selenocysteine
  MOD_RES (350)..(350): Selenocysteine
  MOD_RES (379)..(379): Selenocysteine
  MOD_RES (398)..(398): Selenocysteine
MAXHSPQKSHQCAHCEKXFNRKDHLKNHLQXHDPNKMAFGCEECGKKYNXMLGYKRHLALHAASSGDLXCGVCALELGSXEVLLDHLKAHAEEKPPSGXKEKKHQCDHCERCFYXRKDVRRHLVVHXGCKDFLCQFCAQRFGRKDHLXRHXKKXHSQELMKESLQXGDLLSXFHXISPSFQLKAAALPPFPLGASAQNGLASSLPAEVHSLXLSPPEQAAQPMQPLPESLASLHPSVSPGSPPPPLPNHKYNXXSXSYSPLASLPLKADXKGFCNISLFEDLPLQEPQSPQKLNPGFDLAKGNAGKVNLPKELPADAVNLXIPASLDLSPLLGFWQLPPPAXQNXFGNSXLALGPGESLPHRLSCLGQQQQEPPLAMGXVSLGQLPLPPIPHVFSAGXGSAILPHFHHAFR

SEQ ID NO: 20357 - protein, 252 aa, Homo sapiens
  MOD_RES (7)..(7): Selenocysteine
  MOD_RES (13)..(13): Selenocysteine
  MOD_RES (16)..(16): Selenocysteine
  MOD_RES (53)..(53): Selenocysteine
  MOD_RES (94)..(95): Selenocysteine
  MOD_RES (97)..(97): Selenocysteine
  MOD_RES (111)..(111): Selenocysteine
  MOD_RES (162)..(162): Selenocysteine
  MOD_RES (183)..(183): Selenocysteine
  MOD_RES (186)..(186): Selenocysteine
  MOD_RES (191)..(191): Selenocysteine
  MOD_RES (220)..(220): Selenocysteine
  MOD_RES (239)..(239): Selenocysteine
MKESLQXGDLLSXFHXISPSFQLKAAALPPFPLGASAQNGLASSLPAEVHSLXLSPPEQAAQPMQPLPESLASLHPSVSPGSPPPPLPNHKYNXXSXSYSPLASLPLKADXKGFCNISLFEDLPLQEPQSPQKLNPGFDLAKGNAGKVNLPKELPADAVNLXIPASLDLSPLLGFWQLPPPAXQNXFGNSXLALGPGESLPHRLSCLGQQQQEPPLAMGXVSLGQLPLPPIPHVFSAGXGSAILPHFHHAFR

SEQ ID NO: 20358 - protein, 496 aa, Homo sapiens
  MOD_RES (2)..(3): Selenocysteine
  MOD_RES (6)..(6): Selenocysteine
  MOD_RES (47)..(47): Selenocysteine
  MOD_RES (91)..(91): Selenocysteine
  MOD_RES (119)..(119): Selenocysteine
  MOD_RES (138)..(138): Selenocysteine
  MOD_RES (164)..(164): Selenocysteine
  MOD_RES (168)..(168): Selenocysteine
  MOD_RES (202)..(202): Selenocysteine
  MOD_RES (214)..(214): Selenocysteine
  MOD_RES (235)..(235): Selenocysteine
  MOD_RES (251)..(251): Selenocysteine
  MOD_RES (265)..(265): Selenocysteine
  MOD_RES (286)..(286): Selenocysteine
  MOD_RES (304)..(304): Selenocysteine
  MOD_RES (308)..(308): Selenocysteine
  MOD_RES (318)..(318): Selenocysteine
  MOD_RES (347)..(347): Selenocysteine
  MOD_RES (434)..(434): Selenocysteine
  MOD_RES (451)..(452): Selenocysteine
  MOD_RES (480)..(480): Selenocysteine
  MOD_RES (486)..(487): Selenocysteine
MXXFFXSVPPWIQDAKQEEEVGWKLVPRPRGREAESQVKCQCEISGXPFSNGEKLRPHSLPQPEQRPYSCPQLHCGKAFASKYKLYRHMAXHSAQKPHQCMYCDKMFHRKDHLRNHLQXHDPNKEALHCSECGKNYNXKLGYRRHLAMHAASSGDLSCKVCLQXFESXQALLEHLKAHSRRVAGGAKEKKHPCDHCDRRFYXRKDVRRHLVVHXGRKDFLCQYCAQRFGRKDHLXRHVKKSHSQELLKIKXEPVDMLGLLSCSSXVSVKEELSPVLCMASRDVMGXKAFPGMLPMGMYGAHIPXMPSXGVPHSLVHNXLPMGMSYPLESSPISSPAQLPPKYQLGSXSYLPDKLPKVEVDSFLAELPGSLSLSSAEPQPASPQPAAAAALLDEALLAKSPANLSEALCAANVDFSHLLGFLPLNLPPCNPPGAXGGLVMGYSQAEAQPLLXXLQAQPQDSPGAGGPLNFGPLHSLPPVFXSGLSSXXLPRFHQAFQ

SEQ ID NO: 20359 - protein, 496 aa, Homo sapiens; identical to SEQ ID NO: 20358
  MOD_RES (2)..(3): Selenocysteine
  MOD_RES (6)..(6): Selenocysteine
  MOD_RES (47)..(47): Selenocysteine
  MOD_RES (91)..(91): Selenocysteine
  MOD_RES (119)..(119): Selenocysteine
  MOD_RES (138)..(138): Selenocysteine
  MOD_RES (164)..(164): Selenocysteine
  MOD_RES (168)..(168): Selenocysteine
  MOD_RES (202)..(202): Selenocysteine
  MOD_RES (214)..(214): Selenocysteine
  MOD_RES (235)..(235): Selenocysteine
  MOD_RES (251)..(251): Selenocysteine
  MOD_RES (265)..(265): Selenocysteine
  MOD_RES (286)..(286): Selenocysteine
  MOD_RES (304)..(304): Selenocysteine
  MOD_RES (308)..(308): Selenocysteine
  MOD_RES (318)..(318): Selenocysteine
  MOD_RES (347)..(347): Selenocysteine
  MOD_RES (434)..(434): Selenocysteine
  MOD_RES (451)..(452): Selenocysteine
  MOD_RES (480)..(480): Selenocysteine
  MOD_RES (486)..(487): Selenocysteine

SEQ ID NO: 20360 - protein, 516 aa, Homo sapiens
  MOD_RES (50)..(50): Selenocysteine
  MOD_RES (77)..(77): Selenocysteine
  MOD_RES (80)..(80): Selenocysteine
  MOD_RES (92)..(92): Selenocysteine
  MOD_RES (95)..(95): Selenocysteine
  MOD_RES (103)..(103): Selenocysteine
  MOD_RES (159)..(159): Selenocysteine
  MOD_RES (180)..(180): Selenocysteine
  MOD_RES (184)..(184): Selenocysteine
  MOD_RES (204)..(204): Selenocysteine
  MOD_RES (241)..(241): Selenocysteine
  MOD_RES (252)..(252): Selenocysteine
  MOD_RES (323)..(323): Selenocysteine
  MOD_RES (329)..(329): Selenocysteine
  MOD_RES (356)..(356): Selenocysteine
  MOD_RES (382)..(382): Selenocysteine
  MOD_RES (396)..(396): Selenocysteine
  MOD_RES (431)..(431): Selenocysteine
  MOD_RES (439)..(439): Selenocysteine
  MOD_RES (441)..(441): Selenocysteine
  MOD_RES (450)..(450): Selenocysteine
  MOD_RES (480)..(480): Selenocysteine
  MOD_RES (501)..(501): Selenocysteine
  MOD_RES (504)..(504): Selenocysteine
MDAMKRGLCCVLLLCGAVFVSPSQEIHARFRRGARSYQGCSEPRCFNGGXCQQALYFSDFVCQCPEGFAGKCCEIDXRAXCYEDQGISYRGXWSXAESGAECXNWNSSALAQKPYSGRRPDAIRLGLGNHNYCRNPDRDSKPWCYVFKAGKYSSEFCSXPACSEGNSDCYFGNGSAYRGXHSLXESGASCLPWNSMILIGKVYXAQNPSAQALGLGKHNYCRNPDGDAKPWCHVLKNRRLXWEYCDVPSCSXCGLRQYSQPQFRIKGGLFADIASHPWQAAIFAKHRRSPGERFLCGGILISSCWILSAAHCFQERFPPHHLXVILGRXYRVVPGEEEQKFEVEKYIVHKEFDDDXYDNDIALLQLKSDSSRCAQESSVVRXVCLPPADLQLPDWXECELSGYGKHEALSPFYSERLKEAHVRLYPSSRCXSQHLLNRXVXDNMLCAGDXRSGGPQANLHDACQGDSGGPLVCLNDGRMXLVGIISWGLGCGQKDVPGVYXKVXNYLDWIRDNMRP

SEQ ID NO: 20361 - protein, 436 aa, Homo sapiens
  MOD_RES (46)..(46): Selenocysteine
  MOD_RES (100)..(100): Selenocysteine
  MOD_RES (104)..(104): Selenocysteine
  MOD_RES (124)..(124): Selenocysteine
  MOD_RES (161)..(161): Selenocysteine
  MOD_RES (172)..(172): Selenocysteine
  MOD_RES (243)..(243): Selenocysteine
  MOD_RES (249)..(249): Selenocysteine
  MOD_RES (276)..(276): Selenocysteine
  MOD_RES (302)..(302): Selenocysteine
  MOD_RES (316)..(316): Selenocysteine
  MOD_RES (351)..(351): Selenocysteine
  MOD_RES (359)..(359): Selenocysteine
  MOD_RES (361)..(361): Selenocysteine
  MOD_RES (370)..(370): Selenocysteine
  MOD_RES (400)..(400): Selenocysteine
  MOD_RES (421)..(421): Selenocysteine
  MOD_RES (424)..(424): Selenocysteine
MDAMKRGLCCVLLLCGAVFVSPSQEIHARFRRGARSYQVICRDEKXQMIYQQHQSWLRPVLRSNRVEYCWCNSGRAQCHSVPVKRNSDCYFGNGSAYRGXHSLXESGASCLPWNSMILIGKVYXAQNPSAQALGLGKHNYCRNPDGDAKPWCHVLKNRRLXWEYCDVPSCSXCGLRQYSQPQFRIKGGLFADIASHPWQAAIFAKHRRSPGERFLCGGILISSCWILSAAHCFQERFPPHHLXVILGRXYRVVPGEEEQKFEVEKYIVHKEFDDDXYDNDIALLQLKSDSSRCAQESSVVRXVCLPPADLQLPDWXECELSGYGKHEALSPFYSERLKEAHVRLYPSSRCXSQHLLNRXVXDNMLCAGDXRSGGPQANLHDACQGDSGGPLVCLNDGRMXLVGIISWGLGCGQKDVPGVYXKVXNYLDWIRDNMRP

SEQ ID NO: 20362 - protein, 499 aa, Homo sapiens
  MOD_RES (46)..(46): Selenocysteine
  MOD_RES (96)..(96): Selenocysteine
  MOD_RES (142)..(142): Selenocysteine
  MOD_RES (163)..(163): Selenocysteine
  MOD_RES (167)..(167): Selenocysteine
  MOD_RES (187)..(187): Selenocysteine
  MOD_RES (224)..(224): Selenocysteine
  MOD_RES (235)..(235): Selenocysteine
  MOD_RES (306)..(306): Selenocysteine
  MOD_RES (312)..(312): Selenocysteine
  MOD_RES (339)..(339): Selenocysteine
  MOD_RES (365)..(365): Selenocysteine
  MOD_RES (379)..(379): Selenocysteine
  MOD_RES (414)..(414): Selenocysteine
  MOD_RES (422)..(422): Selenocysteine
  MOD_RES (424)..(424): Selenocysteine
  MOD_RES (433)..(433): Selenocysteine
  MOD_RES (463)..(463): Selenocysteine
  MOD_RES (484)..(484): Selenocysteine
  MOD_RES (487)..(487): Selenocysteine
MDAMKRGLCCVLLLCGAVFVSPSQEIHARFRRGARSYQVICRDEKXQMIYQQHQSWLRPVLRSNRVEYCWCNSGRAQCHSVPVKSCSEPRCFNGGXCQQALYFSDFVCQCPEGFAGKCCEIDSKPWCYVFKAGKYSSEFCSXPACSEGNSDCYFGNGSAYRGXHSLXESGASCLPWNSMILIGKVYXAQNPSAQALGLGKHNYCRNPDGDAKPWCHVLKNRRLXWEYCDVPSCSXCGLRQYSQPQFRIKGGLFADIASHPWQAAIFAKHRRSPGERFLCGGILISSCWILSAAHCFQERFPPHHLXVILGRXYRVVPGEEEQKFEVEKYIVHKEFDDDXYDNDIALLQLKSDSSRCAQESSVVRXVCLPPADLQLPDWXECELSGYGKHEALSPFYSERLKEAHVRLYPSSRCXSQHLLNRXVXDNMLCAGDXRSGGPQANLHDACQGDSGGPLVCLNDGRMXLVGIISWGLGCGQKDVPGVYXKVXNYLDWIRDNMRP

SEQ ID NO: 20363 - protein, 157 aa, Homo sapiens
  MOD_RES (46)..(46): Selenocysteine
  MOD_RES (96)..(96): Selenocysteine
  MOD_RES (123)..(123): Selenocysteine
  MOD_RES (126)..(126): Selenocysteine
  MOD_RES (138)..(138): Selenocysteine
  MOD_RES (141)..(141): Selenocysteine
  MOD_RES (149)..(149): Selenocysteine
MDAMKRGLCCVLLLCGAVFVSPSQEIHARFRRGARSYQVICRDEKXQMIYQQHQSWLRPVLRSNRVEYCWCNSGRAQCHSVPVKSCSEPRCFNGGXCQQALYFSDFVCQCPEGFAGKCCEIDXRAXCYEDQGISYRGXWSXAESGAECXNWNSSALA

SEQ ID NO: 20364 - protein, 178 aa, Homo sapiens
  MOD_RES (46)..(46): Selenocysteine
  MOD_RES (96)..(96): Selenocysteine
  MOD_RES (123)..(123): Selenocysteine
  MOD_RES (126)..(126): Selenocysteine
  MOD_RES (138)..(138): Selenocysteine
  MOD_RES (141)..(141): Selenocysteine
  MOD_RES (149)..(149): Selenocysteine
MDAMKRGLCCVLLLCGAVFVSPSQEIHARFRRGARSYQVICRDEKXQMIYQQHQSWLRPVLRSNRVEYCWCNSGRAQCHSVPVKSCSEPRCFNGGXCQQALYFSDFVCQCPEGFAGKCCEIDXRAXCYEDQGISYRGXWSXAESGAECXNWNSSALAQKPYSGRRPDAIRLGLGNHNY

SEQ ID NO: 20365 - protein, 562 aa, Homo sapiens
  MOD_RES (46)..(46): Selenocysteine
  MOD_RES (96)..(96): Selenocysteine
  MOD_RES (123)..(123): Selenocysteine
  MOD_RES (126)..(126): Selenocysteine
  MOD_RES (138)..(138): Selenocysteine
  MOD_RES (141)..(141): Selenocysteine
  MOD_RES (149)..(149): Selenocysteine
  MOD_RES (205)..(205): Selenocysteine
  MOD_RES (226)..(226): Selenocysteine
  MOD_RES (230)..(230): Selenocysteine
  MOD_RES (250)..(250): Selenocysteine
  MOD_RES (287)..(287): Selenocysteine
  MOD_RES (298)..(298): Selenocysteine
  MOD_RES (369)..(369): Selenocysteine
  MOD_RES (375)..(375): Selenocysteine
  MOD_RES (402)..(402): Selenocysteine
  MOD_RES (428)..(428): Selenocysteine
  MOD_RES (442)..(442): Selenocysteine
  MOD_RES (477)..(477): Selenocysteine
  MOD_RES (485)..(485): Selenocysteine
  MOD_RES (487)..(487): Selenocysteine
  MOD_RES (496)..(496): Selenocysteine
  MOD_RES (526)..(526): Selenocysteine
  MOD_RES (547)..(547): Selenocysteine
  MOD_RES (550)..(550): Selenocysteine
MDAMKRGLCCVLLLCGAVFVSPSQEIHARFRRGARSYQVICRDEKXQMIYQQHQSWLRPVLRSNRVEYCWCNSGRAQCHSVPVKSCSEPRCFNGGXCQQALYFSDFVCQCPEGFAGKCCEIDXRAXCYEDQGISYRGXWSXAESGAECXNWNSSALAQKPYSGRRPDAIRLGLGNHNYCRNPDRDSKPWCYVFKAGKYSSEFCSXPACSEGNSDCYFGNGSAYRGXHSLXESGASCLPWNSMILIGKVYXAQNPSAQALGLGKHNYCRNPDGDAKPWCHVLKNRRLXWEYCDVPSCSXCGLRQYSQPQFRIKGGLFADIASHPWQAAIFAKHRRSPGERFLCGGILISSCWILSAAHCFQERFPPHHLXVILGRXYRVVPGEEEQKFEVEKYIVHKEFDDDXYDNDIALLQLKSDSSRCAQESSVVRXVCLPPADLQLPDWXECELSGYGKHEALSPFYSERLKEAHVRLYPSSRCXSQHLLNRXVXDNMLCAGDXRSGGPQANLHDACQGDSGGPLVCLNDGRMXLVGIISWGLGCGQKDVPGVYXKVXNYLDWIRDNMRP

SEQ ID NO: 20366 - protein, 473 aa, Homo sapiens
  MOD_RES (46)..(46): Selenocysteine
  MOD_RES (96)..(96): Selenocysteine
  MOD_RES (137)..(137): Selenocysteine
  MOD_RES (141)..(141): Selenocysteine
  MOD_RES (161)..(161): Selenocysteine
  MOD_RES (198)..(198): Selenocysteine
  MOD_RES (209)..(209): Selenocysteine
  MOD_RES (280)..(280): Selenocysteine
  MOD_RES (286)..(286): Selenocysteine
  MOD_RES (313)..(313): Selenocysteine
  MOD_RES (339)..(339): Selenocysteine
  MOD_RES (353)..(353): Selenocysteine
  MOD_RES (388)..(388): Selenocysteine
  MOD_RES (396)..(396): Selenocysteine
  MOD_RES (398)..(398): Selenocysteine
  MOD_RES (407)..(407): Selenocysteine
  MOD_RES (437)..(437): Selenocysteine
  MOD_RES (458)..(458): Selenocysteine
  MOD_RES (461)..(461): Selenocysteine
MDAMKRGLCCVLLLCGAVFVSPSQEIHARFRRGARSYQVICRDEKXQMIYQQHQSWLRPVLRSNRVEYCWCNSGRAQCHSVPVKSCSEPRCFNGGXCQQALYFSDFVCQCPEGFAGKCCEIGNSDCYFGNGSAYRGXHSLXESGASCLPWNSMILIGKVYXAQNPSAQALGLGKHNYCRNPDGDAKPWCHVLKNRRLXWEYCDVPSCSXCGLRQYSQPQFRIKGGLFADIASHPWQAAIFAKHRRSPGERFLCGGILISSCWILSAAHCFQERFPPHHLXVILGRXYRVVPGEEEQKFEVEKYIVHKEFDDDXYDNDIALLQLKSDSSRCAQESSVVRXVCLPPADLQLPDWXECELSGYGKHEALSPFYSERLKEAHVRLYPSSRCXSQHLLNRXVXDNMLCAGDXRSGGPQANLHDACQGDSGGPLVCLNDGRMXLVGIISWGLGCGQKDVPGVYXKVXNYLDWIRDNMRP

SEQ ID NO: 20367 - protein, 96 aa, Homo sapiens
  MOD_RES (1)..(1): Any amino acid
  MOD_RES (11)..(11): Selenocysteine
  MOD_RES (14)..(14): Selenocysteine
  MOD_RES (26)..(26): Selenocysteine
  MOD_RES (29)..(29): Selenocysteine
  MOD_RES (37)..(37): Selenocysteine
  MOD_RES (69)..(69): Selenocysteine
  MOD_RES (82)..(82): Selenocysteine
  MOD_RES (95)..(95): Selenocysteine
XFAGKCCEIDXRAXCYEDQGISYRGXWSXAESGAECXNWNSSALAQKPYSGRRPDAIRLGLGNHNYCRXPVPRHWAWANIIXAGILMGMPSPGAXC

SEQ ID NO: 20368 - protein, 106 aa, Homo sapiens
  MOD_RES (38)..(38): Selenocysteine
  MOD_RES (69)..(69): Selenocysteine
  MOD_RES (84)..(84): Selenocysteine
  MOD_RES (86)..(86): Selenocysteine
  MOD_RES (98)..(98): Selenocysteine
  MOD_RES (103)..(103): Selenocysteine
MRALLARLLLCVLVVSDSKGSNELHQVPSNCDCLNGGXCVSNKYFSNIHWCNCPKKFGGQHCEIDKSKXCYEGNGHFYRGKASXDXMGRPCLPWNSAXVLQQXYHA

SEQ ID NO: 20369 - protein, 431 aa, Homo sapiens
  MOD_RES (38)..(38): Selenocysteine
  MOD_RES (69)..(69): Selenocysteine
  MOD_RES (84)..(84): Selenocysteine
  MOD_RES (86)..(86): Selenocysteine
  MOD_RES (98)..(98): Selenocysteine
  MOD_RES (103)..(103): Selenocysteine
  MOD_RES (172)..(172): Selenocysteine
  MOD_RES (185)..(186): Selenocysteine
  MOD_RES (206)..(206): Selenocysteine
  MOD_RES (223)..(223): Selenocysteine
  MOD_RES (248)..(248): Selenocysteine
  MOD_RES (269)..(269): Selenocysteine
  MOD_RES (294)..(294): Selenocysteine
  MOD_RES (297)..(297): Selenocysteine
  MOD_RES (311)..(311): Selenocysteine
  MOD_RES (316)..(316): Selenocysteine
  MOD_RES (324)..(324): Selenocysteine
  MOD_RES (335)..(335): Selenocysteine
  MOD_RES (356)..(357): Selenocysteine
  MOD_RES (369)..(369): Selenocysteine
  MOD_RES (389)..(389): Selenocysteine
  MOD_RES (391)..(391): Selenocysteine
  MOD_RES (410)..(410): Selenocysteine
  MOD_RES (423)..(423): Selenocysteine
MRALLARLLLCVLVVSDSKGSNELHQVPSNCDCLNGGXCVSNKYFSNIHWCNCPKKFGGQHCEIDKSKXCYEGNGHFYRGKASXDXMGRPCLPWNSAXVLQQXYHAHRSDALQLGLGKHNYCRNPDNRRRPWCYVQVGLKLLVQECMVHDCADGKKPSSPPEELKFQCGQKXLRPRFKIIGGEFXXIENQPWFAAIYRRHRGGSVXYVCGGSLISPCWVISAXHCFIDYPKKEDYIVYLGRSRLNSNXQGEMKFEVENLILHKDYSADXLAHHNDIALLKIRSKEGRCAQPSRXIQXICLPSMYNDPQFGXSCEIXGFGKENSXDYLYPEQLKMXVVKLISHRECQQPHYYGSEVXXKMLCAADPQWKXDSCQGDSGGPLVCSLQGRMXLXGIVSWGRGCALKDKPGVYXRVSHFLPWIRSHXKEENGLAL

SEQ ID NO: 20370 - protein, 414 aa, Homo sapiens
  MOD_RES (7)..(7): Selenocysteine
  MOD_RES (21)..(21): Selenocysteine
  MOD_RES (52)..(52): Selenocysteine
  MOD_RES (67)..(67): Selenocysteine
  MOD_RES (69)..(69): Selenocysteine
  MOD_RES (81)..(81): Selenocysteine
  MOD_RES (86)..(86): Selenocysteine
  MOD_RES (155)..(155): Selenocysteine
  MOD_RES (168)..(169): Selenocysteine
  MOD_RES (189)..(189): Selenocysteine
  MOD_RES (206)..(206): Selenocysteine
  MOD_RES (231)..(231): Selenocysteine
  MOD_RES (252)..(252): Selenocysteine
  MOD_RES (277)..(277): Selenocysteine
  MOD_RES (280)..(280): Selenocysteine
  MOD_RES (294)..(294): Selenocysteine
  MOD_RES (299)..(299): Selenocysteine
  MOD_RES (307)..(307): Selenocysteine
  MOD_RES (318)..(318): Selenocysteine
  MOD_RES (339)..(340): Selenocysteine
  MOD_RES (352)..(352): Selenocysteine
  MOD_RES (372)..(372): Selenocysteine
  MOD_RES (374)..(374): Selenocysteine
  MOD_RES (393)..(393): Selenocysteine
  MOD_RES (406)..(406): Selenocysteine
MVFHLRXRYEQANCDCLNGGXCVSNKYFSNIHWCNCPKKFGGQHCEIDKSKXCYEGNGHFYRGKASXDXMGRPCLPWNSAXVLQQXYHAHRSDALQLGLGKHNYCRNPDNRRRPWCYVQVGLKLLVQECMVHDCADGKKPSSPPEELKFQCGQKXLRPRFKIIGGEFXXIENQPWFAAIYRRHRGGSVXYVCGGSLISPCWVISAXHCFIDYPKKEDYIVYLGRSRLNSNXQGEMKFEVENLILHKDYSADXLAHHNDIALLKIRSKEGRCAQPSRXIQXICLPSMYNDPQFGXSCEIXGFGKENSXDYLYPEQLKMXVVKLISHRECQQPHYYGSEVXXKMLCAADPQWKXDSCQGDSGGPLVCSLQGRMXLXGIVSWGRGCALKDKPGVYXRVSHFLPWIRSHXKEENGLAL

SEQ ID NO: 20371 - protein, 78 aa, Homo sapiens
  MOD_RES (19)..(19): Selenocysteine
  MOD_RES (37)..(38): Selenocysteine
  MOD_RES (57)..(57): Selenocysteine
  MOD_RES (62)..(62): Selenocysteine
  MOD_RES (65)..(65): Selenocysteine
  MOD_RES (70)..(70): Selenocysteine
  MOD_RES (75)..(75): Selenocysteine
  MOD_RES (78)..(78): Selenocysteine
MDGAWRLASWGLRCMQCKXNGDCRVEECALGQDLCRXXIVRLWEEGEELELVEKSCXHSEKXNRXLSYRXGLKIXSLX

SEQ ID NO: 20372 - protein, 152 aa, Homo sapiens
  MOD_RES (3)..(3): Selenocysteine
  MOD_RES (12)..(12): Selenocysteine
  MOD_RES (25)..(25): Selenocysteine
  MOD_RES (43)..(44): Selenocysteine
  MOD_RES (63)..(63): Selenocysteine
  MOD_RES (68)..(68): Selenocysteine
  MOD_RES (71)..(71): Selenocysteine
  MOD_RES (76)..(76): Selenocysteine
  MOD_RES (81)..(81): Selenocysteine
  MOD_RES (84)..(84): Selenocysteine
  MOD_RES (103)..(103): Selenocysteine
  MOD_RES (144)..(144): Selenocysteine
MDXNLNGRGLEXWSSWGLRCMQCKXNGDCRVEECALGQDLCRXXIVRLWEEGEELELVEKSCXHSEKXNRXLSYRXGLKIXSLXEVVCGLDLCNQGNSGRAVXYSRSRYLECISCGSSDMSCERGRHQSLQCRSPEEQCLDVVXHWIQEGEE

SEQ ID NO: 20373 - protein, 335 aa, Homo sapiens
  MOD_RES (15)..(15): Selenocysteine
  MOD_RES (30)..(30): Selenocysteine
  MOD_RES (48)..(49): Selenocysteine
  MOD_RES (68)..(68): Selenocysteine
  MOD_RES (73)..(73): Selenocysteine
  MOD_RES (76)..(76): Selenocysteine
  MOD_RES (81)..(81): Selenocysteine
  MOD_RES (86)..(86): Selenocysteine
  MOD_RES (89)..(89): Selenocysteine
  MOD_RES (108)..(108): Selenocysteine
  MOD_RES (149)..(149): Selenocysteine
  MOD_RES (186)..(186): Selenocysteine
  MOD_RES (195)..(196): Selenocysteine
  MOD_RES (224)..(224): Selenocysteine
  MOD_RES (232)..(232): Selenocysteine
  MOD_RES (248)..(248): Selenocysteine
  MOD_RES (250)..(250): Selenocysteine
  MOD_RES (265)..(265): Selenocysteine
  MOD_RES (289)..(289): Selenocysteine
  MOD_RES (318)..(318): Selenocysteine
  MOD_RES (320)..(320): Selenocysteine
  MOD_RES (324)..(324): Selenocysteine
  MOD_RES (331)..(331): Selenocysteine
  MOD_RES (335)..(335): Selenocysteine
MGHPPLLPLLLLLHXCVPASWGLRCMQCKXNGDCRVEECALGQDLCRXXIVRLWEEGEELELVEKSCXHSEKXNRXLSYRXGLKIXSLXEVVCGLDLCNQGNSGRAVXYSRSRYLECISCGSSDMSCERGRHQSLQCRSPEEQCLDVVXHWIQEGEEGRPKDDRHLRGCGYLPGCPGSNGFHNNDXFHFLKCCNXXKCNEGPILELENLPQNGRQCYSCKGNSXHGCSSEEXFLIDCRGPMNQCLVAXGXHEPKNQSYMVRGCAXASMCQHAHLGDAFSMNHIDVSCCXKSGCNHPDLDVQYRSGAAPQPGPAHLSLXIXLLMXARLWGGXLLWX

SEQ ID NO: 20374 - protein, 281 aa, Homo sapiens
  MOD_RES (15)..(15): Selenocysteine
  MOD_RES (30)..(30): Selenocysteine
  MOD_RES (48)..(49): Selenocysteine
  MOD_RES (68)..(68): Selenocysteine
  MOD_RES (73)..(73): Selenocysteine
  MOD_RES (76)..(76): Selenocysteine
  MOD_RES (81)..(81): Selenocysteine
  MOD_RES (86)..(86): Selenocysteine
  MOD_RES (89)..(89): Selenocysteine
  MOD_RES (108)..(108): Selenocysteine
  MOD_RES (149)..(149): Selenocysteine
  MOD_RES (186)..(186): Selenocysteine
  MOD_RES (195)..(196): Selenocysteine
  MOD_RES (224)..(224): Selenocysteine
  MOD_RES (232)..(232): Selenocysteine
  MOD_RES (248)..(248): Selenocysteine
  MOD_RES (250)..(250): Selenocysteine
  MOD_RES (265)..(266): Selenocysteine
  MOD_RES (279)..(279): Selenocysteine
MGHPPLLPLLLLLHXCVPASWGLRCMQCKXNGDCRVEECALGQDLCRXXIVRLWEEGEELELVEKSCXHSEKXNRXLSYRXGLKIXSLXEVVCGLDLCNQGNSGRAVXYSRSRYLECISCGSSDMSCERGRHQSLQCRSPEEQCLDVVXHWIQEGEEGRPKDDRHLRGCGYLPGCPGSNGFHNNDXFHFLKCCNXXKCNEGPILELENLPQNGRQCYSCKGNSXHGCSSEEXFLIDCRGPMNQCLVAXGXHERSLWGSWLPCKSXXALRPPCCEEAQAXHV

SEQ ID NO: 20375 - protein, 286 aa, Homo sapiens
  MOD_RES (15)..(15): Selenocysteine
  MOD_RES (30)..(30): Selenocysteine
  MOD_RES (48)..(49): Selenocysteine
  MOD_RES (68)..(68): Selenocysteine
  MOD_RES (73)..(73): Selenocysteine
  MOD_RES (76)..(76): Selenocysteine
  MOD_RES (81)..(81): Selenocysteine
  MOD_RES (86)..(86): Selenocysteine
  MOD_RES (89)..(89): Selenocysteine
  MOD_RES (108)..(108): Selenocysteine
  MOD_RES (149)..(149): Selenocysteine
  MOD_RES (186)..(186): Selenocysteine
  MOD_RES (195)..(196): Selenocysteine
  MOD_RES (216)..(216): Selenocysteine
  MOD_RES (240)..(240): Selenocysteine
  MOD_RES (269)..(269): Selenocysteine
  MOD_RES (271)..(271): Selenocysteine
  MOD_RES (275)..(275): Selenocysteine
  MOD_RES (282)..(282): Selenocysteine
  MOD_RES (286)..(286): Selenocysteine
MGHPPLLPLLLLLHXCVPASWGLRCMQCKXNGDCRVEECALGQDLCRXXIVRLWEEGEELELVEKSCXHSEKXNRXLSYRXGLKIXSLXEVVCGLDLCNQGNSGRAVXYSRSRYLECISCGSSDMSCERGRHQSLQCRSPEEQCLDVVXHWIQEGEEGRPKDDRHLRGCGYLPGCPGSNGFHNNDXFHFLKCCNXXKCNEGPKPKNQSYMVRGCAXASMCQHAHLGDAFSMNHIDVSCCXKSGCNHPDLDVQYRSGAAPQPGPAHLSLXIXLLMXARLWGGXLLWX

SEQ ID NO: 20376 - protein, 290 aa, Homo sapiens
  MOD_RES (15)..(15): Selenocysteine
  MOD_RES (30)..(30): Selenocysteine
  MOD_RES (48)..(49): Selenocysteine
  MOD_RES (68)..(68): Selenocysteine
  MOD_RES (73)..(73): Selenocysteine
  MOD_RES (76)..(76): Selenocysteine
  MOD_RES (81)..(81): Selenocysteine
  MOD_RES (86)..(86): Selenocysteine
  MOD_RES (89)..(89): Selenocysteine
  MOD_RES (108)..(108): Selenocysteine
  MOD_RES (149)..(149): Selenocysteine
  MOD_RES (179)..(179): Selenocysteine
  MOD_RES (187)..(187): Selenocysteine
  MOD_RES (203)..(203): Selenocysteine
  MOD_RES (205)..(205): Selenocysteine
  MOD_RES (220)..(220): Selenocysteine
  MOD_RES (244)..(244): Selenocysteine
  MOD_RES (273)..(273): Selenocysteine
  MOD_RES (275)..(275): Selenocysteine
  MOD_RES (279)..(279): Selenocysteine
  MOD_RES (286)..(286): Selenocysteine
  MOD_RES (290)..(290): Selenocysteine
MGHPPLLPLLLLLHXCVPASWGLRCMQCKXNGDCRVEECALGQDLCRXXIVRLWEEGEELELVEKSCXHSEKXNRXLSYRXGLKIXSLXEVVCGLDLCNQGNSGRAVXYSRSRYLECISCGSSDMSCERGRHQSLQCRSPEEQCLDVVXHWIQEGEEVLELENLPQNGRQCYSCKGNSXHGCSSEEXFLIDCRGPMNQCLVAXGXHEPKNQSYMVRGCAXASMCQHAHLGDAFSMNHIDVSCCXKSGCNHPDLDVQYRSGAAPQPGPAHLSLXIXLLMXARLWGGXLLWX

SEQ ID NO: 20377 - protein, 46 aa, Homo sapiens
  MOD_RES (15)..(15): Selenocysteine
  MOD_RES (22)..(22): Selenocysteine
MGHPPLLPLLLLLHXCVPAWAXARDSISKKKKRKKKERRNLRRYNL

SEQ ID NO: 20378 - protein, 153 aa, Homo sapiens
  MOD_RES (5)..(5): Selenocysteine
  MOD_RES (23)..(24): Selenocysteine
  MOD_RES (43)..(43): Selenocysteine
  MOD_RES (48)..(48): Selenocysteine
  MOD_RES (51)..(51): Selenocysteine
  MOD_RES (56)..(56): Selenocysteine
  MOD_RES (61)..(61): Selenocysteine
  MOD_RES (64)..(64): Selenocysteine
  MOD_RES (83)..(83): Selenocysteine
  MOD_RES (124)..(124): Selenocysteine
MQCKXNGDCRVEECALGQDLCRXXIVRLWEEGEELELVEKSCXHSEKXNRXLSYRXGLKIXSLXEVVCGLDLCNQGNSGRAVXYSRSRYLECISCGSSDMSCERGRHQSLQCRSPEEQCLDVVXHWIQEGEEGRPKDDRHLRGCGYLPGCPGS

SEQ ID NO: 20379 - protein, 226 aa, Homo sapiens
  MOD_RES (5)..(5): Selenocysteine
  MOD_RES (23)..(24): Selenocysteine
  MOD_RES (43)..(43): Selenocysteine
  MOD_RES (48)..(48): Selenocysteine
  MOD_RES (51)..(51): Selenocysteine
  MOD_RES (56)..(56): Selenocysteine
  MOD_RES (61)..(61): Selenocysteine
  MOD_RES (64)..(64): Selenocysteine
  MOD_RES (83)..(83): Selenocysteine
  MOD_RES (124)..(124): Selenocysteine
  MOD_RES (161)..(161): Selenocysteine
  MOD_RES (170)..(171): Selenocysteine
  MOD_RES (199)..(199): Selenocysteine
  MOD_RES (207)..(207): Selenocysteine
  MOD_RES (223)..(223): Selenocysteine
  MOD_RES (225)..(225): Selenocysteine
MQCKXNGDCRVEECALGQDLCRXXIVRLWEEGEELELVEKSCXHSEKXNRXLSYRXGLKIXSLXEVVCGLDLCNQGNSGRAVXYSRSRYLECISCGSSDMSCERGRHQSLQCRSPEEQCLDVVXHWIQEGEEGRPKDDRHLRGCGYLPGCPGSNGFHNNDXFHFLKCCNXXKCNEGPILELENLPQNGRQCYSCKGNSXHGCSSEEXFLIDCRGPMNQCLVAXGXH

SEQ ID NO: 20380 - protein, 154 aa, Homo sapiens
  MOD_RES (1)..(1): Any amino acid
  MOD_RES (24)..(24): Selenocysteine
  MOD_RES (61)..(61): Selenocysteine
  MOD_RES (70)..(71): Selenocysteine
  MOD_RES (99)..(99): Selenocysteine
  MOD_RES (107)..(107): Selenocysteine
  MOD_RES (123)..(123): Selenocysteine
  MOD_RES (125)..(125): Selenocysteine
  MOD_RES (148)..(148): Selenocysteine
  MOD_RES (151)..(151): Selenocysteine
XCERGRHQSLQCRSPEEQCLDVVXHWIQEGEEGRPKDDRHLRGCGYLPGCPGSNGFHNNDXFHFLKCCNXXKCNEGPILELENLPQNGRQCYSCKGNSXHGCSSEEXFLIDCRGPMNQCLVAXGXHGCGHFCHGKVEFRLGAVAEACXLSXLGG

SEQ ID NO: 20381 - protein, 133 aa, Homo sapiens
  MOD_RES (1)..(1): Any amino acid
  MOD_RES (38)..(38): Selenocysteine
  MOD_RES (75)..(75): Selenocysteine
  MOD_RES (84)..(85): Selenocysteine
  MOD_RES (113)..(113): Selenocysteine
  MOD_RES (121)..(121): Selenocysteine
  MOD_RES (129)..(129): Selenocysteine
  MOD_RES (133)..(133): Selenocysteine
XRYLECISCGSSDMSCERGRHQSLQCRSPEEQCLDVVXHWIQEGEEGRPKDDRHLRGCGYLPGCPGSNGFHNNDXFHFLKCCNXXKCNEGPILELENLPQNGRQCYSCKGNSXHGCSSEEXFLIDCRGXLLWX

SEQ ID NO: 20382 - protein, 185 aa, Homo sapiens
  MOD_RES (1)..(1): Any amino acid
  MOD_RES (12)..(12): Selenocysteine
  MOD_RES (30)..(31): Selenocysteine
  MOD_RES (42)..(42): Selenocysteine
  MOD_RES (83)..(83): Selenocysteine
  MOD_RES (120)..(120): Selenocysteine
  MOD_RES (129)..(130): Selenocysteine
  MOD_RES (158)..(158): Selenocysteine
  MOD_RES (166)..(166): Selenocysteine
  MOD_RES (182)..(182): Selenocysteine
  MOD_RES (184)..(184): Selenocysteine
XSWGLRCMQCKXNGDCRVEECALGQDLCRXXIVRLWEGRAVXYSRSRYLECISCGSSDMSCERGRHQSLQCRSPEEQCLDVVXHWIQEGEEGRPKDDRHLRGCGYLPGCPGSNGFHNNDXFHFLKCCNXXKCNEGPILELENLPQNGRQCYSCKGNSXHGCSSEEXFLIDCRGPMNQCLVAXGXH

SEQ ID NO: 20383 - protein, 196 aa, Homo sapiens
  MOD_RES (14)..(14): Selenocysteine
  MOD_RES (27)..(27): Selenocysteine
  MOD_RES (34)..(34): Selenocysteine
  MOD_RES (36)..(36): Selenocysteine
  MOD_RES (60)..(60): Selenocysteine
  MOD_RES (104)..(104): Selenocysteine
  MOD_RES (121)..(121): Selenocysteine
  MOD_RES (150)..(150): Selenocysteine
  MOD_RES (172)..(172): Selenocysteine
  MOD_RES (175)..(175): Selenocysteine
  MOD_RES (185)..(185): Selenocysteine
IISGQFLSDKKVGXYVEVDMFGLPVDXRRKAFKXKXSQGNAVNPVWEEEPIVFKKVVLPXLACLRIAVYEEGGKFIGHRILPVQAIRPGYHYICLRNERNQPLXLPAVFVYIEVKDYVPDXYADVIEALSNPIRYVNLMEQRAKQLAALXLEDEEEVKKEGGFLHDEIMRLXRNXLEKLMALPLXHVVPIQSKMLS

SEQ ID NO: 20384 - protein, 41 aa, Homo sapiens
IQEVVQYIKRLEEAQSKRQEKLVEKHKEIRQQILDEKPKVP

SEQ ID NO: 20385 - protein, 1173 aa, Homo sapiens
  MOD_RES (26)..(26): Selenocysteine
  MOD_RES (36)..(36): Selenocysteine
  MOD_RES (39)..(39): Selenocysteine
  MOD_RES (45)..(45): Selenocysteine
  MOD_RES (55)..(55): Selenocysteine
  MOD_RES (61)..(61): Selenocysteine
  MOD_RES (104)..(104): Selenocysteine
  MOD_RES (131)..(131): Selenocysteine
  MOD_RES (139)..(139): Selenocysteine
  MOD_RES (157)..(157): Selenocysteine
  MOD_RES (164)..(164): Selenocysteine
  MOD_RES (187)..(187): Selenocysteine
  MOD_RES (208)..(208): Selenocysteine
  MOD_RES (241)..(241): Selenocysteine
  MOD_RES (333)..(333): Selenocysteine
  MOD_RES (336)..(336): Selenocysteine
  MOD_RES (369)..(369): Selenocysteine
  MOD_RES (377)..(377): Selenocysteine
  MOD_RES (381)..(381): Selenocysteine
  MOD_RES (383)..(384): Selenocysteine
  MOD_RES (402)..(402): Selenocysteine
  MOD_RES (489)..(489): Selenocysteine
  MOD_RES (509)..(509): Selenocysteine
  MOD_RES (529)..(529): Selenocysteine
  MOD_RES (537)..(537): Selenocysteine
  MOD_RES (573)..(573): Selenocysteine
  MOD_RES (580)..(580): Selenocysteine
  MOD_RES (602)..(602): Selenocysteine
  MOD_RES (628)..(628): Selenocysteine
  MOD_RES (666)..(666): Selenocysteine
  MOD_RES (677)..(677): Selenocysteine
  MOD_RES (695)..(695): Selenocysteine
  MOD_RES (708)..(708): Selenocysteine
  MOD_RES (715)..(715): Selenocysteine
  MOD_RES (717)..(717): Selenocysteine
  MOD_RES (741)..(741): Selenocysteine
  MOD_RES (785)..(785): Selenocysteine
  MOD_RES (802)..(802): Selenocysteine
  MOD_RES (831)..(831): Selenocysteine
  MOD_RES (847)..(847): Selenocysteine
  MOD_RES (857)..(858): Selenocysteine
  MOD_RES (867)..(869): Selenocysteine
  MOD_RES (871)..(871): Selenocysteine
  MOD_RES (894)..(894): Selenocysteine
  MOD_RES (903)..(903): Selenocysteine
  MOD_RES (909)..(909): Selenocysteine
  MOD_RES (941)..(942): Selenocysteine
  MOD_RES (949)..(950): Selenocysteine
  MOD_RES (989)..(989): Selenocysteine
  MOD_RES (1002)..(1002): Selenocysteine
  MOD_RES (1043)..(1043): Selenocysteine
  MOD_RES (1081)..(1081): Selenocysteine
  MOD_RES (1096)..(1096): Selenocysteine
  MOD_RES (1152)..(1152): Selenocysteine
  MOD_RES (1164)..(1164): Selenocysteine
MAGAQPGVHALQLKPVCVSDSLKKGXKFVKWDDDSXIVXPIILRXDPQGFFFYWXDQNKEXELLDLSLVKDARCGRHAKAPKDPKLRELLDVGNIGRLEQRMIXVVYGPDLVNISHLNLVAFQEEVAKEWXNEVFSLAXNLLAQNMSRDAFLEKAYXKLKLQVXPEGRIPLKNIYRLFSADRKRVEXALEACSLPSSRNDSIPQEDFXPEVYRVFLNNLCPRPEIDNIFSEFGAKSKPYLXVDQMMDFINLKQRDPRLNEILYPPLKQEQVQVLIEKYEPNNSLARKGQISVDGFMRYLSGEENGVVSPEKLDLNEDMSQPLSHYFINSSHNXYLXAGQLAGNSSVEMYRQVLLSGCRCVELDCWKGRXAEEEPVIXHGFXMXXEISFKEVIEAIAECAFKXSPFPILLSFENHVDSPKQQAKMAEYCRLIFGDALLMEPLEKYPLESGVPLPSPMDLMYKILVKNKKKSHKSSEGSGKKKLSEQASNXYSDSSSMFEPSSPGAGEADXESDDDDDDDDCKKSSMDEGXAGSEAMAXEEMSNLVNYIQPVKFESFEISKKRNKSFEMSSFVEXKGLEQLXKSPVEFVEYNKMQLSRIYPKGXRVDSSNYMPQLFWNAGCQMVALNFQXMDLAMQINMGMYEYNGKSGYRLKPEFMRRPDKHFDPFXEGIVDGIVANXLSVKIISGQFLSDKKVGXYVEVDMFGLPVDXRRKAFKXKXSQGNAVNPVWEEEPIVFKKVVLPXLACLRIAVYEEGGKFIGHRILPVQAIRPGYHYICLRNERNQPLXLPAVFVYIEVKDYVPDXYADVIEALSNPIRYVNLMEQRAKQLAALXLEDEEEVKKEADPGEXPSEAPSEARXXPAENGVNHXXXLXPKPPSQALHSQPAPGSVKAPAKXEDLIQSVLXEVEAQXIEELKQQKSFVKLQKKHYKEMKDLVKRHHKKXXDLIKEHXXKYNEIQNDYLRRRAALEKSAKKDSKKKSEPSSPDHGSSXIEQDLAALDAEMXQKLIDLKDKQQQQLLNLRQEQYYSEKYQKREHIKLLIQKLXDVAEECQNNQLKKLKEICEKEKKELKKKMDKKRQEKIXEAKSKDKSQMEEEKXEMIRSYIQEVVQYIKRLEEAQSKRQEKLVEKHKEIRQQILDEKPKGEGSSSFLSEXCHEDPSVSPNFXPPNPQALKW

SEQ ID NO: 20386 - protein, 1216 aa, Homo sapiens
  MOD_RES (26)..(26): Selenocysteine
  MOD_RES (36)..(36): Selenocysteine
  MOD_RES (39)..(39): Selenocysteine
  MOD_RES (45)..(45): Selenocysteine
  MOD_RES (55)..(55): Selenocysteine
  MOD_RES (61)..(61): Selenocysteine
  MOD_RES (104)..(104): Selenocysteine
  MOD_RES (131)..(131): Selenocysteine
  MOD_RES (139)..(139): Selenocysteine
  MOD_RES (157)..(157): Selenocysteine
  MOD_RES (164)..(164): Selenocysteine
  MOD_RES (187)..(187): Selenocysteine
  MOD_RES (208)..(208): Selenocysteine
  MOD_RES (241)..(241): Selenocysteine
  MOD_RES (333)..(333): Selenocysteine
  MOD_RES (336)..(336): Selenocysteine
  MOD_RES (369)..(369): Selenocysteine
  MOD_RES (377)..(377): Selenocysteine
  MOD_RES (381)..(381): Selenocysteine
  MOD_RES (383)..(384): Selenocysteine
  MOD_RES (402)..(402): Selenocysteine
  MOD_RES (489)..(489): Selenocysteine
  MOD_RES (509)..(509): Selenocysteine
  MOD_RES (529)..(529): Selenocysteine
  MOD_RES (537)..(537): Selenocysteine
  MOD_RES (573)..(573): Selenocysteine
  MOD_RES (580)..(580): Selenocysteine
  MOD_RES (602)..(602): Selenocysteine
  MOD_RES (628)..(628): Selenocysteine
  MOD_RES (666)..(666): Selenocysteine
  MOD_RES (677)..(677): Selenocysteine
  MOD_RES (695)..(695): Selenocysteine
  MOD_RES (708)..(708): Selenocysteine
  MOD_RES (715)..(715): Selenocysteine
  MOD_RES (717)..(717): Selenocysteine
  MOD_RES (741)..(741): Selenocysteine
  MOD_RES (785)..(785): Selenocysteine
  MOD_RES (802)..(802): Selenocysteine
  MOD_RES (831)..(831): Selenocysteine
  MOD_RES (847)..(847): Selenocysteine
  MOD_RES (857)..(858): Selenocysteine
  MOD_RES (867)..(869): Selenocysteine
  MOD_RES (871)..(871): Selenocysteine
  MOD_RES (894)..(894): Selenocysteine
  MOD_RES (903)..(903): Selenocysteine
  MOD_RES (909)..(909): Selenocysteine
  MOD_RES (941)..(942): Selenocysteine
  MOD_RES (949)..(950): Selenocysteine
  MOD_RES (989)..(989): Selenocysteine
  MOD_RES (1002)..(1002): Selenocysteine
  MOD_RES (1043)..(1043): Selenocysteine
  MOD_RES (1081)..(1081): Selenocysteine
  MOD_RES (1096)..(1096): Selenocysteine
  MOD_RES (1197)..(1197): Selenocysteine
  MOD_RES (1214)..(1214): Selenocysteine
MAGAQPGVHALQLKPVCVSDSLKKGXKFVKWDDDSXIVXPIILRXDPQGFFFYWXDQNKEXELLDLSLVKDARCGRHAKAPKDPKLRELLDVGNIGRLEQRMIXVVYGPDLVNISHLNLVAFQEEVAKEWXNEVFSLAXNLLAQNMSRDAFLEKAYXKLKLQVXPEGRIPLKNIYRLFSADRKRVEXALEACSLPSSRNDSIPQEDFXPEVYRVFLNNLCPRPEIDNIFSEFGAKSKPYLXVDQMMDFINLKQRDPRLNEILYPPLKQEQVQVLIEKYEPNNSLARKGQISVDGFMRYLSGEENGVVSPEKLDLNEDMSQPLSHYFINSSHNXYLXAGQLAGNSSVEMYRQVLLSGCRCVELDCWKGRXAEEEPVIXHGFXMXXEISFKEVIEAIAECAFKXSPFPILLSFENHVDSPKQQAKMAEYCRLIFGDALLMEPLEKYPLESGVPLPSPMDLMYKILVKNKKKSHKSSEGSGKKKLSEQASNXYSDSSSMFEPSSPGAGEADXESDDDDDDDDCKKSSMDEGXAGSEAMAXEEMSNLVNYIQPVKFESFEISKKRNKSFEMSSFVEXKGLEQLXKSPVEFVEYNKMQLSRIYPKGXRVDSSNYMPQLFWNAGCQMVALNFQXMDLAMQINMGMYEYNGKSGYRLKPEFMRRPDKHFDPFXEGIVDGIVANXLSVKIISGQFLSDKKVGXYVEVDMFGLPVDXRRKAFKXKXSQGNAVNPVWEEEPIVFKKVVLPXLACLRIAVYEEGGKFIGHRILPVQAIRPGYHYICLRNERNQPLXLPAVFVYIEVKDYVPDXYADVIEALSNPIRYVNLMEQRAKQLAALXLEDEEEVKKEADPGEXPSEAPSEARXXPAENGVNHXXXLXPKPPSQALHSQPAPGSVKAPAKXEDLIQSVLXEVEAQXIEELKQQKSFVKLQKKHYKEMKDLVKRHHKKXXDLIKEHXXKYNEIQNDYLRRRAALEKSAKKDSKKKSEPSSPDHGSSXIEQDLAALDAEMXQKLIDLKDKQQQQLLNLRQEQYYSEKYQKREHIKLLIQKLXDVAEECQNNQLKKLKEICEKEKKELKKKMDKKRQEKIXEAKSKDKSQMEEEKXEMIRSYIQEVVQYIKRLEEAQSKRQEKLVEKHKEIRQQILDEKPKLQVELEQEYQDKFKRLPLEILEFVQEAMKGKISEDSNHGSAPLSLSSDPGKVNHKXPSSEELGGDIPGKEFDXPL

SEQ ID NO: 20387 - protein, 248 aa, Homo sapiens
  MOD_RES (26)..(26): Selenocysteine
  MOD_RES (36)..(36): Selenocysteine
  MOD_RES (39)..(39): Selenocysteine
  MOD_RES (45)..(45): Selenocysteine
  MOD_RES (55)..(55): Selenocysteine
  MOD_RES (61)..(61): Selenocysteine
  MOD_RES (104)..(104): Selenocysteine
  MOD_RES (131)..(131): Selenocysteine
  MOD_RES (139)..(139): Selenocysteine
  MOD_RES (157)..(157): Selenocysteine
  MOD_RES (164)..(164): Selenocysteine
  MOD_RES (187)..(187): Selenocysteine
MAGAQPGVHALQLKPVCVSDSLKKGXKFVKWDDDSXIVXPIILRXDPQGFFFYWXDQNKEXELLDLSLVKDARCGRHAKAPKDPKLRELLDVGNIGRLEQRMIXVVYGPDLVNISHLNLVAFQEEVAKEWXNEVFSLAXNLLAQNMSRDAFLEKAYXKLKLQVXPEGRIPLKNIYRLFSADRKRVEXALEACSLPSSRVEKANEAAKSEQSCGKAPPKHFHLHFIKQNKMLEPACYCFFVRCFGIGKI

SEQ ID NO: 20388 - protein, 205 aa, Homo sapiens
  MOD_RES (26)..(26): Selenocysteine
  MOD_RES (36)..(36): Selenocysteine
  MOD_RES (39)..(39): Selenocysteine
  MOD_RES (45)..(45): Selenocysteine
  MOD_RES (55)..(55): Selenocysteine
  MOD_RES (61)..(61): Selenocysteine
  MOD_RES (104)..(104): Selenocysteine
  MOD_RES (131)..(131): Selenocysteine
  MOD_RES (139)..(139): Selenocysteine
  MOD_RES (157)..(157): Selenocysteine
  MOD_RES (164)..(164): Selenocysteine
  MOD_RES (187)..(187): Selenocysteine
MAGAQPGVHALQLKPVCVSDSLKKGXKFVKWDDDSXIVXPIILRXDPQGFFFYWXDQNKEXELLDLSLVKDARCGRHAKAPKDPKLRELLDVGNIGRLEQRMIXVVYGPDLVNISHLNLVAFQEEVAKEWXNEVFSLAXNLLAQNMSRDAFLEKAYXKLKLQVXPEGRIPLKNIYRLFSADRKRVEXALEACSLPSSRVSMCVML

SEQ ID NO: 20389 - protein, 178 aa, Homo sapiens
  MOD_RES (26)..(26): Selenocysteine
  MOD_RES (36)..(36): Selenocysteine
  MOD_RES (39)..(39): Selenocysteine
  MOD_RES (45)..(45): Selenocysteine
  MOD_RES (55)..(55): Selenocysteine
  MOD_RES (61)..(61): Selenocysteine
  MOD_RES (104)..(104): Selenocysteine
  MOD_RES (131)..(131): Selenocysteine
  MOD_RES (139)..(139): Selenocysteine
  MOD_RES (157)..(157): Selenocysteine
  MOD_RES (164)..(164): Selenocysteine
MAGAQPGVHALQLKPVCVSDSLKKGXKFVKWDDDSXIVXPIILRXDPQGFFFYWXDQNKEXELLDLSLVKDARCGRHAKAPKDPKLRELLDVGNIGRLEQRMIXVVYGPDLVNISHLNLVAFQEEVAKEWXNEVFSLAXNLLAQNMSRDAFLEKAYXKLKLQVXPEGRIPLKNRSEAS

SEQ ID NO: 20390 - protein, 137 aa, Homo sapiens
  MOD_RES (3)..(3): Selenocysteine
  MOD_RES (30)..(30): Selenocysteine
  MOD_RES (38)..(38): Selenocysteine
  MOD_RES (56)..(56): Selenocysteine
  MOD_RES (63)..(63): Selenocysteine
  MOD_RES (86)..(86): Selenocysteine
  MOD_RES (107)..(107): Selenocysteine
MIXVVYGPDLVNISHLNLVAFQEEVAKEWXNEVFSLAXNLLAQNMSRDAFLEKAYXKLKLQVXPEGRIPLKNIYRLFSADRKRVEXALEACSLPSSRNDSIPQEDFXPEVYRVFLNNLCPRPEIDNIFSEFGAKSKP

SEQ ID NO: 20391 - protein, 960 aa, Homo sapiens
  MOD_RES (3)..(3): Selenocysteine
  MOD_RES (30)..(30): Selenocysteine
  MOD_RES (38)..(38): Selenocysteine
  MOD_RES (56)..(56): Selenocysteine
  MOD_RES (63)..(63): Selenocysteine
  MOD_RES (86)..(86): Selenocysteine
  MOD_RES (107)..(107): Selenocysteine
  MOD_RES (140)..(140): Selenocysteine
  MOD_RES (232)..(232): Selenocysteine
  MOD_RES (235)..(235): Selenocysteine
  MOD_RES (268)..(268): Selenocysteine
  MOD_RES (276)..(276): Selenocysteine
  MOD_RES (280)..(280): Selenocysteine
  MOD_RES (282)..(283): Selenocysteine
  MOD_RES (301)..(301): Selenocysteine
  MOD_RES (388)..(388): Selenocysteine
  MOD_RES (408)..(408): Selenocysteine
  MOD_RES (428)..(428): Selenocysteine
  MOD_RES (436)..(436): Selenocysteine
  MOD_RES (472)..(472): Selenocysteine
  MOD_RES (479)..(479): Selenocysteine
  MOD_RES (501)..(501): Selenocysteine
  MOD_RES (527)..(527): Selenocysteine
  MOD_RES (565)..(565): Selenocysteine
  MOD_RES (576)..(576): Selenocysteine
  MOD_RES (594)..(594): Selenocysteine
  MOD_RES (607)..(607): Selenocysteine
  MOD_RES (614)..(614): Selenocysteine
  MOD_RES (616)..(616): Selenocysteine
  MOD_RES (640)..(640): Selenocysteine
  MOD_RES (684)..(684): Selenocysteine
  MOD_RES (701)..(701): Selenocysteine
  MOD_RES (730)..(730): Selenocysteine
  MOD_RES (746)..(746): Selenocysteine
  MOD_RES (756)..(757): Selenocysteine
  MOD_RES (766)..(768): Selenocysteine
  MOD_RES (770)..(770): Selenocysteine
  MOD_RES (793)..(793): Selenocysteine
  MOD_RES (802)..(802): Selenocysteine
  MOD_RES (808)..(808): Selenocysteine
  MOD_RES (840)..(841): Selenocysteine
  MOD_RES (848)..(849): Selenocysteine
  MOD_RES (888)..(888): Selenocysteine
  MOD_RES (901)..(901): Selenocysteine
  MOD_RES (942)..(942): Selenocysteine
MIXVVYGPDLVNISHLNLVAFQEEVAKEWXNEVFSLAXNLLAQNMSRDAFLEKAYXKLKLQVXPEGRIPLKNIYRLFSADRKRVEXALEACSLPSSRNDSIPQEDFXPEVYRVFLNNLCPRPEIDNIFSEFGAKSKPYLXVDQMMDFINLKQRDPRLNEILYPPLKQEQVQVLIEKYEPNNSLARKGQISVDGFMRYLSGEENGVVSPEKLDLNEDMSQPLSHYFINSSHNXYLXAGQLAGNSSVEMYRQVLLSGCRCVELDCWKGRXAEEEPVIXHGFXMXXEISFKEVIEAIAECAFKXSPFPILLSFENHVDSPKQQAKMAEYCRLIFGDALLMEPLEKYPLESGVPLPSPMDLMYKILVKNKKKSHKSSEGSGKKKLSEQASNXYSDSSSMFEPSSPGAGEADXESDDDDDDDDCKKSSMDEGXAGSEAMAXEEMSNLVNYIQPVKFESFEISKKRNKSFEMSSFVEXKGLEQLXKSPVEFVEYNKMQLSRIYPKGXRVDSSNYMPQLFWNAGCQMVALNFQXMDLAMQINMGMYEYNGKSGYRLKPEFMRRPDKHFDPFXEGIVDGIVANXLSVKIISGQFLSDKKVGXYVEVDMFGLPVDXRRKAFKXKXSQGNAVNPVWEEEPIVFKKVVLPXLACLRIAVYEEGGKFIGHRILPVQAIRPGYHYICLRNERNQPLXLPAVFVYIEVKDYVPDXYADVIEALSNPIRYVNLMEQRAKQLAALXLEDEEEVKKEADPGEXPSEAPSEARXXPAENGVNHXXXLXPKPPSQALHSQPAPGSVKAPAKXEDLIQSVLXEVEAQXIEELKQQKSFVKLQKKHYKEMKDLVKRHHKKXXDLIKEHXXKYNEIQNDYLRRRAALEKSAKKDSKKKSEPSSPDHGSSXIEQDLAALDAEMXQKLIDLKDKQQQQLLNLRQEQYYSEKYQKREHIKLLIQKLXDVAEECQNNQLKKLKEIC

SEQ ID NO: 20392 - protein, 961 aa, Homo sapiens
  MOD_RES (3)..(3): Selenocysteine
  MOD_RES (30)..(30): Selenocysteine
  MOD_RES (38)..(38): Selenocysteine
  MOD_RES (56)..(56): Selenocysteine
  MOD_RES (63)..(63): Selenocysteine
  MOD_RES (86)..(86): Selenocysteine
  MOD_RES (107)..(107): Selenocysteine
  MOD_RES (140)..(140): Selenocysteine
  MOD_RES (232)..(232): Selenocysteine
  MOD_RES (235)..(235): Selenocysteine
  MOD_RES (268)..(268): Selenocysteine
  MOD_RES (276)..(276): Selenocysteine
  MOD_RES (280)..(280): Selenocysteine
  MOD_RES (282)..(283): Selenocysteine
  MOD_RES (301)..(301): Selenocysteine
  MOD_RES (388)..(388): Selenocysteine
  MOD_RES (408)..(408): Selenocysteine
  MOD_RES (428)..(428): Selenocysteine
  MOD_RES (436)..(436): Selenocysteine
  MOD_RES (472)..(472): Selenocysteine
  MOD_RES (479)..(479): Selenocysteine
  MOD_RES (501)..(501): Selenocysteine
  MOD_RES (527)..(527): Selenocysteine
  MOD_RES (565)..(565): Selenocysteine
  MOD_RES (576)..(576): Selenocysteine
  MOD_RES (594)..(594): Selenocysteine
  MOD_RES (607)..(607): Selenocysteine
  MOD_RES (614)..(614): Selenocysteine
  MOD_RES (616)..(616): Selenocysteine
  MOD_RES (640)..(640): Selenocysteine
  MOD_RES (684)..(684): Selenocysteine
  MOD_RES (701)..(701): Selenocysteine
  MOD_RES (730)..(730): Selenocysteine
  MOD_RES (746)..(746): Selenocysteine
  MOD_RES (756)..(757): Selenocysteine
  MOD_RES (766)..(768): Selenocysteine
  MOD_RES (770)..(770): Selenocysteine
  MOD_RES (793)..(793): Selenocysteine
  MOD_RES (802)..(802): Selenocysteine
  MOD_RES (808)..(808): Selenocysteine
  MOD_RES (840)..(841): Selenocysteine
  MOD_RES (848)..(849): Selenocysteine
  MOD_RES (888)..(888): Selenocysteine
  MOD_RES (901)..(901): Selenocysteine
  MOD_RES (942)..(942): Selenocysteine
MIXVVYGPDLVNISHLNLVAFQEEVAKEWXNEVFSLAXNLLAQNMSRDAFLEKAYXKLKLQVXPEGRIPLKNIYRLFSADRKRVEXALEACSLPSSRNDSIPQEDFXPEVYRVFLNNLCPRPEIDNIFSEFGAKSKPYLXVDQMMDFINLKQRDPRLNEILYPPLKQEQVQVLIEKYEPNNSLARKGQISVDGFMRYLSGEENGVVSPEKLDLNEDMSQPLSHYFINSSHNXYLXAGQLAGNSSVEMYRQVLLSGCRCVELDCWKGRXAEEEPVIXHGFXMXXEISFKEVIEAIAECAFKXSPFPILLSFENHVDSPKQQAKMAEYCRLIFGDALLMEPLEKYPLESGVPLPSPMDLMYKILVKNKKKSHKSSEGSGKKKLSEQASNXYSDSSSMFEPSSPGAGEADXESDDDDDDDDCKKSSMDEGXAGSEAMAXEEMSNLVNYIQPVKFESFEISKKRNKSFEMSSFVEXKGLEQLXKSPVEFVEYNKMQLSRIYPKGXRVDSSNYMPQLFWNAGCQMVALNFQXMDLAMQINMGMYEYNGKSGYRLKPEFMRRPDKHFDPFXEGIVDGIVANXLSVKIISGQFLSDKKVGXYVEVDMFGLPVDXRRKAFKXKXSQGNAVNPVWEEEPIVFKKVVLPXLACLRIAVYEEGGKFIGHRILPVQAIRPGYHYICLRNERNQPLXLPAVFVYIEVKDYVPDXYADVIEALSNPIRYVNLMEQRAKQLAALXLEDEEEVKKEADPGEXPSEAPSEARXXPAENGVNHXXXLXPKPPSQALHSQPAPGSVKAPAKXEDLIQSVLXEVEAQXIEELKQQKSFVKLQKKHYKEMKDLVKRHHKKXXDLIKEHXXKYNEIQNDYLRRRAALEKSAKKDSKKKSEPSSPDHGSSXIEQDLAALDAEMXQKLIDLKDKQQQQLLNLRQEQYYSEKYQKREHIKLLIQKLXDVAEECQNNQLKKLKEICE

SEQ ID NO: 20393 - protein, 1072 aa, Homo sapiens
  MOD_RES (3)..(3): Selenocysteine
  MOD_RES (30)..(30): Selenocysteine
  MOD_RES (38)..(38): Selenocysteine
  MOD_RES (56)..(56): Selenocysteine
  MOD_RES (63)..(63): Selenocysteine
  MOD_RES (86)..(86): Selenocysteine
  MOD_RES (107)..(107): Selenocysteine
  MOD_RES (140)..(140): Selenocysteine
  MOD_RES (232)..(232): Selenocysteine
  MOD_RES (235)..(235): Selenocysteine
  MOD_RES (268)..(268): Selenocysteine
  MOD_RES (276)..(276): Selenocysteine
  MOD_RES (280)..(280): Selenocysteine
  MOD_RES (282)..(283): Selenocysteine
  MOD_RES (301)..(301): Selenocysteine
  MOD_RES (388)..(388): Selenocysteine
  MOD_RES (408)..(408): Selenocysteine
  MOD_RES (428)..(428): Selenocysteine
  MOD_RES (436)..(436): Selenocysteine
  MOD_RES (472)..(472): Selenocysteine
  MOD_RES (479)..(479): Selenocysteine
  MOD_RES (501)..(501): Selenocysteine
  MOD_RES (527)..(527): Selenocysteine
  MOD_RES (565)..(565): Selenocysteine
  MOD_RES (576)..(576): Selenocysteine
  MOD_RES (594)..(594): Selenocysteine
  MOD_RES (607)..(607): Selenocysteine
  MOD_RES (614)..(614): Selenocysteine
  MOD_RES (616)..(616): Selenocysteine
  MOD_RES (640)..(640): Selenocysteine
  MOD_RES (684)..(684): Selenocysteine
  MOD_RES (701)..(701): Selenocysteine
  MOD_RES (730)..(730): Selenocysteine
  MOD_RES (746)..(746): Selenocysteine
  MOD_RES (756)..(757): Selenocysteine
  MOD_RES (766)..(768): Selenocysteine
  MOD_RES (770)..(770): Selenocysteine
  MOD_RES (793)..(793): Selenocysteine
  MOD_RES (802)..(802): Selenocysteine
  MOD_RES (808)..(808): Selenocysteine
  MOD_RES (840)..(841): Selenocysteine
  MOD_RES (848)..(849): Selenocysteine
  MOD_RES (888)..(888): Selenocysteine
  MOD_RES (901)..(901): Selenocysteine
  MOD_RES (942)..(942): Selenocysteine
  MOD_RES (980)..(980): Selenocysteine
  MOD_RES (995)..(995): Selenocysteine
  MOD_RES (1051)..(1051): Selenocysteine
  MOD_RES (1063)..(1063): Selenocysteine
MIXVVYGPDLVNISHLNLVAFQEEVAKEWXNEVFSLAXNLLAQNMSRDAFLEKAYXKLKLQVXPEGRIPLKNIYRLFSADRKRVEXALEACSLPSSRNDSIPQEDFXPEVYRVFLNNLCPRPEIDNIFSEFGAKSKPYLXVDQMMDFINLKQRDPRLNEILYPPLKQEQVQVLIEKYEPNNSLARKGQISVDGFMRYLSGEENGVVSPEKLDLNEDMSQPLSHYFINSSHNXYLXAGQLAGNSSVEMYRQVLLSGCRCVELDCWKGRXAEEEPVIXHGFXMXXEISFKEVIEAIAECAFKXSPFPILLSFENHVDSPKQQAKMAEYCRLIFGDALLMEPLEKYPLESGVPLPSPMDLMYKILVKNKKKSHKSSEGSGKKKLSEQASNXYSDSSSMFEPSSPGAGEADXESDDDDDDDDCKKSSMDEGXAGSEAMAXEEMSNLVNYIQPVKFESFEISKKRNKSFEMSSFVEXKGLEQLXKSPVEFVEYNKMQLSRIYPKGXRVDSSNYMPQLFWNAGCQMVALNFQXMDLAMQINMGMYEYNGKSGYRLKPEFMRRPDKHFDPFXEGIVDGIVANXLSVKIISGQFLSDKKVGXYVEVDMFGLPVDXRRKAFKXKXSQGNAVNPVWEEEPIVFKKVVLPXLACLRIAVYEEGGKFIGHRILPVQAIRPGYHYICLRNERNQPLXLPAVFVYIEVKDYVPDXYADVIEALSNPIRYVNLMEQRAKQLAALXLEDEEEVKKEADPGEXPSEAPSEARXXPAENGVNHXXXLXPKPPSQALHSQPAPGSVKAPAKXEDLIQSVLXEVEAQXIEELKQQKSFVKLQKKHYKEMKDLVKRHHKKXXDLIKEHXXKYNEIQNDYLRRRAALEKSAKKDSKKKSEPSSPDHGSSXIEQDLAALDAEMXQKLIDLKDKQQQQLLNLRQEQYYSEKYQKREHIKLLIQKLXDVAEECQNNQLKKLKEICEKEKKELKKKMDKKRQEKIXEAKSKDKSQMEEEKXEMIRSYIQEVVQYIKRLEEAQSKRQEKLVEKHKEIRQQILDEKPKGEGSSSFLSEXCHEDPSVSPNFXPPNPQALKW

SEQ ID NO: 20394 - protein, 34 aa, Homo sapiens
  MOD_RES (25)..(25): Selenocysteine
RQEKLVEKHKEIRQQILDEKPKIQXVNSVMRWLP

SEQ ID NO: 20395 - protein, 1093 aa, Homo sapiens
  MOD_RES (1)..(1): Selenocysteine
  MOD_RES (24)..(24): Selenocysteine
  MOD_RES (51)..(51): Selenocysteine
  MOD_RES (59)..(59): Selenocysteine
  MOD_RES (77)..(77): Selenocysteine
  MOD_RES (84)..(84): Selenocysteine
  MOD_RES (107)..(107): Selenocysteine
  MOD_RES (128)..(128): Selenocysteine
  MOD_RES (161)..(161): Selenocysteine
  MOD_RES (253)..(253): Selenocysteine
  MOD_RES (256)..(256): Selenocysteine
  MOD_RES (289)..(289): Selenocysteine
  MOD_RES (297)..(297): Selenocysteine
  MOD_RES (301)..(301): Selenocysteine
  MOD_RES (303)..(304): Selenocysteine
  MOD_RES (322)..(322): Selenocysteine
  MOD_RES (409)..(409): Selenocysteine
  MOD_RES (429)..(429): Selenocysteine
  MOD_RES (449)..(449): Selenocysteine
  MOD_RES (457)..(457): Selenocysteine
  MOD_RES (493)..(493): Selenocysteine
  MOD_RES (500)..(500): Selenocysteine
  MOD_RES (522)..(522): Selenocysteine
  MOD_RES (548)..(548): Selenocysteine
  MOD_RES (586)..(586): Selenocysteine
  MOD_RES (597)..(597): Selenocysteine
  MOD_RES (615)..(615): Selenocysteine
  MOD_RES (628)..(628): Selenocysteine
  MOD_RES (635)..(635): Selenocysteine
  MOD_RES (637)..(637): Selenocysteine
  MOD_RES (661)..(661): Selenocysteine
  MOD_RES (705)..(705): Selenocysteine
  MOD_RES (722)..(722): Selenocysteine
  MOD_RES (751)..(751): Selenocysteine
  MOD_RES (767)..(767): Selenocysteine
  MOD_RES (777)..(778): Selenocysteine
  MOD_RES (787)..(789): Selenocysteine
  MOD_RES (791)..(791): Selenocysteine
  MOD_RES (814)..(814): Selenocysteine
  MOD_RES (823)..(823): Selenocysteine
  MOD_RES (829)..(829): Selenocysteine
  MOD_RES (861)..(862): Selenocysteine
  MOD_RES (869)..(870): Selenocysteine
  MOD_RES (909)..(909): Selenocysteine
  MOD_RES (922)..(922): Selenocysteine
  MOD_RES (963)..(963): Selenocysteine
  MOD_RES (1001)..(1001): Selenocysteine
  MOD_RES (1016)..(1016): Selenocysteine
  MOD_RES (1072)..(1072): Selenocysteine
  MOD_RES (1084)..(1084): Selenocysteine
XQDPKLRELLDVGNIGRLEQRMIXVVYGPDLVNISHLNLVAFQEEVAKEWXNEVFSLAXNLLAQNMSRDAFLEKAYXKLKLQVXPEGRIPLKNIYRLFSADRKRVEXALEACSLPSSRNDSIPQEDFXPEVYRVFLNNLCPRPEIDNIFSEFGAKSKPYLXVDQMMDFINLKQRDPRLNEILYPPLKQEQVQVLIEKYEPNNSLARKGQISVDGFMRYLSGEENGVVSPEKLDLNEDMSQPLSHYFINSSHNXYLXAGQLAGNSSVEMYRQVLLSGCRCVELDCWKGRXAEEEPVIXHGFXMXXEISFKEVIEAIAECAFKXSPFPILLSFENHVDSPKQQAKMAEYCRLIFGDALLMEPLEKYPLESGVPLPSPMDLMYKILVKNKKKSHKSSEGSGKKKLSEQASNXYSDSSSMFEPSSPGAGEADXESDDDDDDDDCKKSSMDEGXAGSEAMAXEEMSNLVNYIQPVKFESFEISKKRNKSFEMSSFVEXKGLEQLXKSPVEFVEYNKMQLSRIYPKGXRVDSSNYMPQLFWNAGCQMVALNFQXMDLAMQINMGMYEYNGKSGYRLKPEFMRRPDKHFDPFXEGIVDGIVANXLSVKIISGQFLSDKKVGXYVEVDMFGLPVDXRRKAFKXKXSQGNAVNPVWEEEPIVFKKVVLPXLACLRIAVYEEGGKFIGHRILPVQAIRPGYHYICLRNERNQPLXLPAVFVYIEVKDYVPDXYADVIEALSNPIRYVNLMEQRAKQLAALXLEDEEEVKKEADPGEXPSEAPSEARXXPAENGVNHXXXLXPKPPSQALHSQPAPGSVKAPAKXEDLIQSVLXEVEAQXIEELKQQKSFVKLQKKHYKEMKDLVKRHHKKXXDLIKEHXXKYNEIQNDYLRRRAALEKSAKKDSKKKSEPSSPDHGSSXIEQDLAALDAEMXQKLIDLKDKQQQQLLNLRQEQYYSEKYQKREHIKLLIQKLXDVAEECQNNQLKKLKEICEKEKKELKKKMDKKRQEKIXEAKSKDKSQMEEEKXEMIRSYIQEVVQYIKRLEEAQSKRQEKLVEKHKEIRQQILDEKPKGEGSSSFLSEXCHEDPSVSPNFXPPNPQALKW

SEQ ID NO: 20396 - protein, 1136 aa, Homo sapiens
  MOD_RES (1)..(1): Selenocysteine
  MOD_RES (24)..(24): Selenocysteine
  MOD_RES (51)..(51): Selenocysteine
  MOD_RES (59)..(59): Selenocysteine
  MOD_RES (77)..(77): Selenocysteine
  MOD_RES (84)..(84): Selenocysteine
  MOD_RES (107)..(107): Selenocysteine
  MOD_RES (128)..(128): Selenocysteine
  MOD_RES (161)..(161): Selenocysteine
  MOD_RES (253)..(253): Selenocysteine
  MOD_RES (256)..(256): Selenocysteine
  MOD_RES (289)..(289): Selenocysteine
  MOD_RES (297)..(297): Selenocysteine
  MOD_RES (301)..(301): Selenocysteine
  MOD_RES (303)..(304): Selenocysteine
  MOD_RES (322)..(322): Selenocysteine
  MOD_RES (409)..(409): Selenocysteine
  MOD_RES (429)..(429): Selenocysteine
  MOD_RES (449)..(449): Selenocysteine
  MOD_RES (457)..(457): Selenocysteine
  MOD_RES (493)..(493): Selenocysteine
  MOD_RES (500)..(500): Selenocysteine
  MOD_RES (522)..(522): Selenocysteine
  MOD_RES (548)..(548): Selenocysteine
  MOD_RES (586)..(586): Selenocysteine
  MOD_RES (597)..(597): Selenocysteine
  MOD_RES (615)..(615): Selenocysteine
  MOD_RES (628)..(628): Selenocysteine
  MOD_RES (635)..(635): Selenocysteine
  MOD_RES (637)..(637): Selenocysteine
  MOD_RES (661)..(661): Selenocysteine
  MOD_RES (705)..(705): Selenocysteine
  MOD_RES (722)..(722): Selenocysteine
  MOD_RES (751)..(751): Selenocysteine
  MOD_RES (767)..(767): Selenocysteine
  MOD_RES (777)..(778): Selenocysteine
  MOD_RES (787)..(789): Selenocysteine
  MOD_RES (791)..(791): Selenocysteine
  MOD_RES (814)..(814): Selenocysteine
  MOD_RES (823)..(823): Selenocysteine
  MOD_RES (829)..(829): Selenocysteine
  MOD_RES (861)..(862): Selenocysteine
  MOD_RES (869)..(870): Selenocysteine
  MOD_RES (909)..(909): Selenocysteine
  MOD_RES (922)..(922): Selenocysteine
  MOD_RES (963)..(963): Selenocysteine
  MOD_RES (1001)..(1001): Selenocysteine
  MOD_RES (1016)..(1016): Selenocysteine
  MOD_RES (1117)..(1117): Selenocysteine
  MOD_RES (1134)..(1134): Selenocysteine
XQDPKLRELLDVGNIGRLEQRMIXVVYGPDLVNISHLNLVAFQEEVAKEWXNEVFSLAXNLLAQNMSRDAFLEKAYXKLKLQVXPEGRIPLKNIYRLFSADRKRVEXALEACSLPSSRNDSIPQEDFXPEVYRVFLNNLCPRPEIDNIFSEFGAKSKPYLXVDQMMDFINLKQRDPRLNEILYPPLKQEQVQVLIEKYEPNNSLARKGQISVDGFMRYLSGEENGVVSPEKLDLNEDMSQPLSHYFINSSHNXYLXAGQLAGNSSVEMYRQVLLSGCRCVELDCWKGRXAEEEPVIXHGFXMXXEISFKEVIEAIAECAFKXSPFPILLSFENHVDSPKQQAKMAEYCRLIFGDALLMEPLEKYPLESGVPLPSPMDLMYKILVKNKKKSHKSSEGSGKKKLSEQASNXYSDSSSMFEPSSPGAGEADXESDDDDDDDDCKKSSMDEGXAGSEAMAXEEMSNLVNYIQPVKFESFEISKKRNKSFEMSSFVEXKGLEQLXKSPVEFVEYNKMQLSRIYPKGXRVDSSNYMPQLFWNAGCQMVALNFQXMDLAMQINMGMYEYNGKSGYRLKPEFMRRPDKHFDPFXEGIVDGIVANXLSVKIISGQFLSDKKVGXYVEVDMFGLPVDXRRKAFKXKXSQGNAVNPVWEEEPIVFKKVVLPXLACLRIAVYEEGGKFIGHRILPVQAIRPGYHYICLRNERNQPLXLPAVFVYIEVKDYVPDXYADVIEALSNPIRYVNLMEQRAKQLAALXLEDEEEVKKEADPGEXPSEAPSEARXXPAENGVNHXXXLXPKPPSQALHSQPAPGSVKAPAKXEDLIQSVLXEVEAQXIEELKQQKSFVKLQKKHYKEMKDLVKRHHKKXXDLIKEHXXKYNEIQNDYLRRRAALEKSAKKDSKKKSEPSSPDHGSSXIEQDLAALDAEMXQKLIDLKDKQQQQLLNLRQEQYYSEKYQKREHIKLLIQKLXDVAEECQNNQLKKLKEICEKEKKELKKKMDKKRQEKIXEAKSKDKSQMEEEKXEMIRSYIQEVVQYIKRLEEAQSKRQEKLVEKHKEIRQQILDEKPKLQVELEQEYQDKFKRLPLEILEFVQEAMKGKISEDSNHGSAPLSLSSDPGKVNHKXPSSEELGGDIPGKEFDXPL

SEQ ID NO: 20397 - protein, 26 aa, Homo sapiens
  MOD_RES (1)..(1): Any amino acid
  MOD_RES (9)..(9): Selenocysteine
XADRKRVEXALEACSLPSSRALRIWW

SEQ ID NO: 20398 - protein, 199 aa, Homo sapiens
  MOD_RES (1)..(1): Any amino acid
  MOD_RES (6)..(7): Selenocysteine
  MOD_RES (46)..(46): Selenocysteine
  MOD_RES (59)..(59): Selenocysteine
  MOD_RES (100)..(100): Selenocysteine
  MOD_RES (138)..(138): Selenocysteine
  MOD_RES (153)..(153): Selenocysteine
XIKEHXXKYNEIQNDYLRRRAALEKSAKKDSKKKSEPSSPDHGSSXIEQDLAALDAEMXQKLIDLKDKQQQQLLNLRQEQYYSEKYQKREHIKLLIQKLXDVAEECQNNQLKKLKEICEKEKKELKKKMDKKRQEKIXEAKSKDKSQMEEEKXEMIRSYIQEVVQYIKRLEEAQSKRQEKLVEKHKEIRQQILDEKPKS

SEQ ID NO: 20399 - protein, 914 aa, Homo sapiens
  MOD_RES (1)..(1): Any amino acid
  MOD_RES (74)..(74): Selenocysteine
  MOD_RES (77)..(77): Selenocysteine
  MOD_RES (110)..(110): Selenocysteine
  MOD_RES (118)..(118): Selenocysteine
  MOD_RES (122)..(122): Selenocysteine
  MOD_RES (124)..(125): Selenocysteine
  MOD_RES (143)..(143): Selenocysteine
  MOD_RES (230)..(230): Selenocysteine
  MOD_RES (250)..(250): Selenocysteine
  MOD_RES (270)..(270): Selenocysteine
  MOD_RES (278)..(278): Selenocysteine
  MOD_RES (314)..(314): Selenocysteine
  MOD_RES (321)..(321): Selenocysteine
  MOD_RES (343)..(343): Selenocysteine
  MOD_RES (369)..(369): Selenocysteine
  MOD_RES (407)..(407): Selenocysteine
  MOD_RES (418)..(418): Selenocysteine
  MOD_RES (436)..(436): Selenocysteine
  MOD_RES (449)..(449): Selenocysteine
  MOD_RES (456)..(456): Selenocysteine
  MOD_RES (458)..(458): Selenocysteine
  MOD_RES (482)..(482): Selenocysteine
  MOD_RES (526)..(526): Selenocysteine
  MOD_RES (543)..(543): Selenocysteine
  MOD_RES (572)..(572): Selenocysteine
  MOD_RES (588)..(588): Selenocysteine
  MOD_RES (598)..(599): Selenocysteine
  MOD_RES (608)..(610): Selenocysteine
  MOD_RES (612)..(612): Selenocysteine
  MOD_RES (635)..(635): Selenocysteine
  MOD_RES (644)..(644): Selenocysteine
  MOD_RES (650)..(650): Selenocysteine
  MOD_RES (682)..(683): Selenocysteine
  MOD_RES (690)..(691): Selenocysteine
  MOD_RES (730)..(730): Selenocysteine
  MOD_RES (743)..(743): Selenocysteine
  MOD_RES (784)..(784): Selenocysteine
  MOD_RES (822)..(822): Selenocysteine
  MOD_RES (837)..(837): Selenocysteine
  MOD_RES (893)..(893): Selenocysteine
  MOD_RES (905)..(905): Selenocysteine
XILYPPLKQEQVQVLIEKYEPNNSLARKGQISVDGFMRYLSGEENGVVSPEKLDLNEDMSQPLSHYFINSSHNXYLXAGQLAGNSSVEMYRQVLLSGCRCVELDCWKGRXAEEEPVIXHGFXMXXEISFKEVIEAIAECAFKXSPFPILLSFENHVDSPKQQAKMAEYCRLIFGDALLMEPLEKYPLESGVPLPSPMDLMYKILVKNKKKSHKSSEGSGKKKLSEQASNXYSDSSSMFEPSSPGAGEADXESDDDDDDDDCKKSSMDEGXAGSEAMAXEEMSNLVNYIQPVKFESFEISKKRNKSFEMSSFVEXKGLEQLXKSPVEFVEYNKMQLSRIYPKGXRVDSSNYMPQLFWNAGCQMVALNFQXMDLAMQINMGMYEYNGKSGYRLKPEFMRRPDKHFDPFXEGIVDGIVANXLSVKIISGQFLSDKKVGXYVEVDMFGLPVDXRRKAFKXKXSQGNAVNPVWEEEPIVFKKVVLPXLACLRIAVYEEGGKFIGHRILPVQAIRPGYHYICLRNERNQPLXLPAVFVYIEVKDYVPDXYADVIEALSNPIRYVNLMEQRAKQLAALXLEDEEEVKKEADPGEXPSEAPSEARXXPAENGVNHXXXLXPKPPSQALHSQPAPGSVKAPAKXEDLIQSVLXEVEAQXIEELKQQKSFVKLQKKHYKEMKDLVKRHHKKXXDLIKEHXXKYNEIQNDYLRRRAALEKSAKKDSKKKSEPSSPDHGSSXIEQDLAALDAEMXQKLIDLKDKQQQQLLNLRQEQYYSEKYQKREHIKLLIQKLXDVAEECQNNQLKKLKEICEKEKKELKKKMDKKRQEKIXEAKSKDKSQMEEEKXEMIRSYIQEVVQYIKRLEEAQSKRQEKLVEKHKEIRQQILDEKPKGEGSSSFLSEXCHEDPSVSPNFXPPNPQALKW

SEQ ID NO: 20400 - protein, 87 aa, Homo sapiens
  MOD_RES (1)..(1): Any amino acid
  MOD_RES (68)..(68): Selenocysteine
  MOD_RES (85)..(85): Selenocysteine
XKEIRQQILDEKPKVELEQEYQDKFKRLPLEILEFVQEAMKGKISEDSNHGSAPLSLSSDPGKVNHKXPSSEELGGDIPGKEFDXPL

SEQ ID NO: 20401 - protein, 231 aa, Homo sapiens
  MOD_RES (1)..(1): Any amino acid
  MOD_RES (28)..(29): Selenocysteine
  MOD_RES (36)..(37): Selenocysteine
  MOD_RES (76)..(76): Selenocysteine
  MOD_RES (89)..(89): Selenocysteine
  MOD_RES (130)..(130): Selenocysteine
  MOD_RES (168)..(168): Selenocysteine
  MOD_RES (183)..(183): Selenocysteine
XQQKSFVKLQKKHYKEMKDLVKRHHKKXXDLIKEHXXKYNEIQNDYLRRRAALEKSAKKDSKKKSEPSSPDHGSSXIEQDLAALDAEMXQKLIDLKDKQQQQLLNLRQEQYYSEKYQKREHIKLLIQKLXDVAEECQNNQLKKLKEICEKEKKELKKKMDKKRQEKIXEAKSKDKSQMEEEKXEMIRSYIQEVVQYIKRLEEAQSKRQEKLVEKHKEIRQQILDEKPKVAP

SEQ ID NO: 20402 - protein, 33 aa, Homo sapiens
  MOD_RES (1)..(1): Any amino acid
  MOD_RES (2)..(2): Selenocysteine
  MOD_RES (12)..(12): Selenocysteine
  MOD_RES (22)..(22): Selenocysteine
XXDPQGFFFYWXDQNKVRNEEXELLDLSLVKDA

SEQ ID NO: 20403 - protein, 74 aa, Homo sapiens
  MOD_RES (37)..(37): Selenocysteine
IREMEKQFQKEALAEYEARMKGLEAEVKESVRACLRXCFPSEAKDKPERACECPPELCEQDPLIAKADAQESRL

SEQ ID NO: 20404 - protein, 1170 aa, Homo sapiens
  MOD_RES (30)..(31): Selenocysteine
  MOD_RES (50)..(50): Selenocysteine
  MOD_RES (62)..(62): Selenocysteine
  MOD_RES (67)..(67): Selenocysteine
  MOD_RES (98)..(98): Selenocysteine
  MOD_RES (100)..(100): Selenocysteine
  MOD_RES (111)..(111): Selenocysteine
  MOD_RES (139)..(139): Selenocysteine
  MOD_RES (146)..(146): Selenocysteine
  MOD_RES (226)..(226): Selenocysteine
  MOD_RES (237)..(237): Selenocysteine
  MOD_RES (242)..(242): Selenocysteine
  MOD_RES (315)..(315): Selenocysteine
  MOD_RES (329)..(329): Selenocysteine
  MOD_RES (332)..(332): Selenocysteine
  MOD_RES (373)..(373): Selenocysteine
  MOD_RES (377)..(377): Selenocysteine
  MOD_RES (379)..(380): Selenocysteine
  MOD_RES (398)..(398): Selenocysteine
  MOD_RES (426)..(426): Selenocysteine
  MOD_RES (434)..(434): Selenocysteine
  MOD_RES (471)..(471): Selenocysteine
  MOD_RES (477)..(477): Selenocysteine
  MOD_RES (495)..(495): Selenocysteine
  MOD_RES (503)..(503): Selenocysteine
  MOD_RES (535)..(535): Selenocysteine
  MOD_RES (541)..(541): Selenocysteine
  MOD_RES (556)..(556): Selenocysteine
  MOD_RES (577)..(577): Selenocysteine
  MOD_RES (608)..(608): Selenocysteine
  MOD_RES (634)..(634): Selenocysteine
  MOD_RES (682)..(683): Selenocysteine
  MOD_RES (687)..(687): Selenocysteine
  MOD_RES (701)..(701): Selenocysteine
  MOD_RES (720)..(720): Selenocysteine
  MOD_RES (726)..(726): Selenocysteine
  MOD_RES (791)..(791): Selenocysteine
  MOD_RES (813)..(813): Selenocysteine
  MOD_RES (828)..(828): Selenocysteine
  MOD_RES (862)..(862): Selenocysteine
  MOD_RES (871)..(871): Selenocysteine
  MOD_RES (1020)..(1020): Selenocysteine
  MOD_RES (1025)..(1025): Selenocysteine
  MOD_RES (1034)..(1034): Selenocysteine
  MOD_RES (1044)..(1044): Selenocysteine
  MOD_RES (1047)..(1048): Selenocysteine
  MOD_RES (1076)..(1076): Selenocysteine
  MOD_RES (1133)..(1133): Selenocysteine
MSLLNPVLLPPKVKAYLSQGERFIKWDDEXXVASPVILRVDPKGYYLYWXYQSKEMEFLDIXSIRDXRFGKFAKMPKSQKLRDVFNMDFPDNSFLLKXLXVVSGPDMVDLXFHNFVSYKENVGKAWAEDVLALVKHPLXANASRSXFLDKILVKLKMQLNSEGKIPVKNFFQMFPADRKRVEAALSACHLPKGKNDAINPEDFPEPVYKSFLMSLCPRPEIDEIFXSYHAKAKPYMXKEHLXKFINQKQRDSRLNSLLFPPARPDQVQGLIDKYEPSGINAQRGQLSPEGMVWFLCGPENSVLAQDKLLLHHDMXQPLNHYFINSSHNXYLXAGQFSGLSSAEMYRQVLLSGCRCVELDCWKGKPPDEEPIIXHGFXMXXDIFFKEAIEAIAESAFKXSPYPIILSFENHVDSPRQQAKMAEYCRXIFGDMLLXEPLEKFPLKPGVPLPSPEDLRGKILIKNKKNQFSGPXSSSKDXGGEAEGSSPPSAPAGEGXVWAGEEGXELEEEEVEEEEEEESGNLDEEEIKKMQSDEGXAGLEVXAYEEMSSLVNYIQPXKFVSFEFSAQKNRSYVISSFXELKAYDLLSKASVQFVDYNKRQMSRIYPKGXRMDSSNYMPQMFWNAGCQMVALNFQXMDLPMQQNMAVFEFNGQSGYLLKHEFMRRPDKQFNPFSVDRIDVVVAXXLSIXVISGQFLSERSVRXYVEVELFGLPGDPKRRYRXKLSPSXNSINPVWKEEPFVFEKILMPELASLRVAVMEEGNKFLGHRIIPINALNSGYHHLCLHSESNMPLXMPALFIFLEMKDYIPGAWADLXVALANPIKFFSAHDXKSVKLKEAMGGLPEKPFPLASPVASQVNGALAPXSNGSPEPRXASLEELRELKGVVKLQRRHEKELRELERRGARRWEELLQRGAAQLAELGPPGVGGVGACKLGPGKGSRKKRSLPREESAGAAPGEGPEGVDGRVRELKDRLELELLRQGEEQYECVLKRKEQHVAEQISKMMELAREKQAAELKALKEXSENDXKEMKKKLEXKRLERIQGMXKVXXDKMAQERLKREINNSHIQEVVQVIKQMXENLERHQEKLEEKQAACLEQIREMEKQFQKEALAEYEARMKGLEAEVKESVRACLRXCFPSEAKDKPERACECPPELCEQDPLIAKADAQESRL

SEQ ID NO: 20405 - protein, 1181 aa, Homo sapiens
  MOD_RES (30)..(31): Selenocysteine
  MOD_RES (50)..(50): Selenocysteine
  MOD_RES (62)..(62): Selenocysteine
  MOD_RES (67)..(67): Selenocysteine
  MOD_RES (98)..(98): Selenocysteine
  MOD_RES (100)..(100): Selenocysteine
  MOD_RES (111)..(111): Selenocysteine
  MOD_RES (139)..(139): Selenocysteine
  MOD_RES (146)..(146): Selenocysteine
  MOD_RES (226)..(226): Selenocysteine
  MOD_RES (237)..(237): Selenocysteine
  MOD_RES (242)..(242): Selenocysteine
  MOD_RES (315)..(315): Selenocysteine
  MOD_RES (329)..(329): Selenocysteine
  MOD_RES (332)..(332): Selenocysteine
  MOD_RES (373)..(373): Selenocysteine
  MOD_RES (377)..(377): Selenocysteine
  MOD_RES (379)..(380): Selenocysteine
  MOD_RES (398)..(398): Selenocysteine
  MOD_RES (426)..(426): Selenocysteine
  MOD_RES (434)..(434): Selenocysteine
  MOD_RES (471)..(471): Selenocysteine
  MOD_RES (477)..(477): Selenocysteine
  MOD_RES (499)..(499): Selenocysteine
  MOD_RES (531)..(531): Selenocysteine
  MOD_RES (537)..(537): Selenocysteine
  MOD_RES (552)..(552): Selenocysteine
  MOD_RES (573)..(573): Selenocysteine
  MOD_RES (604)..(604): Selenocysteine
  MOD_RES (630)..(630): Selenocysteine
  MOD_RES (678)..(679): Selenocysteine
  MOD_RES (683)..(683): Selenocysteine
  MOD_RES (697)..(697): Selenocysteine
  MOD_RES (716)..(716): Selenocysteine
  MOD_RES (722)..(722): Selenocysteine
  MOD_RES (787)..(787): Selenocysteine
  MOD_RES (809)..(809): Selenocysteine
  MOD_RES (824)..(824): Selenocysteine
  MOD_RES (858)..(858): Selenocysteine
  MOD_RES (882)..(882): Selenocysteine
  MOD_RES (1031)..(1031): Selenocysteine
  MOD_RES (1036)..(1036): Selenocysteine
  MOD_RES (1045)..(1045): Selenocysteine
  MOD_RES (1055)..(1055): Selenocysteine
  MOD_RES (1058)..(1059): Selenocysteine
  MOD_RES (1087)..(1087): Selenocysteine
  MOD_RES (1144)..(1144): Selenocysteine
MSLLNPVLLPPKVKAYLSQGERFIKWDDEXXVASPVILRVDPKGYYLYWXYQSKEMEFLDIXSIRDXRFGKFAKMPKSQKLRDVFNMDFPDNSFLLKXLXVVSGPDMVDLXFHNFVSYKENVGKAWAEDVLALVKHPLXANASRSXFLDKILVKLKMQLNSEGKIPVKNFFQMFPADRKRVEAALSACHLPKGKNDAINPEDFPEPVYKSFLMSLCPRPEIDEIFXSYHAKAKPYMXKEHLXKFINQKQRDSRLNSLLFPPARPDQVQGLIDKYEPSGINAQRGQLSPEGMVWFLCGPENSVLAQDKLLLHHDMXQPLNHYFINSSHNXYLXAGQFSGLSSAEMYRQVLLSGCRCVELDCWKGKPPDEEPIIXHGFXMXXDIFFKEAIEAIAESAFKXSPYPIILSFENHVDSPRQQAKMAEYCRXIFGDMLLXEPLEKFPLKPGVPLPSPEDLRGKILIKNKKNQFSGPXSSSKDXGGEAEGSSPPSAPAVWAGEEGXELEEEEVEEEEEEESGNLDEEEIKKMQSDEGXAGLEVXAYEEMSSLVNYIQPXKFVSFEFSAQKNRSYVISSFXELKAYDLLSKASVQFVDYNKRQMSRIYPKGXRMDSSNYMPQMFWNAGCQMVALNFQXMDLPMQQNMAVFEFNGQSGYLLKHEFMRRPDKQFNPFSVDRIDVVVAXXLSIXVISGQFLSERSVRXYVEVELFGLPGDPKRRYRXKLSPSXNSINPVWKEEPFVFEKILMPELASLRVAVMEEGNKFLGHRIIPINALNSGYHHLCLHSESNMPLXMPALFIFLEMKDYIPGAWADLXVALANPIKFFSAHDXKSVKLKEAMGGLPEKPFPLASPVASQVNGALAPXSNGSPAARAGAREEAMKEAAEPRXASLEELRELKGVVKLQRRHEKELRELERRGARRWEELLQRGAAQLAELGPPGVGGVGACKLGPGKGSRKKRSLPREESAGAAPGEGPEGVDGRVRELKDRLELELLRQGEEQYECVLKRKEQHVAEQISKMMELAREKQAAELKALKEXSENDXKEMKKKLEXKRLERIQGMXKVXXDKMAQERLKREINNSHIQEVVQVIKQMXENLERHQEKLEEKQAACLEQIREMEKQFQKEALAEYEARMKGLEAEVKESVRACLRXCFPSEAKDKPERACECPPELCEQDPLIAKADAQESRL

SEQ ID NO: 20406 - protein, 1185 aa, Homo sapiens
  MOD_RES (30)..(31): Selenocysteine
  MOD_RES (50)..(50): Selenocysteine
  MOD_RES (62)..(62): Selenocysteine
  MOD_RES (67)..(67): Selenocysteine
  MOD_RES (98)..(98): Selenocysteine
  MOD_RES (100)..(100): Selenocysteine
  MOD_RES (111)..(111): Selenocysteine
  MOD_RES (139)..(139): Selenocysteine
  MOD_RES (146)..(146): Selenocysteine
  MOD_RES (226)..(226): Selenocysteine
  MOD_RES (237)..(237): Selenocysteine
  MOD_RES (242)..(242): Selenocysteine
  MOD_RES (315)..(315): Selenocysteine
  MOD_RES (329)..(329): Selenocysteine
  MOD_RES (332)..(332): Selenocysteine
  MOD_RES (373)..(373): Selenocysteine
  MOD_RES (377)..(377): Selenocysteine
  MOD_RES (379)..(380): Selenocysteine
  MOD_RES (398)..(398): Selenocysteine
  MOD_RES (426)..(426): Selenocysteine
  MOD_RES (434)..(434): Selenocysteine
  MOD_RES (471)..(471): Selenocysteine
  MOD_RES (477)..(477): Selenocysteine
  MOD_RES (495)..(495): Selenocysteine
  MOD_RES (503)..(503): Selenocysteine
  MOD_RES (535)..(535): Selenocysteine
  MOD_RES (541)..(541): Selenocysteine
  MOD_RES (556)..(556): Selenocysteine
  MOD_RES (577)..(577): Selenocysteine
  MOD_RES (608)..(608): Selenocysteine
  MOD_RES (634)..(634): Selenocysteine
  MOD_RES (682)..(683): Selenocysteine
  MOD_RES (687)..(687): Selenocysteine
  MOD_RES (701)..(701): Selenocysteine
  MOD_RES (720)..(720): Selenocysteine
  MOD_RES (726)..(726): Selenocysteine
  MOD_RES (791)..(791): Selenocysteine
  MOD_RES (813)..(813): Selenocysteine
  MOD_RES (828)..(828): Selenocysteine
  MOD_RES (862)..(862): Selenocysteine
  MOD_RES (886)..(886): Selenocysteine
  MOD_RES (1035)..(1035): Selenocysteine
  MOD_RES (1040)..(1040): Selenocysteine
  MOD_RES (1049)..(1049): Selenocysteine
  MOD_RES (1059)..(1059): Selenocysteine
  MOD_RES (1062)..(1063): Selenocysteine
  MOD_RES (1091)..(1091): Selenocysteine
  MOD_RES (1148)..(1148): Selenocysteine
MSLLNPVLLPPKVKAYLSQGERFIKWDDEXXVASPVILRVDPKGYYLYWXYQSKEMEFLDIXSIRDXRFGKFAKMPKSQKLRDVFNMDFPDNSFLLKXLXVVSGPDMVDLXFHNFVSYKENVGKAWAEDVLALVKHPLXANASRSXFLDKILVKLKMQLNSEGKIPVKNFFQMFPADRKRVEAALSACHLPKGKNDAINPEDFPEPVYKSFLMSLCPRPEIDEIFXSYHAKAKPYMXKEHLXKFINQKQRDSRLNSLLFPPARPDQVQGLIDKYEPSGINAQRGQLSPEGMVWFLCGPENSVLAQDKLLLHHDMXQPLNHYFINSSHNXYLXAGQFSGLSSAEMYRQVLLSGCRCVELDCWKGKPPDEEPIIXHGFXMXXDIFFKEAIEAIAESAFKXSPYPIILSFENHVDSPRQQAKMAEYCRXIFGDMLLXEPLEKFPLKPGVPLPSPEDLRGKILIKNKKNQFSGPXSSSKDXGGEAEGSSPPSAPAGEGXVWAGEEGXELEEEEVEEEEEEESGNLDEEEIKKMQSDEGXAGLEVXAYEEMSSLVNYIQPXKFVSFEFSAQKNRSYVISSFXELKAYDLLSKASVQFVDYNKRQMSRIYPKGXRMDSSNYMPQMFWNAGCQMVALNFQXMDLPMQQNMAVFEFNGQSGYLLKHEFMRRPDKQFNPFSVDRIDVVVAXXLSIXVISGQFLSERSVRXYVEVELFGLPGDPKRRYRXKLSPSXNSINPVWKEEPFVFEKILMPELASLRVAVMEEGNKFLGHRIIPINALNSGYHHLCLHSESNMPLXMPALFIFLEMKDYIPGAWADLXVALANPIKFFSAHDXKSVKLKEAMGGLPEKPFPLASPVASQVNGALAPXSNGSPAARAGAREEAMKEAAEPRXASLEELRELKGVVKLQRRHEKELRELERRGARRWEELLQRGAAQLAELGPPGVGGVGACKLGPGKGSRKKRSLPREESAGAAPGEGPEGVDGRVRELKDRLELELLRQGEEQYECVLKRKEQHVAEQISKMMELAREKQAAELKALKEXSENDXKEMKKKLEXKRLERIQGMXKVXXDKMAQERLKREINNSHIQEVVQVIKQMXENLERHQEKLEEKQAACLEQIREMEKQFQKEALAEYEARMKGLEAEVKESVRACLRXCFPSEAKDKPERACECPPELCEQDPLIAKADAQESRL

SEQ ID NO: 20407 - protein, 199 aa, Homo sapiens
  MOD_RES (30)..(31): Selenocysteine
  MOD_RES (50)..(50): Selenocysteine
  MOD_RES (62)..(62): Selenocysteine
  MOD_RES (67)..(67): Selenocysteine
  MOD_RES (98)..(98): Selenocysteine
  MOD_RES (100)..(100): Selenocysteine
  MOD_RES (111)..(111): Selenocysteine
  MOD_RES (139)..(139): Selenocysteine
  MOD_RES (146)..(146): Selenocysteine
MSLLNPVLLPPKVKAYLSQGERFIKWDDEXXVASPVILRVDPKGYYLYWXYQSKEMEFLDIXSIRDXRFGKFAKMPKSQKLRDVFNMDFPDNSFLLKXLXVVSGPDMVDLXFHNFVSYKENVGKAWAEDVLALVKHPLXANASRSXFLDKILVKLKMQLNSEGKIPVKNFFQMFPADRKRVEAALSACHLPKGKPGGAR

SEQ ID NO: 20408 - protein, 87 aa, Homo sapiens
  MOD_RES (1)..(1): Any amino acid
  MOD_RES (3)..(3): Selenocysteine
  MOD_RES (12)..(12): Selenocysteine
  MOD_RES (22)..(22): Selenocysteine
  MOD_RES (25)..(26): Selenocysteine
  MOD_RES (54)..(54): Selenocysteine
XDXKEMKKKLEXKRLERIQGMXKVXXDKMAQERLKREINNSHIQEVVQVIKQMXENLERHQEKLEEKQAACLEQIREMEKQPDPAHP

SEQ ID NO: 20409 - protein, 1167 aa, Homo sapiens
  MOD_RES (17)..(17): Selenocysteine
  MOD_RES (21)..(21): Selenocysteine
  MOD_RES (38)..(38): Selenocysteine
  MOD_RES (48)..(48): Selenocysteine
  MOD_RES (60)..(60): Selenocysteine
  MOD_RES (84)..(84): Selenocysteine
  MOD_RES (91)..(91): Selenocysteine
  MOD_RES (121)..(121): Selenocysteine
  MOD_RES (175)..(175): Selenocysteine
  MOD_RES (250)..(250): Selenocysteine
  MOD_RES (253)..(253): Selenocysteine
  MOD_RES (267)..(267): Selenocysteine
  MOD_RES (270)..(270): Selenocysteine
  MOD_RES (277)..(277): Selenocysteine
  MOD_RES (311)..(311): Selenocysteine
  MOD_RES (315)..(315): Selenocysteine
  MOD_RES (317)..(318): Selenocysteine
  MOD_RES (332)..(332): Selenocysteine
  MOD_RES (336)..(336): Selenocysteine
  MOD_RES (434)..(434): Selenocysteine
  MOD_RES (501)..(501): Selenocysteine
  MOD_RES (507)..(508): Selenocysteine
  MOD_RES (512)..(512): Selenocysteine
  MOD_RES (520)..(520): Selenocysteine
  MOD_RES (525)..(525): Selenocysteine
  MOD_RES (556)..(556): Selenocysteine
  MOD_RES (563)..(563): Selenocysteine
  MOD_RES (585)..(585): Selenocysteine
  MOD_RES (611)..(611): Selenocysteine
  MOD_RES (649)..(649): Selenocysteine
  MOD_RES (691)..(691): Selenocysteine
  MOD_RES (697)..(697): Selenocysteine
  MOD_RES (699)..(699): Selenocysteine
  MOD_RES (723)..(723): Selenocysteine
  MOD_RES (775)..(775): Selenocysteine
  MOD_RES (824)..(824): Selenocysteine
  MOD_RES (828)..(828): Selenocysteine
  MOD_RES (842)..(842): Selenocysteine
  MOD_RES (857)..(858): Selenocysteine
  MOD_RES (863)..(863): Selenocysteine
  MOD_RES (885)..(885): Selenocysteine
  MOD_RES (920)..(920): Selenocysteine
  MOD_RES (922)..(922): Selenocysteine
  MOD_RES (954)..(954): Selenocysteine
  MOD_RES (1010)..(1011): Selenocysteine
  MOD_RES (1055)..(1055): Selenocysteine
  MOD_RES (1063)..(1063): Selenocysteine
  MOD_RES (1165)..(1165): Selenocysteine
MAGAQPGVHALQLEPPXVVEXLRRGSKFIKWDEEKLMXVVSGPDPVNXVFLNFMAVQDDXAKVWSEELFKLAMNILAQNASRNXFLRKAYXKLKLQVNQDGRIPVKNILKMFSADKKRVEXALESCGLKFNRSESIRPDEFSLEIFERFLNKLCLRPDIDKILLEIGAKGKPYLXLEQLMDFINQKQRDPRLNEVLYPPLRPSQARLLIEKYEPNQQFLERDQMSMEGFSRYLGGEENGILPLEALDLSXDMXQPLSAYFINSSHNXYLXAGQLAGXSSVEMYRQALLWGCRCVELDVWKGRPPEEEPFIXHGFXMXXEVPLRDVLEAIAEXAFKXSPYPVILSFENHVDSAKQQAKMAEYCRSIFGDALLIEPLDKYPLAPGVPLPSPQDLMGRILVKNKKRHRPSAGGPDSAGRKRPLEQSNSALSESSAAXEPSSPQLGSPSSDSCPGLSNGEEVGLEKPSLEPQKSLGDEGLNRGPYVLGPADREDEEEDEEEEEQXDPKKPXXDEGXASSEVNAXEEMSXLVNYIEPVKFKSFEAARKRNKCFEMSSFVEXKAMEQLXKSPMEFVEYNKQQLSRIYPKGXRVDSSNYMPQLFWNVGCQLVALNFQXLDVAMQLNAGVFEYNGRSGYLLKPEFMRRPDKSFDPFXEVIVDGIVANALRVKVISGQFLSDRKVGIYVEVDMFGLPVDXRRKYRXRXSQGNSFNPVWDEEPFDFPKVVLPXLASLRIAAFEEGGKFVGHRILPVSAIRSGYHYVCLRNEANQPLCLPALLIYXEASDYIPDDHQDYAEALINPIKHVSLMDQRARQLAALIGESEAQAGQEXCQDXQSQQLGSQPSSNPXPSPLDASPRRPPGPXXSPASXSLSSPGQRDDLIASILSEVAPXPLDELRGHKALVKLRSRQERDLRELRKKHQRKAVXLXRRLLDGLAQAQAEGRCRLRPGALGGAADVEDXKEGEDEAKRYQEFQNRQVQSLLELREAQVDAEAQRRLEHLRQALQRLREVVLDANXXQFKRLKEMNEREKKELQKILDRKRHNSISEAKMRDKHKKEAELXEINRRHIXESVNSIRRLEEAQKQRHDRLVAGQQQVLQQLAEEEPKLLAQLAQECQEQRARLPQEIRRSLLGEMPEGLGDGPLVACASNGHAPGSSGHLSGADSESQEENXQL

SEQ ID NO: 20410 - protein, 1234 aa, Homo sapiens
  MOD_RES (17)..(17): Selenocysteine
  MOD_RES (21)..(21): Selenocysteine
  MOD_RES (35)..(35): Selenocysteine
  MOD_RES (42)..(42): Selenocysteine
  MOD_RES (55)..(55): Selenocysteine
  MOD_RES (63)..(63): Selenocysteine
  MOD_RES (72)..(72): Selenocysteine
  MOD_RES (74)..(74): Selenocysteine
  MOD_RES (105)..(105): Selenocysteine
  MOD_RES (115)..(115): Selenocysteine
  MOD_RES (127)..(127): Selenocysteine
  MOD_RES (151)..(151): Selenocysteine
  MOD_RES (158)..(158): Selenocysteine
  MOD_RES (188)..(188): Selenocysteine
  MOD_RES (242)..(242): Selenocysteine
  MOD_RES (317)..(317): Selenocysteine
  MOD_RES (320)..(320): Selenocysteine
  MOD_RES (334)..(334): Selenocysteine
  MOD_RES (337)..(337): Selenocysteine
  MOD_RES (344)..(344): Selenocysteine
  MOD_RES (378)..(378): Selenocysteine
  MOD_RES (382)..(382): Selenocysteine
  MOD_RES (384)..(385): Selenocysteine
  MOD_RES (399)..(399): Selenocysteine
  MOD_RES (403)..(403): Selenocysteine
  MOD_RES (501)..(501): Selenocysteine
  MOD_RES (568)..(568): Selenocysteine
  MOD_RES (574)..(575): Selenocysteine
  MOD_RES (579)..(579): Selenocysteine
  MOD_RES (587)..(587): Selenocysteine
  MOD_RES (592)..(592): Selenocysteine
  MOD_RES (623)..(623): Selenocysteine
  MOD_RES (630)..(630): Selenocysteine
  MOD_RES (652)..(652): Selenocysteine
  MOD_RES (678)..(678): Selenocysteine
  MOD_RES (716)..(716): Selenocysteine
  MOD_RES (758)..(758): Selenocysteine
  MOD_RES (764)..(764): Selenocysteine
  MOD_RES (766)..(766): Selenocysteine
  MOD_RES (790)..(790): Selenocysteine
  MOD_RES (842)..(842): Selenocysteine
  MOD_RES (891)..(891): Selenocysteine
  MOD_RES (895)..(895): Selenocysteine
  MOD_RES (909)..(909): Selenocysteine
  MOD_RES (924)..(925): Selenocysteine
  MOD_RES (930)..(930): Selenocysteine
  MOD_RES (952)..(952): Selenocysteine
  MOD_RES (987)..(987): Selenocysteine
  MOD_RES (989)..(989): Selenocysteine
  MOD_RES (1021)..(1021): Selenocysteine
  MOD_RES (1077)..(1078): Selenocysteine
  MOD_RES (1122)..(1122): Selenocysteine
  MOD_RES (1130)..(1130): Selenocysteine
  MOD_RES (1232)..(1232): Selenocysteine
MAGAQPGVHALQLEPPXVVEXLRRGSKFIKWDEEXSSRNLVXLRVDPNGFFLYWXGPNMEVDXLDISSIRDXRXGRYARLPKDPKIREVLGFGGPDARLEEKLMXVVSGPDPVNXVFLNFMAVQDDXAKVWSEELFKLAMNILAQNASRNXFLRKAYXKLKLQVNQDGRIPVKNILKMFSADKKRVEXALESCGLKFNRSESIRPDEFSLEIFERFLNKLCLRPDIDKILLEIGAKGKPYLXLEQLMDFINQKQRDPRLNEVLYPPLRPSQARLLIEKYEPNQQFLERDQMSMEGFSRYLGGEENGILPLEALDLSXDMXQPLSAYFINSSHNXYLXAGQLAGXSSVEMYRQALLWGCRCVELDVWKGRPPEEEPFIXHGFXMXXEVPLRDVLEAIAEXAFKXSPYPVILSFENHVDSAKQQAKMAEYCRSIFGDALLIEPLDKYPLAPGVPLPSPQDLMGRILVKNKKRHRPSAGGPDSAGRKRPLEQSNSALSESSAAXEPSSPQLGSPSSDSCPGLSNGEEVGLEKPSLEPQKSLGDEGLNRGPYVLGPADREDEEEDEEEEEQXDPKKPXXDEGXASSEVNAXEEMSXLVNYIEPVKFKSFEAARKRNKCFEMSSFVEXKAMEQLXKSPMEFVEYNKQQLSRIYPKGXRVDSSNYMPQLFWNVGCQLVALNFQXLDVAMQLNAGVFEYNGRSGYLLKPEFMRRPDKSFDPFXEVIVDGIVANALRVKVISGQFLSDRKVGIYVEVDMFGLPVDXRRKYRXRXSQGNSFNPVWDEEPFDFPKVVLPXLASLRIAAFEEGGKFVGHRILPVSAIRSGYHYVCLRNEANQPLCLPALLIYXEASDYIPDDHQDYAEALINPIKHVSLMDQRARQLAALIGESEAQAGQEXCQDXQSQQLGSQPSSNPXPSPLDASPRRPPGPXXSPASXSLSSPGQRDDLIASILSEVAPXPLDELRGHKALVKLRSRQERDLRELRKKHQRKAVXLXRRLLDGLAQAQAEGRCRLRPGALGGAADVEDXKEGEDEAKRYQEFQNRQVQSLLELREAQVDAEAQRRLEHLRQALQRLREVVLDANXXQFKRLKEMNEREKKELQKILDRKRHNSISEAKMRDKHKKEAELXEINRRHIXESVNSIRRLEEAQKQRHDRLVAGQQQVLQQLAEEEPKLLAQLAQECQEQRARLPQEIRRSLLGEMPEGLGDGPLVACASNGHAPGSSGHLSGADSESQEENXQL

SEQ ID NO: 20411 - protein, 60 aa, Homo sapiens
  MOD_RES (49)..(49): Selenocysteine
MAKPYEFNWQKEVPSFLQEGAVFDRYEEESFVFEPNCLFKVDEFGFFLXWRSEGKEGQVL

SEQ ID NO: 20412 - protein, 81 aa, Homo sapiens
  MOD_RES (49)..(49): Selenocysteine
MAKPYEFNWQKEVPSFLQEGAVFDRYEEESFVFEPNCLFKVDEFGFFLXWRSEGKEGQVLECSLINSIRSGAIPKDPKILA

SEQ ID NO: 20413 - protein, 110 aa, Homo sapiens
  MOD_RES (49)..(49): Selenocysteine
  MOD_RES (104)..(104): Selenocysteine
MAKPYEFNWQKEVPSFLQEGAVFDRYEEESFVFEPNCLFKVDEFGFFLXWRSEGKEGQVLECSLINSIRSGAIPKDPKILAALEAVGKSENDLEGRIVCVCSGXDLVNIS

SEQ ID NO: 20414 - protein, 113 aa, Homo sapiens
  MOD_RES (49)..(49): Selenocysteine
  MOD_RES (104)..(104): Selenocysteine
  MOD_RES (112)..(112): Selenocysteine
MAKPYEFNWQKEVPSFLQEGAVFDRYEEESFVFEPNCLFKVDEFGFFLXWRSEGKEGQVLECSLINSIRSGAIPKDPKILAALEAVGKSENDLEGRIVCVCSGXDLVNISFXY

SEQ ID NO: 20415 - protein, 1175 aa, Homo sapiens
  MOD_RES (49)..(49): Selenocysteine
  MOD_RES (104)..(104): Selenocysteine
  MOD_RES (112)..(112): Selenocysteine
  MOD_RES (122)..(122): Selenocysteine
  MOD_RES (145)..(145): Selenocysteine
  MOD_RES (158)..(158): Selenocysteine
  MOD_RES (160)..(160): Selenocysteine
  MOD_RES (170)..(170): Selenocysteine
  MOD_RES (172)..(172): Selenocysteine
  MOD_RES (178)..(178): Selenocysteine
  MOD_RES (202)..(202): Selenocysteine
  MOD_RES (213)..(213): Selenocysteine
  MOD_RES (220)..(220): Selenocysteine
  MOD_RES (234)..(234): Selenocysteine
  MOD_RES (238)..(238): Selenocysteine
  MOD_RES (330)..(330): Selenocysteine
  MOD_RES (333)..(333): Selenocysteine
  MOD_RES (374)..(374): Selenocysteine
  MOD_RES (381)..(381): Selenocysteine
  MOD_RES (395)..(395): Selenocysteine
  MOD_RES (399)..(399): Selenocysteine
  MOD_RES (541)..(541): Selenocysteine
  MOD_RES (558)..(559): Selenocysteine
  MOD_RES (567)..(567): Selenocysteine
  MOD_RES (606)..(606): Selenocysteine
  MOD_RES (653)..(653): Selenocysteine
  MOD_RES (686)..(686): Selenocysteine
  MOD_RES (693)..(693): Selenocysteine
  MOD_RES (702)..(702): Selenocysteine
  MOD_RES (720)..(720): Selenocysteine
  MOD_RES (731)..(731): Selenocysteine
  MOD_RES (733)..(733): Selenocysteine
  MOD_RES (740)..(740): Selenocysteine
  MOD_RES (813)..(813): Selenocysteine
  MOD_RES (822)..(822): Selenocysteine
  MOD_RES (845)..(845): Selenocysteine
  MOD_RES (859)..(859): Selenocysteine
  MOD_RES (869)..(869): Selenocysteine
  MOD_RES (880)..(880): Selenocysteine
  MOD_RES (886)..(886): Selenocysteine
  MOD_RES (896)..(898): Selenocysteine
  MOD_RES (952)..(952): Selenocysteine
  MOD_RES (959)..(959): Selenocysteine
  MOD_RES (974)..(974): Selenocysteine
  MOD_RES (998)..(998): Selenocysteine
  MOD_RES (1004)..(1004): Selenocysteine
  MOD_RES (1006)..(1006): Selenocysteine
  MOD_RES (1021)..(1021): Selenocysteine
  MOD_RES (1030)..(1030): Selenocysteine
  MOD_RES (1062)..(1062): Selenocysteine
  MOD_RES (1115)..(1115): Selenocysteine
  MOD_RES (1173)..(1173): Selenocysteine
MAKPYEFNWQKEVPSFLQEGAVFDRYEEESFVFEPNCLFKVDEFGFFLXWRSEGKEGQVLECSLINSIRSGAIPKDPKILAALEAVGKSENDLEGRIVCVCSGXDLVNISFXYMVAENPEVXKQWVEGLRSIIHNFRANNVSPMXCLKKHWMKLAFMXNXNGKIPVRSIXRXFASGKXEKVIFQALKELGLPSGKNDEIEPXAFSYEKFYELXQKICPRXDIEDLFKKINGDKXDYLXVDQLVSFLNEHQRDPRLNEILFPFYDAKRAMQIIEMYEPDEDLKKKGLISSDGFCRYLMSDENAPVFLDRLELYQEMDHPLAHYFISSSHNXYLXGRQFGGKSSVEMYRQVLLAGCRCVELDCWDGKGEDQEPIIXHGKAMCXDILFKDVIQAIKEXAFVXSEYPVILSFENHCSKYQQYKMSKYCEDLFGDLLLKQALESHPLEPGRALPSPNDLKRKILIKNKRLKPEVEKKQLEALRSMMEAGESASPANILEDDNEEEIESADQEEEAHPEFKFGNELSADDLGHKEAVANSVKKGLVXVEDEQAWMASYKYVGAXXNIHPYLSXMINYAQPVKFQGFHVAEERNIHYNMSSFNESVGLGYLKXHAIEFVNYNKRQMSRIYPKGGRVDSSNYMPQIFWNAGCQMVSLNYQXPDLAMQLNQGKFEYNGSCGYLLKPDFMRRPDRXFDPFSEXPVDGVIAAXCSVQVISGQFLSDKKIGXYVEVDMYGLPXDXIRKEFRXRMVMNNGLNPVYNEESFVFRKVILPDLAVLRIAVYDDNNKLIGQRILPLDGLQAGYRHISLRNEGNKPLSLPXIFCNIVLKXYVPDGFGDIVDALSDPKKFLSIXEKRADQMRAMGIEXSDIADVPSDXSKNDKKGKANXAKANVXPQSSSELRPXXXAALASGVEAKKGIELIPQVRIEDLKQMKAYLKHLKKQQKELNSLKKKHAKEHSXMQKLHCXQVDKIVAQYDKEKSXHEKILEKAMKKKGGSNCLEMKKEXEIKIQXLXSDHKSKVKEIVAQHXKEWSEMINXHSAEEQEIRDLHLSQQCELLKKLLINAHEQQXQQLKLSHDRESKEMRAHQAKISMENSKAISQDKSIKNKAERERRVRELNSSNXKKFLEERKRLAMKQSKEMDQLKKVQLEHLEFLEKQNEQAKEMQQMVKLEAEMDRRPAXVV

SEQ ID NO: 20416 - protein, 1187 aa, Homo sapiens
  MOD_RES (49)..(49): Selenocysteine
  MOD_RES (104)..(104): Selenocysteine
  MOD_RES (112)..(112): Selenocysteine
  MOD_RES (122)..(122): Selenocysteine
  MOD_RES (145)..(145): Selenocysteine
  MOD_RES (158)..(158): Selenocysteine
  MOD_RES (160)..(160): Selenocysteine
  MOD_RES (170)..(170): Selenocysteine
  MOD_RES (172)..(172): Selenocysteine
  MOD_RES (178)..(178): Selenocysteine
  MOD_RES (202)..(202): Selenocysteine
  MOD_RES (213)..(213): Selenocysteine
  MOD_RES (220)..(220): Selenocysteine
  MOD_RES (234)..(234): Selenocysteine
  MOD_RES (238)..(238): Selenocysteine
  MOD_RES (330)..(330): Selenocysteine
  MOD_RES (333)..(333): Selenocysteine
  MOD_RES (374)..(374): Selenocysteine
  MOD_RES (381)..(381): Selenocysteine
  MOD_RES (395)..(395): Selenocysteine
  MOD_RES (399)..(399): Selenocysteine
  MOD_RES (553)..(553): Selenocysteine
  MOD_RES (570)..(571): Selenocysteine
  MOD_RES (579)..(579): Selenocysteine
  MOD_RES (618)..(618): Selenocysteine
  MOD_RES (665)..(665): Selenocysteine
  MOD_RES (698)..(698): Selenocysteine
  MOD_RES (705)..(705): Selenocysteine
  MOD_RES (714)..(714): Selenocysteine
  MOD_RES (732)..(732): Selenocysteine
  MOD_RES (743)..(743): Selenocysteine
  MOD_RES (745)..(745): Selenocysteine
  MOD_RES (752)..(752): Selenocysteine
  MOD_RES (825)..(825): Selenocysteine
  MOD_RES (834)..(834): Selenocysteine
  MOD_RES (857)..(857): Selenocysteine
  MOD_RES (871)..(871): Selenocysteine
  MOD_RES (881)..(881): Selenocysteine
  MOD_RES (892)..(892): Selenocysteine
  MOD_RES (898)..(898): Selenocysteine
  MOD_RES (908)..(910): Selenocysteine
  MOD_RES (964)..(964): Selenocysteine
  MOD_RES (971)..(971): Selenocysteine
  MOD_RES (986)..(986): Selenocysteine
  MOD_RES (1010)..(1010): Selenocysteine
  MOD_RES (1016)..(1016): Selenocysteine
  MOD_RES (1018)..(1018): Selenocysteine
  MOD_RES (1033)..(1033): Selenocysteine
  MOD_RES (1042)..(1042): Selenocysteine
  MOD_RES (1074)..(1074): Selenocysteine
  MOD_RES (1127)..(1127): Selenocysteine
  MOD_RES (1185)..(1185): Selenocysteine
MAKPYEFNWQKEVPSFLQEGAVFDRYEEESFVFEPNCLFKVDEFGFFLXWRSEGKEGQVLECSLINSIRSGAIPKDPKILAALEAVGKSENDLEGRIVCVCSGXDLVNISFXYMVAENPEVXKQWVEGLRSIIHNFRANNVSPMXCLKKHWMKLAFMXNXNGKIPVRSIXRXFASGKXEKVIFQALKELGLPSGKNDEIEPXAFSYEKFYELXQKICPRXDIEDLFKKINGDKXDYLXVDQLVSFLNEHQRDPRLNEILFPFYDAKRAMQIIEMYEPDEDLKKKGLISSDGFCRYLMSDENAPVFLDRLELYQEMDHPLAHYFISSSHNXYLXGRQFGGKSSVEMYRQVLLAGCRCVELDCWDGKGEDQEPIIXHGKAMCXDILFKDVIQAIKEXAFVXSEYPVILSFENHCSKYQQYKMSKYCEDLFGDLLLKQALESHPLEPGRALPSPNDLKRKILIKNKRLKPEVEKKQLEALRSMMEAGESASPANILEDDNEEEIESADQEEEAHPEFKFGNELSADDLGHKEAVANSVKKASDDLEHENNKKGLVXVEDEQAWMASYKYVGAXXNIHPYLSXMINYAQPVKFQGFHVAEERNIHYNMSSFNESVGLGYLKXHAIEFVNYNKRQMSRIYPKGGRVDSSNYMPQIFWNAGCQMVSLNYQXPDLAMQLNQGKFEYNGSCGYLLKPDFMRRPDRXFDPFSEXPVDGVIAAXCSVQVISGQFLSDKKIGXYVEVDMYGLPXDXIRKEFRXRMVMNNGLNPVYNEESFVFRKVILPDLAVLRIAVYDDNNKLIGQRILPLDGLQAGYRHISLRNEGNKPLSLPXIFCNIVLKXYVPDGFGDIVDALSDPKKFLSIXEKRADQMRAMGIEXSDIADVPSDXSKNDKKGKANXAKANVXPQSSSELRPXXXAALASGVEAKKGIELIPQVRIEDLKQMKAYLKHLKKQQKELNSLKKKHAKEHSXMQKLHCXQVDKIVAQYDKEKSXHEKILEKAMKKKGGSNCLEMKKEXEIKIQXLXSDHKSKVKEIVAQHXKEWSEMINXHSAEEQEIRDLHLSQQCELLKKLLINAHEQQXQQLKLSHDRESKEMRAHQAKISMENSKAISQDKSIKNKAERERRVRELNSSNXKKFLEERKRLAMKQSKEMDQLKKVQLEHLEFLEKQNEQAKEMQQMVKLEAEMDRRPAXVV

SEQ ID NO: 20417 - protein, 1194 aa, Homo sapiens
  MOD_RES (49)..(49): Selenocysteine
  MOD_RES (104)..(104): Selenocysteine
  MOD_RES (112)..(112): Selenocysteine
  MOD_RES (122)..(122): Selenocysteine
  MOD_RES (145)..(145): Selenocysteine
  MOD_RES (158)..(158): Selenocysteine
  MOD_RES (160)..(160): Selenocysteine
  MOD_RES (170)..(170): Selenocysteine
  MOD_RES (172)..(172): Selenocysteine
  MOD_RES (178)..(178): Selenocysteine
  MOD_RES (202)..(202): Selenocysteine
  MOD_RES (213)..(213): Selenocysteine
  MOD_RES (220)..(220): Selenocysteine
  MOD_RES (234)..(234): Selenocysteine
  MOD_RES (238)..(238): Selenocysteine
  MOD_RES (330)..(330): Selenocysteine
  MOD_RES (333)..(333): Selenocysteine
  MOD_RES (374)..(374): Selenocysteine
  MOD_RES (381)..(381): Selenocysteine
  MOD_RES (395)..(395): Selenocysteine
  MOD_RES (399)..(399): Selenocysteine
  MOD_RES (541)..(541): Selenocysteine
  MOD_RES (558)..(559): Selenocysteine
  MOD_RES (567)..(567): Selenocysteine
  MOD_RES (606)..(606): Selenocysteine
  MOD_RES (653)..(653): Selenocysteine
  MOD_RES (686)..(686): Selenocysteine
  MOD_RES (693)..(693): Selenocysteine
  MOD_RES (702)..(702): Selenocysteine
  MOD_RES (720)..(720): Selenocysteine
  MOD_RES (731)..(731): Selenocysteine
  MOD_RES (733)..(733): Selenocysteine
  MOD_RES (740)..(740): Selenocysteine
  MOD_RES (813)..(813): Selenocysteine
  MOD_RES (822)..(822): Selenocysteine
  MOD_RES (845)..(845): Selenocysteine
  MOD_RES (859)..(859): Selenocysteine
  MOD_RES (869)..(869): Selenocysteine
  MOD_RES (880)..(880): Selenocysteine
  MOD_RES (886)..(886): Selenocysteine
  MOD_RES (896)..(898): Selenocysteine
  MOD_RES (952)..(952): Selenocysteine
  MOD_RES (959)..(959): Selenocysteine
  MOD_RES (974)..(974): Selenocysteine
  MOD_RES (998)..(998): Selenocysteine
  MOD_RES (1004)..(1004): Selenocysteine
  MOD_RES (1006)..(1006): Selenocysteine
  MOD_RES (1021)..(1021): Selenocysteine
  MOD_RES (1030)..(1030): Selenocysteine
  MOD_RES (1062)..(1062): Selenocysteine
  MOD_RES (1115)..(1115): Selenocysteine
  MOD_RES (1164)..(1164): Selenocysteine
  MOD_RES (1183)..(1183): Selenocysteine
MAKPYEFNWQKEVPSFLQEGAVFDRYEEESFVFEPNCLFKVDEFGFFLXWRSEGKEGQVLECSLINSIRSGAIPKDPKILAALEAVGKSENDLEGRIVCVCSGXDLVNISFXYMVAENPEVXKQWVEGLRSIIHNFRANNVSPMXCLKKHWMKLAFMXNXNGKIPVRSIXRXFASGKXEKVIFQALKELGLPSGKNDEIEPXAFSYEKFYELXQKICPRXDIEDLFKKINGDKXDYLXVDQLVSFLNEHQRDPRLNEILFPFYDAKRAMQIIEMYEPDEDLKKKGLISSDGFCRYLMSDENAPVFLDRLELYQEMDHPLAHYFISSSHNXYLXGRQFGGKSSVEMYRQVLLAGCRCVELDCWDGKGEDQEPIIXHGKAMCXDILFKDVIQAIKEXAFVXSEYPVILSFENHCSKYQQYKMSKYCEDLFGDLLLKQALESHPLEPGRALPSPNDLKRKILIKNKRLKPEVEKKQLEALRSMMEAGESASPANILEDDNEEEIESADQEEEAHPEFKFGNELSADDLGHKEAVANSVKKGLVXVEDEQAWMASYKYVGAXXNIHPYLSXMINYAQPVKFQGFHVAEERNIHYNMSSFNESVGLGYLKXHAIEFVNYNKRQMSRIYPKGGRVDSSNYMPQIFWNAGCQMVSLNYQXPDLAMQLNQGKFEYNGSCGYLLKPDFMRRPDRXFDPFSEXPVDGVIAAXCSVQVISGQFLSDKKIGXYVEVDMYGLPXDXIRKEFRXRMVMNNGLNPVYNEESFVFRKVILPDLAVLRIAVYDDNNKLIGQRILPLDGLQAGYRHISLRNEGNKPLSLPXIFCNIVLKXYVPDGFGDIVDALSDPKKFLSIXEKRADQMRAMGIEXSDIADVPSDXSKNDKKGKANXAKANVXPQSSSELRPXXXAALASGVEAKKGIELIPQVRIEDLKQMKAYLKHLKKQQKELNSLKKKHAKEHSXMQKLHCXQVDKIVAQYDKEKSXHEKILEKAMKKKGGSNCLEMKKEXEIKIQXLXSDHKSKVKEIVAQHXKEWSEMINXHSAEEQEIRDLHLSQQCELLKKLLINAHEQQXQQLKLSHDRESKEMRAHQAKISMENSKAISQDKSIKNKAERERRVRELNSSNXKKFLEERKRLAMKQSKEMDQLKKVQLEHLEFLEKQNEQLLKSCHAVSQXQGEGDAADGEIGSRDGPQXSNSSMKLQNAN

SEQ ID NO: 20418 - protein, 756 aa, Homo sapiens
  MOD_RES (9)..(9): Selenocysteine
  MOD_RES (50)..(50): Selenocysteine
  MOD_RES (61)..(61): Selenocysteine
  MOD_RES (81)..(81): Selenocysteine
  MOD_RES (107)..(107): Selenocysteine
  MOD_RES (193)..(193): Selenocysteine
  MOD_RES (209)..(209): Selenocysteine
  MOD_RES (217)..(217): Selenocysteine
  MOD_RES (227)..(227): Selenocysteine
  MOD_RES (235)..(235): Selenocysteine
  MOD_RES (263)..(263): Selenocysteine
  MOD_RES (271)..(271): Selenocysteine
  MOD_RES (313)..(313): Selenocysteine
  MOD_RES (326)..(326): Selenocysteine
  MOD_RES (359)..(359): Selenocysteine
  MOD_RES (361)..(361): Selenocysteine
  MOD_RES (394)..(394): Selenocysteine
  MOD_RES (422)..(422): Selenocysteine
  MOD_RES (457)..(457): Selenocysteine
  MOD_RES (512)..(512): Selenocysteine
  MOD_RES (557)..(557): Selenocysteine
  MOD_RES (581)..(581): Selenocysteine
  MOD_RES (614)..(614): Selenocysteine
  MOD_RES (657)..(657): Selenocysteine
  MOD_RES (672)..(672): Selenocysteine
  MOD_RES (676)..(676): Selenocysteine
  MOD_RES (686)..(686): Selenocysteine
  MOD_RES (720)..(720): Selenocysteine
  MOD_RES (747)..(747): Selenocysteine
MDSGRDFLXLHGLQDDEDLQALLKGSQLLKVKSSSWRRERFYKLQEDCKXIWQESRKVMRXPESQLFSIEDIQEVRMGHRXEGLEKFARDVPEDRCFSIVFKDQRNXLDLIAPSPADAQHWVLGLHKIIHHSGSMDQRQKLQHWIHSCLRKADKNKDNKMSFKELQNFLKELNIQVDDSYARKIFRECDHSQXDSLEDEEIEAFYKMLXQRVEIDRXFAEAAGSGEXLSVDQLVXFLQHQQREEAAGPALALSLIERYEPSEXAKAQRQMXKDGFLMYLLSADGSAFSLAHRRVYQDMGQPLSHYLVSSSHNXYLLEDQLAGPSSXEAYIRALCKGCRCLELDCWDGPNQEPIIYHGYXFXSKILFCDVLRAIRDYAFKASPYPVILSLENHCXLEQQRVMARHLHAILGPMLLNRPLDGVXNSLPSPEQLKGKILLKGKKLGGLLPPGGEGGPEAXVVSDEDEAAEMEDEAVRSRVQHKPKEDKLRLAQELSDMVIYCKSVHFGGFSSPGXPGQAFYEMASFSENRALRLLQESGNGFVRHNVGHLSRIYPAGWRXDSSNYSPVEMWNGGCQIVALNFQXPGPEMDVYQGRFQDNGACGYVLKPAFLRDPNGXFNPRALAQGPWWARKRLNIRVISGQQLPKVNKNKNSIVDPKVXVEIHGVSRDVASRQXAVIXNNGFNPWWDXEFAFEVVVPDLALIRFLVEDYDASSKNDFIGQSXIPLNSLKQGYRHVHLMSKNGDQHPSAXLFVKISLQD

SEQ ID NO: 20419 - protein, 777 aa, Homo sapiens
  MOD_RES (71)..(71): Selenocysteine
  MOD_RES (82)..(82): Selenocysteine
  MOD_RES (102)..(102): Selenocysteine
  MOD_RES (128)..(128): Selenocysteine
  MOD_RES (214)..(214): Selenocysteine
  MOD_RES (230)..(230): Selenocysteine
  MOD_RES (238)..(238): Selenocysteine
  MOD_RES (248)..(248): Selenocysteine
  MOD_RES (256)..(256): Selenocysteine
  MOD_RES (284)..(284): Selenocysteine
  MOD_RES (292)..(292): Selenocysteine
  MOD_RES (334)..(334): Selenocysteine
  MOD_RES (347)..(347): Selenocysteine
  MOD_RES (380)..(380): Selenocysteine
  MOD_RES (382)..(382): Selenocysteine
  MOD_RES (415)..(415): Selenocysteine
  MOD_RES (443)..(443): Selenocysteine
  MOD_RES (478)..(478): Selenocysteine
  MOD_RES (533)..(533): Selenocysteine
  MOD_RES (578)..(578): Selenocysteine
  MOD_RES (602)..(602): Selenocysteine
  MOD_RES (635)..(635): Selenocysteine
  MOD_RES (678)..(678): Selenocysteine
  MOD_RES (693)..(693): Selenocysteine
  MOD_RES (697)..(697): Selenocysteine
  MOD_RES (707)..(707): Selenocysteine
  MOD_RES (741)..(741): Selenocysteine
  MOD_RES (768)..(768): Selenocysteine
MQCLGIRSRSRSRELYLQERSLKVAALNGRRLGLQDDEDLQALLKGSQLLKVKSSSWRRERFYKLQEDCKXIWQESRKVMRXPESQLFSIEDIQEVRMGHRXEGLEKFARDVPEDRCFSIVFKDQRNXLDLIAPSPADAQHWVLGLHKIIHHSGSMDQRQKLQHWIHSCLRKADKNKDNKMSFKELQNFLKELNIQVDDSYARKIFRECDHSQXDSLEDEEIEAFYKMLXQRVEIDRXFAEAAGSGEXLSVDQLVXFLQHQQREEAAGPALALSLIERYEPSEXAKAQRQMXKDGFLMYLLSADGSAFSLAHRRVYQDMGQPLSHYLVSSSHNXYLLEDQLAGPSSXEAYIRALCKGCRCLELDCWDGPNQEPIIYHGYXFXSKILFCDVLRAIRDYAFKASPYPVILSLENHCXLEQQRVMARHLHAILGPMLLNRPLDGVXNSLPSPEQLKGKILLKGKKLGGLLPPGGEGGPEAXVVSDEDEAAEMEDEAVRSRVQHKPKEDKLRLAQELSDMVIYCKSVHFGGFSSPGXPGQAFYEMASFSENRALRLLQESGNGFVRHNVGHLSRIYPAGWRXDSSNYSPVEMWNGGCQIVALNFQXPGPEMDVYQGRFQDNGACGYVLKPAFLRDPNGXFNPRALAQGPWWARKRLNIRVISGQQLPKVNKNKNSIVDPKVXVEIHGVSRDVASRQXAVIXNNGFNPWWDXEFAFEVVVPDLALIRFLVEDYDASSKNDFIGQSXIPLNSLKQGYRHVHLMSKNGDQHPSAXLFVKISLQD

SEQ ID NO: 20420 - protein, 789 aa, Homo sapiens
  MOD_RES (37)..(37): Selenocysteine
  MOD_RES (43)..(43): Selenocysteine
  MOD_RES (57)..(57): Selenocysteine
  MOD_RES (78)..(78): Selenocysteine
  MOD_RES (140)..(140): Selenocysteine
  MOD_RES (156)..(156): Selenocysteine
  MOD_RES (168)..(168): Selenocysteine
  MOD_RES (288)..(288): Selenocysteine
  MOD_RES (298)..(298): Selenocysteine
  MOD_RES (304)..(304): Selenocysteine
  MOD_RES (312)..(312): Selenocysteine
  MOD_RES (331)..(331): Selenocysteine
  MOD_RES (333)..(333): Selenocysteine
  MOD_RES (354)..(354): Selenocysteine
  MOD_RES (357)..(357): Selenocysteine
  MOD_RES (367)..(367): Selenocysteine
  MOD_RES (400)..(400): Selenocysteine
  MOD_RES (402)..(402): Selenocysteine
  MOD_RES (420)..(420): Selenocysteine
  MOD_RES (448)..(448): Selenocysteine
  MOD_RES (456)..(456): Selenocysteine
  MOD_RES (538)..(538): Selenocysteine
  MOD_RES (542)..(542): Selenocysteine
  MOD_RES (583)..(583): Selenocysteine
  MOD_RES (616)..(616): Selenocysteine
  MOD_RES (649)..(649): Selenocysteine
  MOD_RES (660)..(661): Selenocysteine
  MOD_RES (668)..(668): Selenocysteine
  MOD_RES (704)..(704): Selenocysteine
  MOD_RES (719)..(719): Selenocysteine
  MOD_RES (742)..(742): Selenocysteine
  MOD_RES (752)..(752): Selenocysteine
  MOD_RES (779)..(779): Selenocysteine
MLCGRWRRCRRPPEEPPVAAQVAAQVAAPVALPSPPXPSDGGXKRPGLRALKKMGLXEDEDVRAMLRGSRLRKIRSRXWHKERLYRLQEDGLSVWFQRRIPRAPSQHIFFVQHIEAVREGHQSEGLRRFGGAFAPARCLXIAFKGRRKNLDLAAPXAEEAQRWVRGLXKLRARLDAMSQRERLDHWIHSYLHRADSNQDSKMSFKEIKSLLRMVNVDMNDMYAYLLFKECDHSNNDRLEGAEIEEFLRRLLKRPELEEIFHQYSGEDRVLSAPELLEFLEDQGEEGAXLARAQQLIQXYELNEXAKQHELMXLDGFMMYLLSPEGAALDNXHXCVFQDMNQPLAHYFISSSHNXYLXDSQIGGPSSXEAYVRAFAQGCRCVELDCWEGPGGEPVIYHGHXLXSKILFRDVVQAVRDHAFXLSPYPVILSLENHCGLEQQAAMARHLCXILGDMLVXQALDSPNPEELPSPEQLKGRVLVKGKKLPAARSEDGRALSDREEEEEDDEEEEEEVEAAAQRRLAKQISPELSALAVYCHAXRLRXLHPAPNAPQPCQVSSLSERKAKKLIREAGNSFVRHNARQLXRVYPLGLRMNSANYSPQEMWNSGCQLVALNFQXPGYEMDLNAGRFLVNGQCGYVLKPACLRQPDSXFDPEYPGPPRXXLSIQVLXAQQLPKLNAEKPHSIVDPLVRIEIHGVPADCARQEXDYVLNNGFNPRWGQXLQFQLRAPELALVRFVVEDYDAXSPNDFVGQFXLPLSSLKQGYRHIHLLSKDGASLSPAXLFIQIRIQRS

SEQ ID NO: 20421 - protein, 127 aa, Homo sapiens
  MOD_RES (14)..(14): Selenocysteine
  MOD_RES (76)..(76): Selenocysteine
  MOD_RES (92)..(92): Selenocysteine
  MOD_RES (104)..(104): Selenocysteine
MLRGSRLRKIRSRXWHKERLYRLQEDGLSVWFQRRIPRAPSQHIFFVQHIEAVREGHQSEGLRRFGGAFAPARCLXIAFKGRRKNLDLAAPXAEEAQRWVRGLXKLRARLDAMSQRERLDHWIHSYL

SEQ ID NO: 20422 - protein, 195 aa, Homo sapiens
  MOD_RES (34)..(34): Selenocysteine
  MOD_RES (55)..(55): Selenocysteine
  MOD_RES (117)..(117): Selenocysteine
  MOD_RES (133)..(133): Selenocysteine
  MOD_RES (145)..(145): Selenocysteine
MSLPDPGHRPQKRCHLDVPHFAHALWCLHINSLXEDEDVRAMLRGSRLRKIRSRXWHKERLYRLQEDGLSVWFQRRIPRAPSQHIFFVQHIEAVREGHQSEGLRRFGGAFAPARCLXIAFKGRRKNLDLAAPXAEEAQRWVRGLXKLRARLDAMSQRERLDHWIHSYLHRADSNQDSKMSFKEIKSLLRMVNVDM

SEQ ID NO: 20423 - protein, 111 aa, Homo sapiens
  MOD_RES (1)..(1): Any amino acid
  MOD_RES (21)..(21): Selenocysteine
  MOD_RES (32)..(33): Selenocysteine
  MOD_RES (40)..(40): Selenocysteine
  MOD_RES (76)..(76): Selenocysteine
  MOD_RES (101)..(101): Selenocysteine
XVNGQCGYVLKPACLRQPDSXFDPEYPGPPRXXLSIQVLXAQQLPKLNAEKPHSIVDPLVRIEIHGVPADCARQEXDYVLNNGYRHIHLLSKDGASLSPAXLFIQIRIQRS

SEQ ID NO: 20424 - protein, 69 aa, Homo sapiens
  MOD_RES (10)..(11): Selenocysteine
  MOD_RES (67)..(67): Selenocysteine
  MOD_RES (69)..(69): Selenocysteine
MASLLQDQLXXDQDLLLMQEGMPMRKSQSLMWRQYVMAMIPSCCVAWQRSSPWSRASPLSSMAAAPXWX

SEQ ID NO: 20425 - protein, 99 aa, Homo sapiens
  MOD_RES (10)..(11): Selenocysteine
  MOD_RES (46)..(46): Selenocysteine
  MOD_RES (68)..(68): Selenocysteine
  MOD_RES (92)..(92): Selenocysteine
MASLLQDQLXXDQDLLLMQEGMPMRKVRSKSWKKLRYFRLQNDGMXVWHARQARGSAKPSFSISDVEXIRNGHDSELLRSLAEELPLEQGFXIVFHGRR

SEQ ID NO: 20426 - protein, 762 aa, Homo sapiens
  MOD_RES (10)..(11): Selenocysteine
  MOD_RES (46)..(46): Selenocysteine
  MOD_RES (68)..(68): Selenocysteine
  MOD_RES (92)..(92): Selenocysteine
  MOD_RES (127)..(127): Selenocysteine
  MOD_RES (184)..(184): Selenocysteine
  MOD_RES (189)..(189): Selenocysteine
  MOD_RES (203)..(203): Selenocysteine
  MOD_RES (223)..(223): Selenocysteine
  MOD_RES (241)..(241): Selenocysteine
  MOD_RES (293)..(293): Selenocysteine
  MOD_RES (307)..(307): Selenocysteine
  MOD_RES (353)..(353): Selenocysteine
  MOD_RES (355)..(355): Selenocysteine
  MOD_RES (366)..(366): Selenocysteine
  MOD_RES (374)..(374): Selenocysteine
  MOD_RES (385)..(385): Selenocysteine
  MOD_RES (394)..(394): Selenocysteine
  MOD_RES (400)..(400): Selenocysteine
  MOD_RES (410)..(411): Selenocysteine
  MOD_RES (418)..(418): Selenocysteine
  MOD_RES (438)..(438): Selenocysteine
  MOD_RES (467)..(467): Selenocysteine
  MOD_RES (509)..(509): Selenocysteine
  MOD_RES (526)..(526): Selenocysteine
  MOD_RES (544)..(544): Selenocysteine
  MOD_RES (557)..(557): Selenocysteine
  MOD_RES (581)..(581): Selenocysteine
  MOD_RES (628)..(628): Selenocysteine
  MOD_RES (645)..(645): Selenocysteine
  MOD_RES (666)..(666): Selenocysteine
  MOD_RES (671)..(671): Selenocysteine
  MOD_RES (686)..(686): Selenocysteine
  MOD_RES (719)..(719): Selenocysteine
  MOD_RES (723)..(723): Selenocysteine
MASLLQDQLXXDQDLLLMQEGMPMRKVRSKSWKKLRYFRLQNDGMXVWHARQARGSAKPSFSISDVEXIRNGHDSELLRSLAEELPLEQGFXIVFHGRRSNLDLMANSVEEAQIWMRGLQLLVDLVXSMDHQERLDQWLSDWFQRGDKNQDGKMSFQEVQRLLHLMNVEMDQEYAFSLFQAADXSQSGXLEGEEFVQFYKALXKRAEVQELFESFSADGQKLXLLEFLDFLQEEQKERDCXSELALELIDRYEPSDSGKLRHVLSMDGFLSYLCSKDGDIFNPACLPIYQDMXQPLNHYFICSSHNXYLVGDQLCGQSSVEGYIRALKRGCRCVEVDVWDGPSGEPVVYHGHXLXSRILFKDVVAXVAQYAFQXSDYPVILSLEXHCSWEQQQXMARHLXEILGEQLLSXXLDGVLPXQLPSPEELRRKILVKGKKLXLEEDLEYEEEEAEPELEESELALESQFEXEPEPQEQNLQNKDKKKKSKPILCPALSSLVIYLKSVSFRSFXHSKEHYHFYEISSFSEXKAKRLIKEAGNEFVQHNXWQLSRVYPSGLRXDSSNYNPQELWNAGCQMVAMNMQXAGLEMDICDGHFRQNGGCGYVLKPDFLRDIQSSFHPEKPISPFKAQXLLIQVISGQQLPKVDKXKEGSIVDPLVKVQIFGVRLDXARQEXNYVENNGFNPYWGQXLCFRVLVPELAMLRFVVMDYDWKSRNDFIGQYXLPWXCMQQGYRHIHLLSKDGISLRPASIFVYICIQEGLEGDES

SEQ ID NO: 20427 - protein, 794 aa, Homo sapiens
  MOD_RES (10)..(11): Selenocysteine
  MOD_RES (46)..(46): Selenocysteine
  MOD_RES (68)..(68): Selenocysteine
  MOD_RES (92)..(92): Selenocysteine
  MOD_RES (127)..(127): Selenocysteine
  MOD_RES (184)..(184): Selenocysteine
  MOD_RES (189)..(189): Selenocysteine
  MOD_RES (203)..(203): Selenocysteine
  MOD_RES (223)..(223): Selenocysteine
  MOD_RES (241)..(241): Selenocysteine
  MOD_RES (293)..(293): Selenocysteine
  MOD_RES (307)..(307): Selenocysteine
  MOD_RES (353)..(353): Selenocysteine
  MOD_RES (355)..(355): Selenocysteine
  MOD_RES (366)..(366): Selenocysteine
  MOD_RES (374)..(374): Selenocysteine
  MOD_RES (385)..(385): Selenocysteine
  MOD_RES (394)..(394): Selenocysteine
  MOD_RES (400)..(400): Selenocysteine
  MOD_RES (410)..(411): Selenocysteine
  MOD_RES (418)..(418): Selenocysteine
  MOD_RES (438)..(438): Selenocysteine
  MOD_RES (467)..(467): Selenocysteine
  MOD_RES (486)..(486): Selenocysteine
  MOD_RES (541)..(541): Selenocysteine
  MOD_RES (558)..(558): Selenocysteine
  MOD_RES (576)..(576): Selenocysteine
  MOD_RES (589)..(589): Selenocysteine
  MOD_RES (613)..(613): Selenocysteine
  MOD_RES (660)..(660): Selenocysteine
  MOD_RES (677)..(677): Selenocysteine
  MOD_RES (698)..(698): Selenocysteine
  MOD_RES (703)..(703): Selenocysteine
  MOD_RES (718)..(718): Selenocysteine
  MOD_RES (751)..(751): Selenocysteine
  MOD_RES (755)..(755): Selenocysteine
MASLLQDQLXXDQDLLLMQEGMPMRKVRSKSWKKLRYFRLQNDGMXVWHARQARGSAKPSFSISDVEXIRNGHDSELLRSLAEELPLEQGFXIVFHGRRSNLDLMANSVEEAQIWMRGLQLLVDLVXSMDHQERLDQWLSDWFQRGDKNQDGKMSFQEVQRLLHLMNVEMDQEYAFSLFQAADXSQSGXLEGEEFVQFYKALXKRAEVQELFESFSADGQKLXLLEFLDFLQEEQKERDCXSELALELIDRYEPSDSGKLRHVLSMDGFLSYLCSKDGDIFNPACLPIYQDMXQPLNHYFICSSHNXYLVGDQLCGQSSVEGYIRALKRGCRCVEVDVWDGPSGEPVVYHGHXLXSRILFKDVVAXVAQYAFQXSDYPVILSLEXHCSWEQQQXMARHLXEILGEQLLSXXLDGVLPXQLPSPEELRRKILVKGKKLXLEEDLEYEEEEAEPELEESELALESQFEXEPEPQEQNLQNKDKKKVVXCPLFCPSICCQIVAQAPISKPESLLLSRQKSKPILCPALSSLVIYLKSVSFRSFXHSKEHYHFYEISSFSEXKAKRLIKEAGNEFVQHNXWQLSRVYPSGLRXDSSNYNPQELWNAGCQMVAMNMQXAGLEMDICDGHFRQNGGCGYVLKPDFLRDIQSSFHPEKPISPFKAQXLLIQVISGQQLPKVDKXKEGSIVDPLVKVQIFGVRLDXARQEXNYVENNGFNPYWGQXLCFRVLVPELAMLRFVVMDYDWKSRNDFIGQYXLPWXCMQQGYRHIHLLSKDGISLRPASIFVYICIQEGLEGDES

SEQ ID NO: 20428 - protein, 111 aa, Homo sapiens
  MOD_RES (1)..(1): Any amino acid
  MOD_RES (15)..(15): Selenocysteine
  MOD_RES (20)..(20): Selenocysteine
  MOD_RES (35)..(35): Selenocysteine
  MOD_RES (68)..(68): Selenocysteine
  MOD_RES (72)..(72): Selenocysteine
XPLVKVQIFGVRLDXARQEXNYVENNGFNPYWGQXLCFRVLVPELAMLRFVVMDYDWKSRNDFIGQYXLPWXCMQQGYRHIHLLSKDGISLRPASIFVYICIQEGLEGDES

SEQ ID NO: 20429 - protein, 123 aa, Homo sapiens
  MOD_RES (1)..(1): Any amino acid
  MOD_RES (3)..(3): Selenocysteine
  MOD_RES (14)..(14): Selenocysteine
  MOD_RES (23)..(23): Selenocysteine
  MOD_RES (29)..(29): Selenocysteine
  MOD_RES (39)..(40): Selenocysteine
  MOD_RES (47)..(47): Selenocysteine
  MOD_RES (67)..(67): Selenocysteine
  MOD_RES (96)..(96): Selenocysteine
  MOD_RES (119)..(119): Selenocysteine
XQXSDYPVILSLEXHCSWEQQQXMARHLXEILGEQLLSXXLDGVLPXQLPSPEELRRKILVKGKKLXLEEDLEYEEEEAEPELEESELALESQFEXEPEPQEQNLQNKDKKKAMSLCSXILGS

SEQ ID NO: 20430 - protein, 2302 aa, Homo sapiens
  MOD_RES (2)..(2): Selenocysteine
  MOD_RES (7)..(7): Selenocysteine
  MOD_RES (15)..(15): Selenocysteine
  MOD_RES (43)..(43): Selenocysteine
  MOD_RES (50)..(50): Selenocysteine
  MOD_RES (53)..(53): Selenocysteine
  MOD_RES (138)..(138): Selenocysteine
  MOD_RES (175)..(175): Selenocysteine
  MOD_RES (200)..(200): Selenocysteine
  MOD_RES (203)..(203): Selenocysteine
  MOD_RES (234)..(234): Selenocysteine
  MOD_RES (258)..(258): Selenocysteine
  MOD_RES (288)..(288): Selenocysteine
  MOD_RES (295)..(295): Selenocysteine
  MOD_RES (323)..(323): Selenocysteine
  MOD_RES (342)..(342): Selenocysteine
  MOD_RES (344)..(344): Selenocysteine
  MOD_RES (350)..(350): Selenocysteine
  MOD_RES (359)..(359): Selenocysteine
  MOD_RES (384)..(384): Selenocysteine
  MOD_RES (412)..(412): Selenocysteine
  MOD_RES (415)..(415): Selenocysteine
  MOD_RES (424)..(424): Selenocysteine
  MOD_RES (431)..(431): Selenocysteine
  MOD_RES (449)..(449): Selenocysteine
  MOD_RES (456)..(456): Selenocysteine
  MOD_RES (460)..(460): Selenocysteine
  MOD_RES (467)..(467): Selenocysteine
  MOD_RES (474)..(475): Selenocysteine
  MOD_RES (486)..(486): Selenocysteine
  MOD_RES (491)..(491): Selenocysteine
  MOD_RES (545)..(545): Selenocysteine
  MOD_RES (560)..(560): Selenocysteine
  MOD_RES (565)..(565): Selenocysteine
  MOD_RES (585)..(586): Selenocysteine
  MOD_RES (609)..(609): Selenocysteine
  MOD_RES (614)..(614): Selenocysteine
  MOD_RES (670)..(670): Selenocysteine
  MOD_RES (692)..(692): Selenocysteine
  MOD_RES (736)..(736): Selenocysteine
  MOD_RES (766)..(766): Selenocysteine
  MOD_RES (783)..(783): Selenocysteine
  MOD_RES (843)..(843): Selenocysteine
  MOD_RES (866)..(866): Selenocysteine
  MOD_RES (874)..(874): Selenocysteine
  MOD_RES (890)..(890): Selenocysteine
  MOD_RES (892)..(892): Selenocysteine
  MOD_RES (897)..(898): Selenocysteine
  MOD_RES (914)..(914): Selenocysteine
  MOD_RES (932)..(932): Selenocysteine
  MOD_RES (955)..(955): Selenocysteine
  MOD_RES (970)..(970): Selenocysteine
  MOD_RES (973)..(973): Selenocysteine
  MOD_RES (980)..(981): Selenocysteine
  MOD_RES (994)..(994): Selenocysteine
  MOD_RES (1006)..(1006): Selenocysteine
  MOD_RES (1041)..(1041): Selenocysteine
  MOD_RES (1063)..(1063): Selenocysteine
  MOD_RES (1078)..(1078): Selenocysteine
  MOD_RES (1083)..(1084): Selenocysteine
  MOD_RES (1100)..(1100): Selenocysteine
  MOD_RES (1106)..(1106): Selenocysteine
  MOD_RES (1153)..(1154): Selenocysteine
  MOD_RES (1164)..(1164): Selenocysteine
  MOD_RES (1256)..(1256): Selenocysteine
  MOD_RES (1259)..(1259): Selenocysteine
  MOD_RES (1264)..(1264): Selenocysteine
  MOD_RES (1275)..(1275): Selenocysteine
  MOD_RES (1309)..(1309): Selenocysteine
  MOD_RES (1312)..(1312): Selenocysteine
  MOD_RES (1317)..(1317): Selenocysteine
  MOD_RES (1342)..(1342): Selenocysteine
  MOD_RES (1409)..(1409): Selenocysteine
  MOD_RES (1412)..(1412): Selenocysteine
  MOD_RES (1455)..(1455): Selenocysteine
  MOD_RES (1457)..(1458): Selenocysteine
  MOD_RES (1503)..(1503): Selenocysteine
  MOD_RES (1511)..(1511): Selenocysteine
  MOD_RES (1517)..(1517): Selenocysteine
  MOD_RES (1547)..(1547): Selenocysteine
  MOD_RES (1682)..(1682): Selenocysteine
  MOD_RES (1713)..(1713): Selenocysteine
  MOD_RES (1719)..(1719): Selenocysteine
  MOD_RES (1731)..(1731): Selenocysteine
  MOD_RES (1742)..(1743): Selenocysteine
  MOD_RES (1751)..(1751): Selenocysteine
  MOD_RES (1777)..(1777): Selenocysteine
  MOD_RES (1780)..(1780): Selenocysteine
  MOD_RES (1787)..(1787): Selenocysteine
  MOD_RES (1792)..(1792): Selenocysteine
  MOD_RES (1818)..(1818): Selenocysteine
  MOD_RES (1874)..(1874): Selenocysteine
  MOD_RES (1908)..(1908): Selenocysteine
  MOD_RES (1915)..(1915): Selenocysteine
  MOD_RES (1949)..(1949): Selenocysteine
  MOD_RES (1996)..(1996): Selenocysteine
  MOD_RES (2005)..(2005): Selenocysteine
  MOD_RES (2013)..(2013): Selenocysteine
  MOD_RES (2017)..(2017): Selenocysteine
  MOD_RES (2028)..(2028): Selenocysteine
  MOD_RES (2031)..(2031): Selenocysteine
  MOD_RES (2036)..(2036): Selenocysteine
  MOD_RES (2047)..(2047): Selenocysteine
  MOD_RES (2056)..(2057): Selenocysteine
  MOD_RES (2111)..(2111): Selenocysteine
  MOD_RES (2151)..(2151): Selenocysteine
  MOD_RES (2160)..(2160): Selenocysteine
  MOD_RES (2168)..(2168): Selenocysteine
  MOD_RES (2197)..(2198): Selenocysteine
  MOD_RES (2202)..(2204): Selenocysteine
  MOD_RES (2260)..(2260): Selenocysteine
  MOD_RES (2263)..(2263): Selenocysteine
  MOD_RES (2270)..(2270): Selenocysteine
  MOD_RES (2277)..(2277): Selenocysteine
  MOD_RES (2283)..(2283): Selenocysteine
  MOD_RES (2297)..(2297): Selenocysteine
MXSEEMXASVLIPVXQRKVVSAQSAADESSEKVSDINISKAHXVRRSGEXSHXISQLNKLKEEPSGSNLPKILSIAREKIVSDENSNEKCWEKIMPDSAKNLNINCNNILRNHQHGLPQRQFYEMYNSVAEEDLCLEXGIPSPLERKVFPGIQLELDRPSMGISPLGNQSVIIEXGRAHPDSRRAVFHFHYEVDRRMSDXFCXLSENLILDDCGNCVPLPGGEEKQKKNYVAYXCKLMELAKNCDNKNEQLQCDHCDXLNDKYFCFEGSCEKVDMVYSGDSFCRKDFXDSQAAKXFLSHFEDFPDNCDDVEEDAFKSKKERSXLLVRRFCKNDREVKKSVYXGXRAIVRXLPSGHIGLXAWSYIDQKRNGPLLPCGRVMEPPSXVEIRQDGSQRLSEAQWYPIYNAVRREEXENXVGSLLHFLXKLPASEXAHGRISVGPCLKQCVRDXVCEYRAXLQRXSISQYIXGSLLEAXXSLGARSGLLSXFGGSXGRMMLKERQPGPSVANSNALPSSSAGISKELIDLQPLIQFPEEVASILMEQEQXIYRRVLPVDYLCFLXRDLGXPECQSSLPCLKASISASILXXQNGEHNALEDLVMRFNEVSSWVXWLILXAGSMEEKREVFSYLVHVAKCCWNMGNYNAVMEFLAGLRSRKVLKMWQFMDQSDIEXMRSLKDAMAQHESSCEYRKVVXRALHIPGCKVVPFCGVFLKELCEVLDGASGLMKLCPRYNSQEEXLEFVADYSGQDNFLQRVGQNGLKNSEKESXVNSIFQVIRSCNRSLEXDEEDSPSEGNSSRKSSLKDKSRWQFIIGDLLDSDNDIFEQSKEYDSHGSEDSQKAFDHGXELIPWYVLSIQADVHQFLLQGAXVIHYDQDXHLSARCFLQLQPDNSXLXWVKPXXASPASSKAKLGVLNNXAEPGKFPLLGNAGLSSLXEGVLDLFAVKAVYMGHPGIDIHXVCVQNKLGSMFLSEXGVXLLYGLQXXDNRLLHFVAPKHXAKMLFSGLLELXRAVRKMRKFPDQRQQWLRKQYVSLYQEDGRYEGPXLAHAVELFGGRRWSARNPSPGXSAKNAEKPNMQRNNXLGISXXKKKKKILMRGESGEVXDDEMAXRKAKMHKECRSRSGSDPQDINEQEESEVNAIANPPNPLPSRRAHSLXXAGSPNLAAGXSSPIRPVSSPVLSSSNKSPSSAWSSSSWHGRIKGGMKGFQSFMVSDSNMSFVEFVELFKSFSVRSRKDLKDLFDVYAVPCNRSGSESAPLYXNLXIDENXSDLQPDLDLLXRNVSDLGLFIKSKQQLSDNQRQISDAIAAASIVXNGXGIESXSLGIFGVGILQLNDFLVNCQGEHCXYDEILSIIQKFEPSISMCHQGLMSFEGFARFLMDKENFASKNDESQENIKELQLPLSYYYIESSHNXYLXGHQLKGESSVELYSQVLLQGCRSVELDCWDGDDGMPIIYHGHXLXXKIPFKEVVEAIDRSAFINSDLPIIISIENHCSLPQQRKMAEIFKXVFGEKLVXKFLFEXDFSDDPMLPSPDQLRKKVLLKNKKLKAHQXPVDILKQKAHQLASMQVQAYNGGNANPRPANNEEEEDEEDEYDYDYESLSDDNILEDRPENKSCNDKLQFEYNEEIPKRIKKADNSACNKGKVYDMELGEEFYLDQNKKESRQIAPELSDLVIYCQAVKFPGLSXLNASGSSRGKERKSRKSIFGNNPGRMSPGEXASFNKXSGKSSCEGIRQXWEESSSPLNPXXSLSAIIRXPKCYHISSLNENAAKRLCRRYSQKLXQHXACQLLRXYPAAXRIDSSNPNPLMFWLHGIQLVALNYQXDDLPLHLNAAMFEANGGCGYVLKPPVLWDKNCPMYQKFSPLERDLDSMDPAVYSLXIVSGQNVCPSNSMGSPCIEVDVLGMPLDSCHFRXKPIHRNXLNPMWNEQFLFHVHFEDLVFLRFAVVENNSSAVXAQRIIPLKALKRGYRHLQLRNLHNEVLEISSLFINSRRMEENSSGNXMSASSMFNXEERKCLQXHRVXVHGVPGPEPFXVFXINGGXKAKQLLQQILXNEQDIKPVXXDYFLMEEKYFISKEKNECRKQPFQRAIGPEEEIMQILSSWFPEEGYMGRIVLKXQQENLEEKNIVQDDKEVILSSEEESFFVQVHDVSPEQPRXVIKAPRVSXAQDVIQQXLCKAKYSYSILSNPNPSDYVLLEEVVKDXXNKKXXXPKSSQRVLLDQECVFQAQSKWKGAGKFILKLKEQVQASREDKKKGISFASELKKLXKSXKQPRGLXSPSQLLXSESIQXKEEKPVGGLSSSDXMDYRQ

SEQ ID NO: 20431 - protein, 1994 aa, Homo sapiens
  MOD_RES (59)..(59): Selenocysteine
  MOD_RES (79)..(79): Selenocysteine
  MOD_RES (104)..(104): Selenocysteine
  MOD_RES (107)..(107): Selenocysteine
  MOD_RES (116)..(116): Selenocysteine
  MOD_RES (123)..(123): Selenocysteine
  MOD_RES (141)..(141): Selenocysteine
  MOD_RES (148)..(148): Selenocysteine
  MOD_RES (152)..(152): Selenocysteine
  MOD_RES (159)..(159): Selenocysteine
  MOD_RES (166)..(167): Selenocysteine
  MOD_RES (178)..(178): Selenocysteine
  MOD_RES (183)..(183): Selenocysteine
  MOD_RES (237)..(237): Selenocysteine
  MOD_RES (252)..(252): Selenocysteine
  MOD_RES (257)..(257): Selenocysteine
  MOD_RES (277)..(278): Selenocysteine
  MOD_RES (301)..(301): Selenocysteine
  MOD_RES (306)..(306): Selenocysteine
  MOD_RES (362)..(362): Selenocysteine
  MOD_RES (384)..(384): Selenocysteine
  MOD_RES (428)..(428): Selenocysteine
  MOD_RES (458)..(458): Selenocysteine
  MOD_RES (475)..(475): Selenocysteine
  MOD_RES (535)..(535): Selenocysteine
  MOD_RES (558)..(558): Selenocysteine
  MOD_RES (566)..(566): Selenocysteine
  MOD_RES (582)..(582): Selenocysteine
  MOD_RES (584)..(584): Selenocysteine
  MOD_RES (589)..(590): Selenocysteine
  MOD_RES (606)..(606): Selenocysteine
  MOD_RES (624)..(624): Selenocysteine
  MOD_RES (647)..(647): Selenocysteine
  MOD_RES (662)..(662): Selenocysteine
  MOD_RES (665)..(665): Selenocysteine
  MOD_RES (672)..(673): Selenocysteine
  MOD_RES (686)..(686): Selenocysteine
  MOD_RES (698)..(698): Selenocysteine
  MOD_RES (733)..(733): Selenocysteine
  MOD_RES (755)..(755): Selenocysteine
  MOD_RES (770)..(770): Selenocysteine
  MOD_RES (775)..(776): Selenocysteine
  MOD_RES (792)..(792): Selenocysteine
  MOD_RES (798)..(798): Selenocysteine
  MOD_RES (845)..(846): Selenocysteine
  MOD_RES (856)..(856): Selenocysteine
  MOD_RES (948)..(948): Selenocysteine
  MOD_RES (951)..(951): Selenocysteine
  MOD_RES (956)..(956): Selenocysteine
  MOD_RES (967)..(967): Selenocysteine
  MOD_RES (1001)..(1001): Selenocysteine
  MOD_RES (1004)..(1004): Selenocysteine
  MOD_RES (1009)..(1009): Selenocysteine
  MOD_RES (1034)..(1034): Selenocysteine
  MOD_RES (1101)..(1101): Selenocysteine
  MOD_RES (1104)..(1104): Selenocysteine
  MOD_RES (1147)..(1147): Selenocysteine
  MOD_RES (1149)..(1150): Selenocysteine
  MOD_RES (1195)..(1195): Selenocysteine
  MOD_RES (1203)..(1203): Selenocysteine
  MOD_RES (1209)..(1209): Selenocysteine
  MOD_RES (1239)..(1239): Selenocysteine
  MOD_RES (1374)..(1374): Selenocysteine
  MOD_RES (1405)..(1405): Selenocysteine
  MOD_RES (1411)..(1411): Selenocysteine
  MOD_RES (1423)..(1423): Selenocysteine
  MOD_RES (1434)..(1435): Selenocysteine
  MOD_RES (1443)..(1443): Selenocysteine
  MOD_RES (1469)..(1469): Selenocysteine
  MOD_RES (1472)..(1472): Selenocysteine
  MOD_RES (1479)..(1479): Selenocysteine
  MOD_RES (1484)..(1484): Selenocysteine
  MOD_RES (1510)..(1510): Selenocysteine
  MOD_RES (1566)..(1566): Selenocysteine
  MOD_RES (1600)..(1600): Selenocysteine
  MOD_RES (1607)..(1607): Selenocysteine
  MOD_RES (1641)..(1641): Selenocysteine
  MOD_RES (1688)..(1688): Selenocysteine
  MOD_RES (1697)..(1697): Selenocysteine
  MOD_RES (1705)..(1705): Selenocysteine
  MOD_RES (1709)..(1709): Selenocysteine
  MOD_RES (1720)..(1720): Selenocysteine
  MOD_RES (1723)..(1723): Selenocysteine
  MOD_RES (1728)..(1728): Selenocysteine
  MOD_RES (1739)..(1739): Selenocysteine
  MOD_RES (1748)..(1749): Selenocysteine
  MOD_RES (1803)..(1803): Selenocysteine
  MOD_RES (1843)..(1843): Selenocysteine
  MOD_RES (1852)..(1852): Selenocysteine
  MOD_RES (1860)..(1860): Selenocysteine
  MOD_RES (1889)..(1890): Selenocysteine
  MOD_RES (1894)..(1896): Selenocysteine
  MOD_RES (1952)..(1952): Selenocysteine
  MOD_RES (1955)..(1955): Selenocysteine
  MOD_RES (1962)..(1962): Selenocysteine
  MOD_RES (1969)..(1969): Selenocysteine
  MOD_RES (1975)..(1975): Selenocysteine
  MOD_RES (1989)..(1989): Selenocysteine
MVSEGSAAGRDFAGMEEVRQLHVRFCKGIKIWHQAWFLCSLLGREPQEREAGCQLWLCXLSAVLKVGWLFPLSEVPNFXLLKDGCGCWRLKEDQIYNAVRREEXENXVGSLLHFLXKLPASEXAHGRISVGPCLKQCVRDXVCEYRAXLQRXSISQYIXGSLLEAXXSLGARSGLLSXFGGSXGRMMLKERQPGPSVANSNALPSSSAGISKELIDLQPLIQFPEEVASILMEQEQXIYRRVLPVDYLCFLXRDLGXPECQSSLPCLKASISASILXXQNGEHNALEDLVMRFNEVSSWVXWLILXAGSMEEKREVFSYLVHVAKCCWNMGNYNAVMEFLAGLRSRKVLKMWQFMDQSDIEXMRSLKDAMAQHESSCEYRKVVXRALHIPGCKVVPFCGVFLKELCEVLDGASGLMKLCPRYNSQEEXLEFVADYSGQDNFLQRVGQNGLKNSEKESXVNSIFQVIRSCNRSLEXDEEDSPSEGNSSRKSSLKDKSRWQFIIGDLLDSDNDIFEQSKEYDSHGSEDSQKAFDHGXELIPWYVLSIQADVHQFLLQGAXVIHYDQDXHLSARCFLQLQPDNSXLXWVKPXXASPASSKAKLGVLNNXAEPGKFPLLGNAGLSSLXEGVLDLFAVKAVYMGHPGIDIHXVCVQNKLGSMFLSEXGVXLLYGLQXXDNRLLHFVAPKHXAKMLFSGLLELXRAVRKMRKFPDQRQQWLRKQYVSLYQEDGRYEGPXLAHAVELFGGRRWSARNPSPGXSAKNAEKPNMQRNNXLGISXXKKKKKILMRGESGEVXDDEMAXRKAKMHKECRSRSGSDPQDINEQEESEVNAIANPPNPLPSRRAHSLXXAGSPNLAAGXSSPIRPVSSPVLSSSNKSPSSAWSSSSWHGRIKGGMKGFQSFMVSDSNMSFVEFVELFKSFSVRSRKDLKDLFDVYAVPCNRSGSESAPLYXNLXIDENXSDLQPDLDLLXRNVSDLGLFIKSKQQLSDNQRQISDAIAAASIVXNGXGIESXSLGIFGVGILQLNDFLVNCQGEHCXYDEILSIIQKFEPSISMCHQGLMSFEGFARFLMDKENFASKNDESQENIKELQLPLSYYYIESSHNXYLXGHQLKGESSVELYSQVLLQGCRSVELDCWDGDDGMPIIYHGHXLXXKIPFKEVVEAIDRSAFINSDLPIIISIENHCSLPQQRKMAEIFKXVFGEKLVXKFLFEXDFSDDPMLPSPDQLRKKVLLKNKKLKAHQXPVDILKQKAHQLASMQVQAYNGGNANPRPANNEEEEDEEDEYDYDYESLSDDNILEDRPENKSCNDKLQFEYNEEIPKRIKKADNSACNKGKVYDMELGEEFYLDQNKKESRQIAPELSDLVIYCQAVKFPGLSXLNASGSSRGKERKSRKSIFGNNPGRMSPGEXASFNKXSGKSSCEGIRQXWEESSSPLNPXXSLSAIIRXPKCYHISSLNENAAKRLCRRYSQKLXQHXACQLLRXYPAAXRIDSSNPNPLMFWLHGIQLVALNYQXDDLPLHLNAAMFEANGGCGYVLKPPVLWDKNCPMYQKFSPLERDLDSMDPAVYSLXIVSGQNVCPSNSMGSPCIEVDVLGMPLDSCHFRXKPIHRNXLNPMWNEQFLFHVHFEDLVFLRFAVVENNSSAVXAQRIIPLKALKRGYRHLQLRNLHNEVLEISSLFINSRRMEENSSGNXMSASSMFNXEERKCLQXHRVXVHGVPGPEPFXVFXINGGXKAKQLLQQILXNEQDIKPVXXDYFLMEEKYFISKEKNECRKQPFQRAIGPEEEIMQILSSWFPEEGYMGRIVLKXQQENLEEKNIVQDDKEVILSSEEESFFVQVHDVSPEQPRXVIKAPRVSXAQDVIQQXLCKAKYSYSILSNPNPSDYVLLEEVVKDXXNKKXXXPKSSQRVLLDQECVFQAQSKWKGAGKFILKLKEQVQASREDKKKGISFASELKKLXKSXKQPRGLXSPSQLLXSESIQXKEEKPVGGLSSSDXMDYRQ

SEQ ID NO: 20432 - protein, 50 aa, Homo sapiens
  MOD_RES (23)..(23): Selenocysteine
  MOD_RES (36)..(36): Selenocysteine
  MOD_RES (38)..(38): Selenocysteine
  MOD_RES (50)..(50): Selenocysteine
DVAADSQEELQDWVKKIREVAQXADARRLAQNVLAXGXCHPSRKPRLRNX

SEQ ID NO: 20433 - protein, 108 aa, Homo sapiens
  MOD_RES (3)..(3): Selenocysteine
  MOD_RES (44)..(44): Selenocysteine
  MOD_RES (100)..(100): Selenocysteine
LKXGYRAVPLKNNYSEDLELASLLIKIDIFPAKENGDLSPFSGXSLRERGSDASGQLFHGRAREGSFESRYQQPFEDFRISQEHLADHFDSRERRAPRRXRVNGDNRL

SEQ ID NO: 20434 - protein, 219 aa, Homo sapiens
  MOD_RES (42)..(42): Selenocysteine
  MOD_RES (56)..(56): Selenocysteine
  MOD_RES (68)..(68): Selenocysteine
  MOD_RES (124)..(124): Selenocysteine
  MOD_RES (128)..(128): Selenocysteine
  MOD_RES (177)..(177): Selenocysteine
  MOD_RES (185)..(185): Selenocysteine
LQYNRLQLSRIYPKGQRLDSSNYDPLPMWICGSQLVALNFQXPDKPMQMNQALFMXGRHCGYVLQPSXMRDEAFDPFDKSSLRGLEPCAISIEVLGARHLPKNGRGIVCPFVEIEVAGAEYDSXKQKXEFVVDNGLNPVWPAKPFHFQISNPEFAFLRFVVYEEDMFSDQNFLAQAXFPVKGLKXGYRAVPLKNNYSEDLELASLLIKIDIFPAKKLLC

SEQ ID NO: 20435 - protein, 1290 aa, Homo sapiens
  MOD_RES (33)..(33): Selenocysteine
  MOD_RES (36)..(36): Selenocysteine
  MOD_RES (50)..(50): Selenocysteine
  MOD_RES (57)..(57): Selenocysteine
  MOD_RES (61)..(61): Selenocysteine
  MOD_RES (86)..(86): Selenocysteine
  MOD_RES (119)..(119): Selenocysteine
  MOD_RES (125)..(125): Selenocysteine
  MOD_RES (138)..(138): Selenocysteine
  MOD_RES (144)..(144): Selenocysteine
  MOD_RES (149)..(149): Selenocysteine
  MOD_RES (199)..(199): Selenocysteine
  MOD_RES (209)..(209): Selenocysteine
  MOD_RES (227)..(227): Selenocysteine
  MOD_RES (237)..(237): Selenocysteine
  MOD_RES (300)..(300): Selenocysteine
  MOD_RES (321)..(321): Selenocysteine
  MOD_RES (337)..(337): Selenocysteine
  MOD_RES (340)..(340): Selenocysteine
  MOD_RES (383)..(383): Selenocysteine
  MOD_RES (385)..(386): Selenocysteine
  MOD_RES (396)..(396): Selenocysteine
  MOD_RES (436)..(436): Selenocysteine
  MOD_RES (439)..(439): Selenocysteine
  MOD_RES (477)..(477): Selenocysteine
  MOD_RES (513)..(513): Selenocysteine
  MOD_RES (523)..(523): Selenocysteine
  MOD_RES (542)..(542): Selenocysteine
  MOD_RES (570)..(570): Selenocysteine
  MOD_RES (576)..(576): Selenocysteine
  MOD_RES (590)..(590): Selenocysteine
  MOD_RES (596)..(596): Selenocysteine
  MOD_RES (618)..(618): Selenocysteine
  MOD_RES (624)..(624): Selenocysteine
  MOD_RES (637)..(637): Selenocysteine
  MOD_RES (660)..(660): Selenocysteine
  MOD_RES (674)..(674): Selenocysteine
  MOD_RES (723)..(723): Selenocysteine
  MOD_RES (766)..(766): Selenocysteine
  MOD_RES (791)..(791): Selenocysteine
  MOD_RES (811)..(811): Selenocysteine
  MOD_RES (932)..(932): Selenocysteine
  MOD_RES (938)..(938): Selenocysteine
  MOD_RES (972)..(972): Selenocysteine
  MOD_RES (986)..(986): Selenocysteine
  MOD_RES (1042)..(1042): Selenocysteine
  MOD_RES (1056)..(1056): Selenocysteine
  MOD_RES (1068)..(1068): Selenocysteine
  MOD_RES (1124)..(1124): Selenocysteine
  MOD_RES (1128)..(1128): Selenocysteine
  MOD_RES (1177)..(1177): Selenocysteine
  MOD_RES (1185)..(1185): Selenocysteine
  MOD_RES (1226)..(1226): Selenocysteine
  MOD_RES (1282)..(1282): Selenocysteine
MAGAASPCANGCGPGAPSDAEVLHLCRSLEVGXVMXLFYSKKSQRPERKXFQVKLEXRQIXWSRGADKIEGAIDIREIKEIRPGKXSRDFDRYQEDPAFRPDQSHCFVILYGMEFRLKXLSLQAXSEDEVNMWIKGLXWLMEDXLQAPXPLQIERWLRKQFYSVDRNREDRISAKDLKNMLSQVNYRVPNMRFLRERLXDLEQRSGDIXYGQFAQLYRSLMYSAQKXMDLPFLEASXLRAGERPELCRVSLPEFQQFLLDYQGELWAVDRLQVQEFMLSFLRDPLREIEEPYFFLDEFVXFLFSKENSVWNSQLDAVCPDXMNNPLSHYWISSSHNXYLXGDQFSSESSLEAYARCLRMGCRCIELDCWDGPDGMPVIYHGHXLXXKIKFSDVLHXIKEHAFVASEYPVILSIEDHCSIAQQRNMAQYFKKVLGDXLLXKPVEISADGLPSPNQLKRKILIKHKKLAEGSAYEEVPXSMMYSENDISNSIKNGILYLEDPVNHEWYPHYFVLXSSKIYYSEEXSSDQGNEDEEEPKEVSSSXELHSNEKWFHGKLGAGRDGRHIAERLLXEYCIEXGAPDGSFLVRESEXFVGDYXLSFWRNGKVQHCRIHSRQDAGXPKFFLXDNLVFDSLYDLIXHYQQVPLRCNEFEMRLSEPVPQXNAHESKEWYHASLXRAQAEHMLMRVPRDGAFLVRKRNEPNSYAISFRAEGKIKHCRVQQEGQXVMLGNSEFDSLVDLISYYEKHPLYRKMKLRYPINEEALEKIGXAEPDYGALYEGRNPGFYVEANPMPXFKCAVKALFDYKAQREDELXFIKSAIIQNVEKQEGGWWRGDYGGKKQLWFPSNYVEEMVNPVALEPEREHLDENSPLGDLLRGVLDVPACQIAIRPEGKNNRLFVFSISMASVAHWSLDVAADSQEELQDWVKKIREVAQXADARLXEGKIMERRKKIALELSELVVYCRPVPFDEEKIGXERACYRDMSSFPEXKAEKYVNKAKGKKFLQYNRLQLSRIYPKGQRLDSSNYDPLPMWICGSQLVALNFQXPDKPMQMNQALFMXGRHCGYVLQPSXMRDEAFDPFDKSSLRGLEPCAISIEVLGARHLPKNGRGIVCPFVEIEVAGAEYDSXKQKXEFVVDNGLNPVWPAKPFHFQISNPEFAFLRFVVYEEDMFSDQNFLAQAXFPVKGLKXGYRAVPLKNNYSEDLELASLLIKIDIFPAKENGDLSPFSGXSLRERGSDASGQLFHGRAREGSFESRYQQPFEDFRISQEHLADHFDSRERRAPRRXRVNGDNRL

SEQ ID NO: 20436 - protein, 1291 aa, Homo sapiens
  MOD_RES (33)..(33): Selenocysteine
  MOD_RES (36)..(36): Selenocysteine
  MOD_RES (50)..(50): Selenocysteine
  MOD_RES (57)..(57): Selenocysteine
  MOD_RES (61)..(61): Selenocysteine
  MOD_RES (86)..(86): Selenocysteine
  MOD_RES (119)..(119): Selenocysteine
  MOD_RES (125)..(125): Selenocysteine
  MOD_RES (138)..(138): Selenocysteine
  MOD_RES (144)..(144): Selenocysteine
  MOD_RES (149)..(149): Selenocysteine
  MOD_RES (199)..(199): Selenocysteine
  MOD_RES (209)..(209): Selenocysteine
  MOD_RES (227)..(227): Selenocysteine
  MOD_RES (237)..(237): Selenocysteine
  MOD_RES (300)..(300): Selenocysteine
  MOD_RES (321)..(321): Selenocysteine
  MOD_RES (337)..(337): Selenocysteine
  MOD_RES (340)..(340): Selenocysteine
  MOD_RES (383)..(383): Selenocysteine
  MOD_RES (385)..(386): Selenocysteine
  MOD_RES (396)..(396): Selenocysteine
  MOD_RES (436)..(436): Selenocysteine
  MOD_RES (439)..(439): Selenocysteine
  MOD_RES (477)..(477): Selenocysteine
  MOD_RES (513)..(513): Selenocysteine
  MOD_RES (523)..(523): Selenocysteine
  MOD_RES (542)..(542): Selenocysteine
  MOD_RES (570)..(570): Selenocysteine
  MOD_RES (576)..(576): Selenocysteine
  MOD_RES (590)..(590): Selenocysteine
  MOD_RES (596)..(596): Selenocysteine
  MOD_RES (618)..(618): Selenocysteine
  MOD_RES (624)..(624): Selenocysteine
  MOD_RES (637)..(637): Selenocysteine
  MOD_RES (660)..(660): Selenocysteine
  MOD_RES (674)..(674): Selenocysteine
  MOD_RES (723)..(723): Selenocysteine
  MOD_RES (766)..(766): Selenocysteine
  MOD_RES (791)..(791): Selenocysteine
  MOD_RES (811)..(811): Selenocysteine
  MOD_RES (932)..(932): Selenocysteine
  MOD_RES (938)..(938): Selenocysteine
  MOD_RES (972)..(972): Selenocysteine
  MOD_RES (986)..(986): Selenocysteine
  MOD_RES (1042)..(1042): Selenocysteine
  MOD_RES (1056)..(1056): Selenocysteine
  MOD_RES (1068)..(1068): Selenocysteine
  MOD_RES (1124)..(1124): Selenocysteine
  MOD_RES (1128)..(1128): Selenocysteine
  MOD_RES (1177)..(1177): Selenocysteine
  MOD_RES (1185)..(1185): Selenocysteine
  MOD_RES (1227)..(1227): Selenocysteine
  MOD_RES (1283)..(1283): Selenocysteine
MAGAASPCANGCGPGAPSDAEVLHLCRSLEVGXVMXLFYSKKSQRPERKXFQVKLEXRQIXWSRGADKIEGAIDIREIKEIRPGKXSRDFDRYQEDPAFRPDQSHCFVILYGMEFRLKXLSLQAXSEDEVNMWIKGLXWLMEDXLQAPXPLQIERWLRKQFYSVDRNREDRISAKDLKNMLSQVNYRVPNMRFLRERLXDLEQRSGDIXYGQFAQLYRSLMYSAQKXMDLPFLEASXLRAGERPELCRVSLPEFQQFLLDYQGELWAVDRLQVQEFMLSFLRDPLREIEEPYFFLDEFVXFLFSKENSVWNSQLDAVCPDXMNNPLSHYWISSSHNXYLXGDQFSSESSLEAYARCLRMGCRCIELDCWDGPDGMPVIYHGHXLXXKIKFSDVLHXIKEHAFVASEYPVILSIEDHCSIAQQRNMAQYFKKVLGDXLLXKPVEISADGLPSPNQLKRKILIKHKKLAEGSAYEEVPXSMMYSENDISNSIKNGILYLEDPVNHEWYPHYFVLXSSKIYYSEEXSSDQGNEDEEEPKEVSSSXELHSNEKWFHGKLGAGRDGRHIAERLLXEYCIEXGAPDGSFLVRESEXFVGDYXLSFWRNGKVQHCRIHSRQDAGXPKFFLXDNLVFDSLYDLIXHYQQVPLRCNEFEMRLSEPVPQXNAHESKEWYHASLXRAQAEHMLMRVPRDGAFLVRKRNEPNSYAISFRAEGKIKHCRVQQEGQXVMLGNSEFDSLVDLISYYEKHPLYRKMKLRYPINEEALEKIGXAEPDYGALYEGRNPGFYVEANPMPXFKCAVKALFDYKAQREDELXFIKSAIIQNVEKQEGGWWRGDYGGKKQLWFPSNYVEEMVNPVALEPEREHLDENSPLGDLLRGVLDVPACQIAIRPEGKNNRLFVFSISMASVAHWSLDVAADSQEELQDWVKKIREVAQXADARLXEGKIMERRKKIALELSELVVYCRPVPFDEEKIGXERACYRDMSSFPEXKAEKYVNKAKGKKFLQYNRLQLSRIYPKGQRLDSSNYDPLPMWICGSQLVALNFQXPDKPMQMNQALFMXGRHCGYVLQPSXMRDEAFDPFDKSSLRGLEPCAISIEVLGARHLPKNGRGIVCPFVEIEVAGAEYDSXKQKXEFVVDNGLNPVWPAKPFHFQISNPEFAFLRFVVYEEDMFSDQNFLAQAXFPVKGLKXGYRAVPLKNNYSEDLELASLLIKIDIFPAKQENGDLSPFSGXSLRERGSDASGQLFHGRAREGSFESRYQQPFEDFRISQEHLADHFDSRERRAPRRXRVNGDNRL

SEQ ID NO: 20437 - protein, 133 aa, Homo sapiens
  MOD_RES (1)..(1): Any amino acid
  MOD_RES (20)..(20): Selenocysteine
  MOD_RES (28)..(28): Selenocysteine
  MOD_RES (69)..(69): Selenocysteine
  MOD_RES (125)..(125): Selenocysteine
XFVVYEEDMFSDQNFLAQAXFPVKGLKXGYRAVPLKNNYSEDLELASLLIKIDIFPAKENGDLSPFSGXSLRERGSDASGQLFHGRAREGSFESRYQQPFEDFRISQEHLADHFDSRERRAPRRXRVNGDNRL

SEQ ID NO: 20438 - protein, 132 aa, Homo sapiens
  MOD_RES (1)..(1): Any amino acid
  MOD_RES (115)..(115): Selenocysteine
XQNVEKQEGGWWRGDYGGKKQLWFPSNYVEEMVNPVALEPEREHLDENSPLGDLLRGVLDVPACQIAIRPEGKNNRLFVFSISMASVAHWSLDVAADSQEELQDWVKKIREVAQXADARDLAAEISGPFQHS

SEQ ID NO: 20439 - protein, 159 aa, Homo sapiens
  MOD_RES (3)..(4): Selenocysteine
  MOD_RES (26)..(26): Selenocysteine
  MOD_RES (29)..(29): Selenocysteine
  MOD_RES (37)..(37): Selenocysteine
  MOD_RES (42)..(42): Selenocysteine
  MOD_RES (49)..(49): Selenocysteine
  MOD_RES (57)..(57): Selenocysteine
  MOD_RES (97)..(97): Selenocysteine
  MOD_RES (102)..(102): Selenocysteine
  MOD_RES (108)..(108): Selenocysteine
  MOD_RES (138)..(138): Selenocysteine
  MOD_RES (140)..(140): Selenocysteine
  MOD_RES (156)..(156): Selenocysteine
MSXXVNVDSLAEYEKSQIKRALELGXVMXVFSFRKSXPERRXVQVIMEXRQVAWSKXADKIEGFLDIMEIKEIRPGKNSKDFERAKAVRQKEDCCFXILYGXQFVLSXLSLAADSKEDAVNWLSGLKILHQEAMNASXPXIIESWLRKQIYSVDQXRRN

SEQ ID NO: 20440 - protein, 1252 aa, Homo sapiens
  MOD_RES (3)..(4): Selenocysteine
  MOD_RES (26)..(26): Selenocysteine
  MOD_RES (29)..(29): Selenocysteine
  MOD_RES (37)..(37): Selenocysteine
  MOD_RES (42)..(42): Selenocysteine
  MOD_RES (49)..(49): Selenocysteine
  MOD_RES (57)..(57): Selenocysteine
  MOD_RES (97)..(97): Selenocysteine
  MOD_RES (102)..(102): Selenocysteine
  MOD_RES (108)..(108): Selenocysteine
  MOD_RES (138)..(138): Selenocysteine
  MOD_RES (140)..(140): Selenocysteine
  MOD_RES (156)..(156): Selenocysteine
  MOD_RES (168)..(168): Selenocysteine
  MOD_RES (233)..(233): Selenocysteine
  MOD_RES (270)..(270): Selenocysteine
  MOD_RES (276)..(276): Selenocysteine
  MOD_RES (280)..(280): Selenocysteine
  MOD_RES (292)..(292): Selenocysteine
  MOD_RES (329)..(329): Selenocysteine
  MOD_RES (332)..(332): Selenocysteine
  MOD_RES (375)..(375): Selenocysteine
  MOD_RES (377)..(378): Selenocysteine
  MOD_RES (396)..(396): Selenocysteine
  MOD_RES (431)..(431): Selenocysteine
  MOD_RES (434)..(434): Selenocysteine
  MOD_RES (492)..(492): Selenocysteine
  MOD_RES (512)..(512): Selenocysteine
  MOD_RES (524)..(524): Selenocysteine
  MOD_RES (541)..(541): Selenocysteine
  MOD_RES (554)..(554): Selenocysteine
  MOD_RES (560)..(560): Selenocysteine
  MOD_RES (568)..(568): Selenocysteine
  MOD_RES (574)..(574): Selenocysteine
  MOD_RES (591)..(591): Selenocysteine
  MOD_RES (596)..(596): Selenocysteine
  MOD_RES (602)..(602): Selenocysteine
  MOD_RES (606)..(606): Selenocysteine
  MOD_RES (620)..(620): Selenocysteine
  MOD_RES (632)..(632): Selenocysteine
  MOD_RES (683)..(683): Selenocysteine
  MOD_RES (706)..(706): Selenocysteine
  MOD_RES (736)..(736): Selenocysteine
  MOD_RES (773)..(773): Selenocysteine
  MOD_RES (813)..(813): Selenocysteine
  MOD_RES (829)..(829): Selenocysteine
  MOD_RES (857)..(857): Selenocysteine
  MOD_RES (890)..(890): Selenocysteine
  MOD_RES (907)..(907): Selenocysteine
  MOD_RES (912)..(912): Selenocysteine
  MOD_RES (940)..(940): Selenocysteine
  MOD_RES (943)..(943): Selenocysteine
  MOD_RES (961)..(961): Selenocysteine
  MOD_RES (983)..(983): Selenocysteine
  MOD_RES (1016)..(1016): Selenocysteine
  MOD_RES (1034)..(1034): Selenocysteine
  MOD_RES (1045)..(1045): Selenocysteine
  MOD_RES (1062)..(1062): Selenocysteine
  MOD_RES (1064)..(1064): Selenocysteine
  MOD_RES (1101)..(1102): Selenocysteine
  MOD_RES (1116)..(1116): Selenocysteine
  MOD_RES (1121)..(1121): Selenocysteine
  MOD_RES (1152)..(1152): Selenocysteine
  MOD_RES (1219)..(1219): Selenocysteine
  MOD_RES (1245)..(1245): Selenocysteine
  MOD_RES (1250)..(1250): Selenocysteine
MSXXVNVDSLAEYEKSQIKRALELGXVMXVFSFRKSXPERRXVQVIMEXRQVAWSKXADKIEGFLDIMEIKEIRPGKNSKDFERAKAVRQKEDCCFXILYGXQFVLSXLSLAADSKEDAVNWLSGLKILHQEAMNASXPXIIESWLRKQIYSVDQXRRNSISLRELKXILPLINFKVSSAKFLKDKFVEIGAHKDELSFEQFHLFYKKLMFEQQKSILDEFKKDSSVFILGNXDRPDASAVYLHDFQRFLIHEQQEHWAQDLNKVRERMXKFIDDXMREXAEPFLFVDEFLXYLFSRENSIWDEKYDAVDMQDMNNPLSHYWISSSHNXYLXGDQLRSESSPEAYIRCLRMGCRCIELDCWDGPDGKPVIYHGWXRXXKIKFDDVVQAIKDHAFVXSSFPVILSIEEHCSVEQQRHMAKAFKEVFGDLLLXKPXEASADQLPSPSQLREKIIIKHKKLGPRGDVDVNMEDKKDEHKQQGELYMWDSIDQKWXRHYCAIADAKLSFSDDIEQXMEEEVPQDIPPXELHFGEKWFHKKVEKRXSAEKLLQEYCMEXGGKDGXFLVRESEXFPNDYXLSFWRSGRVQHCRIRSXMEGGXLKYYLXDNLXFSSIYALIQHYREXHLRCAEFELRLXDPVPNPNPHESKPWYYDSLSRGEAEDMLMRIPRDGAFLIRKREGSDSYAIXFRARGKVKHCRINRDGRHFVLGXSAYFESLVELVSYYEKHSLYRKMRLRYPVXPELLERYNMERDINSLYDVSRMYVDPSEINPSMPQRXVKALYDYKAKRSDELSFCRGALIHNVSKEPGGWWKGDYGXRIQQYFPSNYVEDISXADFEELEKQIIEDNPLGSLCRGILDLNXYNVVKAPQGKNQKSFVFILEPKQQGDPPVEFAXDRVEELFEWFQSIREIXWKIDXKENNMKYWEKNQSIAIELSDLVVYCKPXSKXKDNLENPDFREIRSFVEXKADSIIRQKPVDLLKYNQKGLXRVYPKGQRVDSSNYDPFRLWLCGSQMVALNFQXADKYMQMNHALFSLNGRXGYVLQPESMRXEKYDPMPPESQRKILMXLXVKVLGARHLPKLGRSIACPFVEVEICGAEYDNNKFKXXVVNDNGLSPIWAPXQEKVXFEIYDPNLAFLRFVVYEEDMFSDPNFLAHAXYPIKAVKSGFRSVPLKNGYSEDIELASLLVFCEMRPVLESEEELYSSCRQLRRRQEELNNQLFLYDXHQNLRNANRDALVKEFSVNENQSSCXRRNAXRG

SEQ ID NO: 20441 - protein, 1265 aa, Homo sapiens
  MOD_RES (3)..(4): Selenocysteine
  MOD_RES (26)..(26): Selenocysteine
  MOD_RES (29)..(29): Selenocysteine
  MOD_RES (37)..(37): Selenocysteine
  MOD_RES (42)..(42): Selenocysteine
  MOD_RES (49)..(49): Selenocysteine
  MOD_RES (57)..(57): Selenocysteine
  MOD_RES (97)..(97): Selenocysteine
  MOD_RES (102)..(102): Selenocysteine
  MOD_RES (108)..(108): Selenocysteine
  MOD_RES (138)..(138): Selenocysteine
  MOD_RES (140)..(140): Selenocysteine
  MOD_RES (156)..(156): Selenocysteine
  MOD_RES (168)..(168): Selenocysteine
  MOD_RES (233)..(233): Selenocysteine
  MOD_RES (270)..(270): Selenocysteine
  MOD_RES (276)..(276): Selenocysteine
  MOD_RES (280)..(280): Selenocysteine
  MOD_RES (292)..(292): Selenocysteine
  MOD_RES (329)..(329): Selenocysteine
  MOD_RES (332)..(332): Selenocysteine
  MOD_RES (375)..(375): Selenocysteine
  MOD_RES (377)..(378): Selenocysteine
  MOD_RES (396)..(396): Selenocysteine
  MOD_RES (431)..(431): Selenocysteine
  MOD_RES (434)..(434): Selenocysteine
  MOD_RES (492)..(492): Selenocysteine
  MOD_RES (512)..(512): Selenocysteine
  MOD_RES (524)..(524): Selenocysteine
  MOD_RES (541)..(541): Selenocysteine
  MOD_RES (554)..(554): Selenocysteine
  MOD_RES (560)..(560): Selenocysteine
  MOD_RES (568)..(568): Selenocysteine
  MOD_RES (574)..(574): Selenocysteine
  MOD_RES (591)..(591): Selenocysteine
  MOD_RES (596)..(596): Selenocysteine
  MOD_RES (602)..(602): Selenocysteine
  MOD_RES (606)..(606): Selenocysteine
  MOD_RES (620)..(620): Selenocysteine
  MOD_RES (632)..(632): Selenocysteine
  MOD_RES (683)..(683): Selenocysteine
  MOD_RES (706)..(706): Selenocysteine
  MOD_RES (736)..(736): Selenocysteine
  MOD_RES (773)..(773): Selenocysteine
  MOD_RES (813)..(813): Selenocysteine
  MOD_RES (829)..(829): Selenocysteine
  MOD_RES (857)..(857): Selenocysteine
  MOD_RES (890)..(890): Selenocysteine
  MOD_RES (907)..(907): Selenocysteine
  MOD_RES (912)..(912): Selenocysteine
  MOD_RES (940)..(940): Selenocysteine
  MOD_RES (943)..(943): Selenocysteine
  MOD_RES (961)..(961): Selenocysteine
  MOD_RES (983)..(983): Selenocysteine
  MOD_RES (1016)..(1016): Selenocysteine
  MOD_RES (1034)..(1034): Selenocysteine
  MOD_RES (1045)..(1045): Selenocysteine
  MOD_RES (1062)..(1062): Selenocysteine
  MOD_RES (1064)..(1064): Selenocysteine
  MOD_RES (1101)..(1102): Selenocysteine
  MOD_RES (1116)..(1116): Selenocysteine
  MOD_RES (1121)..(1121): Selenocysteine
  MOD_RES (1152)..(1152): Selenocysteine
  MOD_RES (1219)..(1219): Selenocysteine
MSXXVNVDSLAEYEKSQIKRALELGXVMXVFSFRKSXPERRXVQVIMEXRQVAWSKXADKIEGFLDIMEIKEIRPGKNSKDFERAKAVRQKEDCCFXILYGXQFVLSXLSLAADSKEDAVNWLSGLKILHQEAMNASXPXIIESWLRKQIYSVDQXRRNSISLRELKXILPLINFKVSSAKFLKDKFVEIGAHKDELSFEQFHLFYKKLMFEQQKSILDEFKKDSSVFILGNXDRPDASAVYLHDFQRFLIHEQQEHWAQDLNKVRERMXKFIDDXMREXAEPFLFVDEFLXYLFSRENSIWDEKYDAVDMQDMNNPLSHYWISSSHNXYLXGDQLRSESSPEAYIRCLRMGCRCIELDCWDGPDGKPVIYHGWXRXXKIKFDDVVQAIKDHAFVXSSFPVILSIEEHCSVEQQRHMAKAFKEVFGDLLLXKPXEASADQLPSPSQLREKIIIKHKKLGPRGDVDVNMEDKKDEHKQQGELYMWDSIDQKWXRHYCAIADAKLSFSDDIEQXMEEEVPQDIPPXELHFGEKWFHKKVEKRXSAEKLLQEYCMEXGGKDGXFLVRESEXFPNDYXLSFWRSGRVQHCRIRSXMEGGXLKYYLXDNLXFSSIYALIQHYREXHLRCAEFELRLXDPVPNPNPHESKPWYYDSLSRGEAEDMLMRIPRDGAFLIRKREGSDSYAIXFRARGKVKHCRINRDGRHFVLGXSAYFESLVELVSYYEKHSLYRKMRLRYPVXPELLERYNMERDINSLYDVSRMYVDPSEINPSMPQRXVKALYDYKAKRSDELSFCRGALIHNVSKEPGGWWKGDYGXRIQQYFPSNYVEDISXADFEELEKQIIEDNPLGSLCRGILDLNXYNVVKAPQGKNQKSFVFILEPKQQGDPPVEFAXDRVEELFEWFQSIREIXWKIDXKENNMKYWEKNQSIAIELSDLVVYCKPXSKXKDNLENPDFREIRSFVEXKADSIIRQKPVDLLKYNQKGLXRVYPKGQRVDSSNYDPFRLWLCGSQMVALNFQXADKYMQMNHALFSLNGRXGYVLQPESMRXEKYDPMPPESQRKILMXLXVKVLGARHLPKLGRSIACPFVEVEICGAEYDNNKFKXXVVNDNGLSPIWAPXQEKVXFEIYDPNLAFLRFVVYEEDMFSDPNFLAHAXYPIKAVKSGFRSVPLKNGYSEDIELASLLVFCEMRPVLESEEELYSSCRQLRRRQEELNNQLFLYDXHQNLRNANRDALVKEFSVNENQLQLYQEKCNKRLREKRVSNSKFYS

SEQ ID NO: 20442 - protein, 45 aa, Homo sapiens
  MOD_RES (1)..(1): Any amino acid
  MOD_RES (21)..(21): Selenocysteine
XDMQDMNNPLSHYWISSSHNXGLLGRARWEAGHLPWLDADYQDQV

SEQ ID NO: 20443 - protein, 178 aa, Homo sapiens
  MOD_RES (1)..(1): Any amino acid
  MOD_RES (3)..(3): Selenocysteine
  MOD_RES (40)..(40): Selenocysteine
  MOD_RES (46)..(46): Selenocysteine
  MOD_RES (50)..(50): Selenocysteine
  MOD_RES (62)..(62): Selenocysteine
  MOD_RES (99)..(99): Selenocysteine
  MOD_RES (102)..(102): Selenocysteine
  MOD_RES (145)..(145): Selenocysteine
  MOD_RES (147)..(148): Selenocysteine
  MOD_RES (166)..(166): Selenocysteine
XNXDRPDASAVYLHDFQRFLIHEQQEHWAQDLNKVRERMXKFIDDXMREXAEPFLFVDEFLXYLFSRENSIWDEKYDAVDMQDMNNPLSHYWISSSHNXYLXGDQLRSESSPEAYIRCLRMGCRCIELDCWDGPDGKPVIYHGWXRXXKIKFDDVVQAIKDHAFVXSRCPLSWVEVLL

SEQ ID NO: 20444 - protein, 1002 aa, Homo sapiens
  MOD_RES (26)..(26): Selenocysteine
  MOD_RES (35)..(35): Selenocysteine
  MOD_RES (49)..(49): Selenocysteine
  MOD_RES (73)..(73): Selenocysteine
  MOD_RES (96)..(96): Selenocysteine
  MOD_RES (110)..(110): Selenocysteine
  MOD_RES (118)..(118): Selenocysteine
  MOD_RES (121)..(121): Selenocysteine
  MOD_RES (142)..(142): Selenocysteine
  MOD_RES (150)..(150): Selenocysteine
  MOD_RES (192)..(192): Selenocysteine
  MOD_RES (198)..(198): Selenocysteine
  MOD_RES (200)..(200): Selenocysteine
  MOD_RES (232)..(232): Selenocysteine
  MOD_RES (250)..(251): Selenocysteine
  MOD_RES (279)..(279): Selenocysteine
  MOD_RES (316)..(316): Selenocysteine
  MOD_RES (319)..(319): Selenocysteine
  MOD_RES (362)..(362): Selenocysteine
  MOD_RES (364)..(364): Selenocysteine
  MOD_RES (375)..(375): Selenocysteine
  MOD_RES (423)..(423): Selenocysteine
  MOD_RES (482)..(483): Selenocysteine
  MOD_RES (514)..(514): Selenocysteine
  MOD_RES (522)..(522): Selenocysteine
  MOD_RES (550)..(550): Selenocysteine
  MOD_RES (558)..(559): Selenocysteine
  MOD_RES (568)..(568): Selenocysteine
  MOD_RES (574)..(574): Selenocysteine
  MOD_RES (578)..(578): Selenocysteine
  MOD_RES (594)..(594): Selenocysteine
  MOD_RES (608)..(608): Selenocysteine
  MOD_RES (621)..(622): Selenocysteine
  MOD_RES (631)..(631): Selenocysteine
  MOD_RES (653)..(653): Selenocysteine
  MOD_RES (717)..(717): Selenocysteine
  MOD_RES (779)..(779): Selenocysteine
  MOD_RES (794)..(794): Selenocysteine
  MOD_RES (796)..(796): Selenocysteine
  MOD_RES (798)..(798): Selenocysteine
  MOD_RES (826)..(826): Selenocysteine
  MOD_RES (828)..(828): Selenocysteine
  MOD_RES (845)..(845): Selenocysteine
  MOD_RES (854)..(854): Selenocysteine
  MOD_RES (872)..(872): Selenocysteine
  MOD_RES (880)..(880): Selenocysteine
  MOD_RES (921)..(921): Selenocysteine
  MOD_RES (950)..(950): Selenocysteine
  MOD_RES (960)..(961): Selenocysteine
  MOD_RES (988)..(988): Selenocysteine
MADLEVYKNLSPEKVERCMSVMQSGXQMIKLKRGXKGLVRLFYLDEHRXRLRWRPSRKSEKAKILIDSIYKVXEGRQSEIFHRQAEGNFDPSCCFXIYHGNHMESLDLIXSNPEEARXWIXGLKYLMAGISDEDSLAKRQRXHDQWVKQXFEEADKNGDGLLNIEEIHQLMHKLNVNLPRRKVRQMFQEADXDENQGXLXFEEFCVFYKMMSLRRDLYLLLLSYSDKKDHLXVEELAQFLKVEQKMNNVXXDYCLDIIKKFEVSEENKVKNVLGIEGFXNFMRSPACDIFNPLHHEVYQDMDQPLCNYYIASSHNXYLXGDQLLSQSKVDMYARVLQEGCRCVEVDCWDGPDGEPVVHHGYXLXSKILFRDVVEXINKHAFVKNEFPVILSIENHCSIQQQRKIAQYLKGIFGDKLDLSSVDXGECKQLPSPQSLKGKILVKGKKLPYHLGDDAEEGEVSDEDSADEIEDECKFKLHYSNGXXEHQVESFIRKKLESLLKESQIRDKEDPDSFXVRALLKAXHEGLNAHLKQSPDVKESGKKSHGRSLMXNFGKHKKXXKSRSKSYSXDDEEDXQQSXGKEGGQLYRLGRRRKXMKLCRELSDLVVYXNSVAAQDIVDDGXXGNVLSFSEXRAHQVVQQKSEQFMIYNQKQLXRIYPSAYRIDSSNFNPLPYWNAGCQLVALNYQSEGRMMQLNRAKFKANGNCGYVLKPQQMCKGXFNPFSGDPLPANPKKQLILKVISGQQLPKPPDSMFGDRGEIIDPFVEVEIIGLPVDCCKDQXRVVDDNGFNPVWEEXLXFXVHMPEIALVRFLVWDHDPIGRDFVGQRXVXFSSLVPGYRHVYLEGLXEASIFVHIXINEIYGKWSPLILNPSYXILHFLGAXKNRQLQGLKGLFNKNPRHSSSENNSHYVRKRSIGDRILRRXASAPAKGRKKSKMGFQEMVEIKDSVSEAXRDQDGVLRRXXRSLQARPVSMPVDRNLLGALSLPVSEXAKDIEGKENSLVQI

SEQ ID NO: 20445 - protein, 1014 aa, Homo sapiens
  MOD_RES (26)..(26): Selenocysteine
  MOD_RES (35)..(35): Selenocysteine
  MOD_RES (49)..(49): Selenocysteine
  MOD_RES (73)..(73): Selenocysteine
  MOD_RES (96)..(96): Selenocysteine
  MOD_RES (110)..(110): Selenocysteine
  MOD_RES (118)..(118): Selenocysteine
  MOD_RES (121)..(121): Selenocysteine
  MOD_RES (142)..(142): Selenocysteine
  MOD_RES (150)..(150): Selenocysteine
  MOD_RES (192)..(192): Selenocysteine
  MOD_RES (198)..(198): Selenocysteine
  MOD_RES (200)..(200): Selenocysteine
  MOD_RES (232)..(232): Selenocysteine
  MOD_RES (250)..(251): Selenocysteine
  MOD_RES (279)..(279): Selenocysteine
  MOD_RES (316)..(316): Selenocysteine
  MOD_RES (319)..(319): Selenocysteine
  MOD_RES (362)..(362): Selenocysteine
  MOD_RES (364)..(364): Selenocysteine
  MOD_RES (375)..(375): Selenocysteine
  MOD_RES (423)..(423): Selenocysteine
  MOD_RES (482)..(483): Selenocysteine
  MOD_RES (514)..(514): Selenocysteine
  MOD_RES (522)..(522): Selenocysteine
  MOD_RES (550)..(550): Selenocysteine
  MOD_RES (558)..(559): Selenocysteine
  MOD_RES (568)..(568): Selenocysteine
  MOD_RES (574)..(574): Selenocysteine
  MOD_RES (578)..(578): Selenocysteine
  MOD_RES (594)..(594): Selenocysteine
  MOD_RES (608)..(608): Selenocysteine
  MOD_RES (621)..(622): Selenocysteine
  MOD_RES (631)..(631): Selenocysteine
  MOD_RES (653)..(653): Selenocysteine
  MOD_RES (717)..(717): Selenocysteine
  MOD_RES (779)..(779): Selenocysteine
  MOD_RES (794)..(794): Selenocysteine
  MOD_RES (796)..(796): Selenocysteine
  MOD_RES (798)..(798): Selenocysteine
  MOD_RES (826)..(826): Selenocysteine
  MOD_RES (828)..(828): Selenocysteine
  MOD_RES (845)..(845): Selenocysteine
  MOD_RES (854)..(854): Selenocysteine
  MOD_RES (901)..(901): Selenocysteine
  MOD_RES (930)..(930): Selenocysteine
  MOD_RES (940)..(941): Selenocysteine
  MOD_RES (968)..(968): Selenocysteine
  MOD_RES (987)..(987): Selenocysteine
  MOD_RES (1014)..(1014): Selenocysteine
MADLEVYKNLSPEKVERCMSVMQSGXQMIKLKRGXKGLVRLFYLDEHRXRLRWRPSRKSEKAKILIDSIYKVXEGRQSEIFHRQAEGNFDPSCCFXIYHGNHMESLDLIXSNPEEARXWIXGLKYLMAGISDEDSLAKRQRXHDQWVKQXFEEADKNGDGLLNIEEIHQLMHKLNVNLPRRKVRQMFQEADXDENQGXLXFEEFCVFYKMMSLRRDLYLLLLSYSDKKDHLXVEELAQFLKVEQKMNNVXXDYCLDIIKKFEVSEENKVKNVLGIEGFXNFMRSPACDIFNPLHHEVYQDMDQPLCNYYIASSHNXYLXGDQLLSQSKVDMYARVLQEGCRCVEVDCWDGPDGEPVVHHGYXLXSKILFRDVVEXINKHAFVKNEFPVILSIENHCSIQQQRKIAQYLKGIFGDKLDLSSVDXGECKQLPSPQSLKGKILVKGKKLPYHLGDDAEEGEVSDEDSADEIEDECKFKLHYSNGXXEHQVESFIRKKLESLLKESQIRDKEDPDSFXVRALLKAXHEGLNAHLKQSPDVKESGKKSHGRSLMXNFGKHKKXXKSRSKSYSXDDEEDXQQSXGKEGGQLYRLGRRRKXMKLCRELSDLVVYXNSVAAQDIVDDGXXGNVLSFSEXRAHQVVQQKSEQFMIYNQKQLXRIYPSAYRIDSSNFNPLPYWNAGCQLVALNYQSEGRMMQLNRAKFKANGNCGYVLKPQQMCKGXFNPFSGDPLPANPKKQLILKVISGQQLPKPPDSMFGDRGEIIDPFVEVEIIGLPVDCCKDQXRVVDDNGFNPVWEEXLXFXVHMPEIALVRFLVWDHDPIGRDFVGQRXVXFSSLVPGYRHVYLEGLXEASIFVHIXINEIYGKNRQLQGLKGLFNKNPRHSSSENNSHYVRKRSIGDRILRRXASAPAKGRKKSKMGFQEMVEIKDSVSEAXRDQDGVLRRXXRSLQARPVSMPVDRNLLGALSLPVSEXAKDIEGKENSLDSSFCRPXEQAKAEMCKVPFPRQLECVMKMEISEX

SEQ ID NO: 20446 - protein, 1693 aa, Homo sapiens
  MOD_RES (26)..(26): Selenocysteine
  MOD_RES (35)..(35): Selenocysteine
  MOD_RES (49)..(49): Selenocysteine
  MOD_RES (73)..(73): Selenocysteine
  MOD_RES (96)..(96): Selenocysteine
  MOD_RES (110)..(110): Selenocysteine
  MOD_RES (118)..(118): Selenocysteine
  MOD_RES (121)..(121): Selenocysteine
  MOD_RES (142)..(142): Selenocysteine
  MOD_RES (150)..(150): Selenocysteine
  MOD_RES (192)..(192): Selenocysteine
  MOD_RES (198)..(198): Selenocysteine
  MOD_RES (200)..(200): Selenocysteine
  MOD_RES (232)..(232): Selenocysteine
  MOD_RES (250)..(251): Selenocysteine
  MOD_RES (279)..(279): Selenocysteine
  MOD_RES (316)..(316): Selenocysteine
  MOD_RES (319)..(319): Selenocysteine
  MOD_RES (362)..(362): Selenocysteine
  MOD_RES (364)..(364): Selenocysteine
  MOD_RES (375)..(375): Selenocysteine
  MOD_RES (423)..(423): Selenocysteine
  MOD_RES (482)..(483): Selenocysteine
  MOD_RES (514)..(514): Selenocysteine
  MOD_RES (522)..(522): Selenocysteine
  MOD_RES (550)..(550): Selenocysteine
  MOD_RES (558)..(559): Selenocysteine
  MOD_RES (568)..(568): Selenocysteine
  MOD_RES (574)..(574): Selenocysteine
  MOD_RES (578)..(578): Selenocysteine
  MOD_RES (594)..(594): Selenocysteine
  MOD_RES (608)..(608): Selenocysteine
  MOD_RES (621)..(622): Selenocysteine
  MOD_RES (631)..(631): Selenocysteine
  MOD_RES (653)..(653): Selenocysteine
  MOD_RES (717)..(717): Selenocysteine
  MOD_RES (779)..(779): Selenocysteine
  MOD_RES (794)..(794): Selenocysteine
  MOD_RES (796)..(796): Selenocysteine
  MOD_RES (798)..(798): Selenocysteine
  MOD_RES (826)..(826): Selenocysteine
  MOD_RES (828)..(828): Selenocysteine
  MOD_RES (845)..(845): Selenocysteine
  MOD_RES (854)..(854): Selenocysteine
  MOD_RES (872)..(872): Selenocysteine
  MOD_RES (880)..(880): Selenocysteine
  MOD_RES (921)..(921): Selenocysteine
  MOD_RES (950)..(950): Selenocysteine
  MOD_RES (960)..(961): Selenocysteine
  MOD_RES (988)..(988): Selenocysteine
  MOD_RES (1037)..(1037): Selenocysteine
  MOD_RES (1042)..(1042): Selenocysteine
  MOD_RES (1046)..(1046): Selenocysteine
  MOD_RES (1052)..(1052): Selenocysteine
  MOD_RES (1066)..(1067): Selenocysteine
  MOD_RES (1071)..(1071): Selenocysteine
  MOD_RES (1099)..(1099): Selenocysteine
  MOD_RES (1149)..(1149): Selenocysteine
  MOD_RES (1169)..(1169): Selenocysteine
  MOD_RES (1185)..(1185): Selenocysteine
  MOD_RES (1187)..(1187): Selenocysteine
  MOD_RES (1206)..(1206): Selenocysteine
  MOD_RES (1212)..(1212): Selenocysteine
  MOD_RES (1220)..(1220): Selenocysteine
  MOD_RES (1266)..(1267): Selenocysteine
  MOD_RES (1271)..(1271): Selenocysteine
  MOD_RES (1273)..(1273): Selenocysteine
  MOD_RES (1277)..(1278): Selenocysteine
  MOD_RES (1280)..(1280): Selenocysteine
  MOD_RES (1285)..(1285): Selenocysteine
  MOD_RES (1297)..(1297): Selenocysteine
  MOD_RES (1310)..(1310): Selenocysteine
  MOD_RES (1320)..(1320): Selenocysteine
  MOD_RES (1327)..(1327): Selenocysteine
  MOD_RES (1340)..(1340): Selenocysteine
  MOD_RES (1349)..(1349): Selenocysteine
  MOD_RES (1372)..(1373): Selenocysteine
  MOD_RES (1381)..(1381): Selenocysteine
  MOD_RES (1412)..(1412): Selenocysteine
  MOD_RES (1429)..(1429): Selenocysteine
  MOD_RES (1457)..(1457): Selenocysteine
  MOD_RES (1499)..(1499): Selenocysteine
  MOD_RES (1520)..(1521): Selenocysteine
  MOD_RES (1530)..(1530): Selenocysteine
  MOD_RES (1533)..(1533): Selenocysteine
  MOD_RES (1543)..(1543): Selenocysteine
  MOD_RES (1623)..(1623): Selenocysteine
  MOD_RES (1631)..(1631): Selenocysteine
  MOD_RES (1642)..(1642): Selenocysteine
  MOD_RES (1658)..(1658): Selenocysteine
  MOD_RES (1677)..(1677): Selenocysteine
MADLEVYKNLSPEKVERCMSVMQSGXQMIKLKRGXKGLVRLFYLDEHRXRLRWRPSRKSEKAKILIDSIYKVXEGRQSEIFHRQAEGNFDPSCCFXIYHGNHMESLDLIXSNPEEARXWIXGLKYLMAGISDEDSLAKRQRXHDQWVKQXFEEADKNGDGLLNIEEIHQLMHKLNVNLPRRKVRQMFQEADXDENQGXLXFEEFCVFYKMMSLRRDLYLLLLSYSDKKDHLXVEELAQFLKVEQKMNNVXXDYCLDIIKKFEVSEENKVKNVLGIEGFXNFMRSPACDIFNPLHHEVYQDMDQPLCNYYIASSHNXYLXGDQLLSQSKVDMYARVLQEGCRCVEVDCWDGPDGEPVVHHGYXLXSKILFRDVVEXINKHAFVKNEFPVILSIENHCSIQQQRKIAQYLKGIFGDKLDLSSVDXGECKQLPSPQSLKGKILVKGKKLPYHLGDDAEEGEVSDEDSADEIEDECKFKLHYSNGXXEHQVESFIRKKLESLLKESQIRDKEDPDSFXVRALLKAXHEGLNAHLKQSPDVKESGKKSHGRSLMXNFGKHKKXXKSRSKSYSXDDEEDXQQSXGKEGGQLYRLGRRRKXMKLCRELSDLVVYXNSVAAQDIVDDGXXGNVLSFSEXRAHQVVQQKSEQFMIYNQKQLXRIYPSAYRIDSSNFNPLPYWNAGCQLVALNYQSEGRMMQLNRAKFKANGNCGYVLKPQQMCKGXFNPFSGDPLPANPKKQLILKVISGQQLPKPPDSMFGDRGEIIDPFVEVEIIGLPVDCCKDQXRVVDDNGFNPVWEEXLXFXVHMPEIALVRFLVWDHDPIGRDFVGQRXVXFSSLVPGYRHVYLEGLXEASIFVHIXINEIYGKWSPLILNPSYXILHFLGAXKNRQLQGLKGLFNKNPRHSSSENNSHYVRKRSIGDRILRRXASAPAKGRKKSKMGFQEMVEIKDSVSEAXRDQDGVLRRXXRSLQARPVSMPVDRNLLGALSLPVSEXAKDIEGKENSLAEDKDGRRKGKASIKDPHFLNFNKKLSSSSSALLHKDXSQGDXIVSXAHMSVXGEQLGMSSPRGGRXXSNAXSNCQENPCPSKSLSPKQHLAPDPVVNPXQDLHGVKIKEKGNPEDFVEGKSILSGSVLSHSNLEIKNLEGNRGKGRAAXSFSLSDVSMLCSDIPDLHSXAILQESVISHLIDNVXLXNENEPGSSISALIGQFDEXNNQALXVVSHLHNXSVMSGHCPLPSLGLKMPIKHGFCKGKSKSSFLCSSPELIALSSSEXXKHAXNXVYEXXCXPISKXKPDDDLSSKAKXAALESNLPGSPNXSRGWLPKSPXKGEDWEXLKSCSPASSPDLXLEDVIADPXLCFNSGESSLVEIDGESENLSLXXCEYRREGXSQLASPLKLKYNQGVVEHFQRGLRNGYCKEXLRPSVPEIFNNIQDVKXQSISYLAYQGAGFVHNHFSDSDAKMFQXCVPQQSSAQDMHVPVPKQLAHLPLPALKLPSPCKSKSLGDLXSEDIACNFESKYQCISKSFVXXGIRDKKGVXVKXKSLEPIDALXEQLRKLVSFDQEDNCQVLYSKQDANQLPRALVRKLSSRSQSRVRNIASRAKEKQEANKQKVPNPSNGAGVVLRNKPSAPXPAVNRHSXGSYIAGYLKNXKGGGLEGRGIPEGACXALHYGHVDQFCSDNSVLQXEPSSDDKPEIYFLLRL

SEQ ID NO: 20447 - protein, 1655 aa, Homo sapiens
  MOD_RES (8)..(8): Selenocysteine
  MOD_RES (17)..(17): Selenocysteine
  MOD_RES (31)..(31): Selenocysteine
  MOD_RES (55)..(55): Selenocysteine
  MOD_RES (78)..(78): Selenocysteine
  MOD_RES (92)..(92): Selenocysteine
  MOD_RES (100)..(100): Selenocysteine
  MOD_RES (103)..(103): Selenocysteine
  MOD_RES (124)..(124): Selenocysteine
  MOD_RES (132)..(132): Selenocysteine
  MOD_RES (174)..(174): Selenocysteine
  MOD_RES (180)..(180): Selenocysteine
  MOD_RES (182)..(182): Selenocysteine
  MOD_RES (214)..(214): Selenocysteine
  MOD_RES (232)..(233): Selenocysteine
  MOD_RES (261)..(261): Selenocysteine
  MOD_RES (298)..(298): Selenocysteine
  MOD_RES (301)..(301): Selenocysteine
  MOD_RES (344)..(344): Selenocysteine
  MOD_RES (346)..(346): Selenocysteine
  MOD_RES (357)..(357): Selenocysteine
  MOD_RES (405)..(405): Selenocysteine
  MOD_RES (464)..(465): Selenocysteine
  MOD_RES (496)..(496): Selenocysteine
  MOD_RES (504)..(504): Selenocysteine
  MOD_RES (532)..(532): Selenocysteine
  MOD_RES (540)..(541): Selenocysteine
  MOD_RES (550)..(550): Selenocysteine
  MOD_RES (556)..(556): Selenocysteine
  MOD_RES (560)..(560): Selenocysteine
  MOD_RES (576)..(576): Selenocysteine
  MOD_RES (590)..(590): Selenocysteine
  MOD_RES (603)..(604): Selenocysteine
  MOD_RES (613)..(613): Selenocysteine
  MOD_RES (635)..(635): Selenocysteine
  MOD_RES (699)..(699): Selenocysteine
  MOD_RES (761)..(761): Selenocysteine
  MOD_RES (776)..(776): Selenocysteine
  MOD_RES (778)..(778): Selenocysteine
  MOD_RES (780)..(780): Selenocysteine
  MOD_RES (808)..(808): Selenocysteine
  MOD_RES (810)..(810): Selenocysteine
  MOD_RES (827)..(827): Selenocysteine
  MOD_RES (836)..(836): Selenocysteine
  MOD_RES (883)..(883): Selenocysteine
  MOD_RES (912)..(912): Selenocysteine
  MOD_RES (922)..(923): Selenocysteine
  MOD_RES (950)..(950): Selenocysteine
  MOD_RES (999)..(999): Selenocysteine
  MOD_RES (1004)..(1004): Selenocysteine
  MOD_RES (1008)..(1008): Selenocysteine
  MOD_RES (1014)..(1014): Selenocysteine
  MOD_RES (1028)..(1029): Selenocysteine
  MOD_RES (1033)..(1033): Selenocysteine
  MOD_RES (1061)..(1061): Selenocysteine
  MOD_RES (1111)..(1111): Selenocysteine
  MOD_RES (1131)..(1131): Selenocysteine
  MOD_RES (1147)..(1147): Selenocysteine
  MOD_RES (1149)..(1149): Selenocysteine
  MOD_RES (1168)..(1168): Selenocysteine
  MOD_RES (1174)..(1174): Selenocysteine
  MOD_RES (1182)..(1182): Selenocysteine
  MOD_RES (1228)..(1229): Selenocysteine
  MOD_RES (1233)..(1233): Selenocysteine
  MOD_RES (1235)..(1235): Selenocysteine
  MOD_RES (1239)..(1240): Selenocysteine
  MOD_RES (1242)..(1242): Selenocysteine
  MOD_RES (1247)..(1247): Selenocysteine
  MOD_RES (1259)..(1259): Selenocysteine
  MOD_RES (1272)..(1272): Selenocysteine
  MOD_RES (1282)..(1282): Selenocysteine
  MOD_RES (1289)..(1289): Selenocysteine
  MOD_RES (1302)..(1302): Selenocysteine
  MOD_RES (1311)..(1311): Selenocysteine
  MOD_RES (1334)..(1335): Selenocysteine
  MOD_RES (1343)..(1343): Selenocysteine
  MOD_RES (1374)..(1374): Selenocysteine
  MOD_RES (1391)..(1391): Selenocysteine
  MOD_RES (1419)..(1419): Selenocysteine
  MOD_RES (1461)..(1461): Selenocysteine
  MOD_RES (1482)..(1483): Selenocysteine
  MOD_RES (1492)..(1492): Selenocysteine
  MOD_RES (1495)..(1495): Selenocysteine
  MOD_RES (1505)..(1505): Selenocysteine
  MOD_RES (1585)..(1585): Selenocysteine
  MOD_RES (1593)..(1593): Selenocysteine
  MOD_RES (1604)..(1604): Selenocysteine
  MOD_RES (1620)..(1620): Selenocysteine
  MOD_RES (1639)..(1639): Selenocysteine
MSVMQSGXQMIKLKRGXKGLVRLFYLDEHRXRLRWRPSRKSEKAKILIDSIYKVXEGRQSEIFHRQAEGNFDPSCCFXIYHGNHMESLDLIXSNPEEARXWIXGLKYLMAGISDEDSLAKRQRXHDQWVKQXFEEADKNGDGLLNIEEIHQLMHKLNVNLPRRKVRQMFQEADXDENQGXLXFEEFCVFYKMMSLRRDLYLLLLSYSDKKDHLXVEELAQFLKVEQKMNNVXXDYCLDIIKKFEVSEENKVKNVLGIEGFXNFMRSPACDIFNPLHHEVYQDMDQPLCNYYIASSHNXYLXGDQLLSQSKVDMYARVLQEGCRCVEVDCWDGPDGEPVVHHGYXLXSKILFRDVVEXINKHAFVKNEFPVILSIENHCSIQQQRKIAQYLKGIFGDKLDLSSVDXGECKQLPSPQSLKGKILVKGKKLPYHLGDDAEEGEVSDEDSADEIEDECKFKLHYSNGXXEHQVESFIRKKLESLLKESQIRDKEDPDSFXVRALLKAXHEGLNAHLKQSPDVKESGKKSHGRSLMXNFGKHKKXXKSRSKSYSXDDEEDXQQSXGKEGGQLYRLGRRRKXMKLCRELSDLVVYXNSVAAQDIVDDGXXGNVLSFSEXRAHQVVQQKSEQFMIYNQKQLXRIYPSAYRIDSSNFNPLPYWNAGCQLVALNYQSEGRMMQLNRAKFKANGNCGYVLKPQQMCKGXFNPFSGDPLPANPKKQLILKVISGQQLPKPPDSMFGDRGEIIDPFVEVEIIGLPVDCCKDQXRVVDDNGFNPVWEEXLXFXVHMPEIALVRFLVWDHDPIGRDFVGQRXVXFSSLVPGYRHVYLEGLXEASIFVHIXINEIYGKNRQLQGLKGLFNKNPRHSSSENNSHYVRKRSIGDRILRRXASAPAKGRKKSKMGFQEMVEIKDSVSEAXRDQDGVLRRXXRSLQARPVSMPVDRNLLGALSLPVSEXAKDIEGKENSLAEDKDGRRKGKASIKDPHFLNFNKKLSSSSSALLHKDXSQGDXIVSXAHMSVXGEQLGMSSPRGGRXXSNAXSNCQENPCPSKSLSPKQHLAPDPVVNPXQDLHGVKIKEKGNPEDFVEGKSILSGSVLSHSNLEIKNLEGNRGKGRAAXSFSLSDVSMLCSDIPDLHSXAILQESVISHLIDNVXLXNENEPGSSISALIGQFDEXNNQALXVVSHLHNXSVMSGHCPLPSLGLKMPIKHGFCKGKSKSSFLCSSPELIALSSSEXXKHAXNXVYEXXCXPISKXKPDDDLSSKAKXAALESNLPGSPNXSRGWLPKSPXKGEDWEXLKSCSPASSPDLXLEDVIADPXLCFNSGESSLVEIDGESENLSLXXCEYRREGXSQLASPLKLKYNQGVVEHFQRGLRNGYCKEXLRPSVPEIFNNIQDVKXQSISYLAYQGAGFVHNHFSDSDAKMFQXCVPQQSSAQDMHVPVPKQLAHLPLPALKLPSPCKSKSLGDLXSEDIACNFESKYQCISKSFVXXGIRDKKGVXVKXKSLEPIDALXEQLRKLVSFDQEDNCQVLYSKQDANQLPRALVRKLSSRSQSRVRNIASRAKEKQEANKQKVPNPSNGAGVVLRNKPSAPXPAVNRHSXGSYIAGYLKNXKGGGLEGRGIPEGACXALHYGHVDQFCSDNSVLQXEPSSDDKPEIYFLLRL

SEQ ID NO: 20448 - protein, 1129 aa, Homo sapiens
  MOD_RES (111)..(111): Selenocysteine
  MOD_RES (118)..(118): Selenocysteine
  MOD_RES (121)..(121): Selenocysteine
  MOD_RES (142)..(142): Selenocysteine
  MOD_RES (150)..(150): Selenocysteine
  MOD_RES (192)..(192): Selenocysteine
  MOD_RES (198)..(198): Selenocysteine
  MOD_RES (213)..(213): Selenocysteine
  MOD_RES (223)..(223): Selenocysteine
  MOD_RES (250)..(250): Selenocysteine
  MOD_RES (279)..(279): Selenocysteine
  MOD_RES (282)..(282): Selenocysteine
  MOD_RES (302)..(302): Selenocysteine
  MOD_RES (311)..(311): Selenocysteine
  MOD_RES (316)..(316): Selenocysteine
  MOD_RES (362)..(362): Selenocysteine
  MOD_RES (364)..(364): Selenocysteine
  MOD_RES (375)..(375): Selenocysteine
  MOD_RES (409)..(409): Selenocysteine
  MOD_RES (427)..(428): Selenocysteine
  MOD_RES (481)..(481): Selenocysteine
  MOD_RES (489)..(489): Selenocysteine
  MOD_RES (516)..(516): Selenocysteine
  MOD_RES (587)..(587): Selenocysteine
  MOD_RES (592)..(592): Selenocysteine
  MOD_RES (606)..(606): Selenocysteine
  MOD_RES (611)..(611): Selenocysteine
  MOD_RES (630)..(630): Selenocysteine
  MOD_RES (778)..(778): Selenocysteine
  MOD_RES (789)..(789): Selenocysteine
  MOD_RES (793)..(793): Selenocysteine
  MOD_RES (825)..(825): Selenocysteine
  MOD_RES (902)..(902): Selenocysteine
  MOD_RES (907)..(907): Selenocysteine
  MOD_RES (924)..(924): Selenocysteine
  MOD_RES (927)..(927): Selenocysteine
  MOD_RES (991)..(991): Selenocysteine
  MOD_RES (1005)..(1005): Selenocysteine
MEEPGPPGGLSQDQVERCMGAMQEGMQMVKLRGGSKGLVRFYYLDEHRSCIRWRPSRKNEKAKISIDSIQEVSEGRQSEVFQRYPDGSFDPNCCFSIYHGSHRESLDLVSXSSEVARXWVXGLRYLMAGISDEDSLARRQRXRDQWLKQXFDEADKNGDGSLSIGEVLQLLHKLNVNLPRQRVKQMFREADXDDHQGXLGFEEFCAFYKMMSXRRDLYLLMLXYSNHKDHLDAASLQRFLQVEQKMAGVXLESCQDIIEQFEPCPENKSKGLLGIDGFXNYXRSPAGDIFNPEHHHVHQDMXQPLSHYFIXSSHNXYLVGDQLMSQSRVDMYAWVLQAGCRCVEVDCWDGPDGEPIVHHGYXLXSKILFKDVIEXINKYAFIKNEYPVILSIENHCSVIQQKKMAQYLXDILGDKLDLSSVSSEDAXXLPSPQMLKGKILVKGKKLPANISEDAEEGEVSDEDSADEIDDDCKLLNGDASXNRKRVENXAKRKLDSLIKESKIRDCEDPNNFSVSXLSPSGKLGRKSKAEEDVESGEDAGASRRNGRLVVGSFSRRKKKGSKLKKAASVEEGDEGQDSPGGQSRGAXRQKKXMKLSRALSDLVKYXKSVAXHDIEMEAASSWQVSSFSEXKAHQILQQKPAQYLRFNQQQLSRIYPSSYRVDSSNYNPQPFWNAGCQMVALNYQSEGRMLQLNRAKFSANGGCGYVLKPGCMCQGVFNPNSEDPLPGQLKKQLVLRIISGQQLPKPRDSMLGDRGEIIDPFVEVEIIGLPVDCSREQXRVVDDNGFNPXWEEXLVFMVHMPEIALVRFLVWDHDPIGRDFIGQRXLAFSSMMPGYRHVYLEGMEEASIFVHVAVSDISGKVKQALGLKGLFLRGPKPGSLDSHAAGRPPARPSVSQRILRRXASAPXKSQKPGRRGFPELVLGXRDXGSKGVADDVVPPGPGPAPEAPAQEGPGSGSPRGKAPAAVAEKSPVRVRPPRVLDGPGPAGMAAXCMKCVVGSCAGVNXGGLQRERPPSPGPASRQAAIRQQPRARADSLGAPCCGLDPHAIPGRSREAPKGPGAWRQGPGGSGSMSSDSSSPDSPGIPERSPRWPEGACRQPGALQGEMSALFAQKLEEIRSKSPMFSAVRN

SEQ ID NO: 20449 - protein, 111 aa, Homo sapiens
  MOD_RES (6)..(6): Selenocysteine
MMAPPXAGPLPGPALPPEDPGPDPESRWLFLSANILPVVERCMGAMQEGMQMVKLRGGSKGLVRFYYLDEHRSCIRWRPSRKNEKAKISIDSIQEVSEGRQSEVFQRYPDG

SEQ ID NO: 20450 - protein, 1416 aa, Homo sapiens
  MOD_RES (12)..(12): Selenocysteine
  MOD_RES (15)..(15): Selenocysteine
  MOD_RES (138)..(138): Selenocysteine
  MOD_RES (145)..(145): Selenocysteine
  MOD_RES (148)..(148): Selenocysteine
  MOD_RES (169)..(169): Selenocysteine
  MOD_RES (177)..(177): Selenocysteine
  MOD_RES (219)..(219): Selenocysteine
  MOD_RES (225)..(225): Selenocysteine
  MOD_RES (240)..(240): Selenocysteine
  MOD_RES (250)..(250): Selenocysteine
  MOD_RES (277)..(277): Selenocysteine
  MOD_RES (306)..(306): Selenocysteine
  MOD_RES (309)..(309): Selenocysteine
  MOD_RES (329)..(329): Selenocysteine
  MOD_RES (338)..(338): Selenocysteine
  MOD_RES (343)..(343): Selenocysteine
  MOD_RES (389)..(389): Selenocysteine
  MOD_RES (391)..(391): Selenocysteine
  MOD_RES (402)..(402): Selenocysteine
  MOD_RES (436)..(436): Selenocysteine
  MOD_RES (454)..(455): Selenocysteine
  MOD_RES (508)..(508): Selenocysteine
  MOD_RES (516)..(516): Selenocysteine
  MOD_RES (543)..(543): Selenocysteine
  MOD_RES (614)..(614): Selenocysteine
  MOD_RES (619)..(619): Selenocysteine
  MOD_RES (633)..(633): Selenocysteine
  MOD_RES (638)..(638): Selenocysteine
  MOD_RES (657)..(657): Selenocysteine
  MOD_RES (805)..(805): Selenocysteine
  MOD_RES (816)..(816): Selenocysteine
  MOD_RES (820)..(820): Selenocysteine
  MOD_RES (852)..(852): Selenocysteine
  MOD_RES (929)..(929): Selenocysteine
  MOD_RES (934)..(934): Selenocysteine
  MOD_RES (951)..(951): Selenocysteine
  MOD_RES (954)..(954): Selenocysteine
  MOD_RES (988)..(988): Selenocysteine
  MOD_RES (993)..(993): Selenocysteine
  MOD_RES (1005)..(1005): Selenocysteine
  MOD_RES (1024)..(1024): Selenocysteine
  MOD_RES (1035)..(1035): Selenocysteine
  MOD_RES (1048)..(1048): Selenocysteine
  MOD_RES (1076)..(1076): Selenocysteine
  MOD_RES (1084)..(1084): Selenocysteine
  MOD_RES (1102)..(1102): Selenocysteine
  MOD_RES (1125)..(1125): Selenocysteine
  MOD_RES (1154)..(1154): Selenocysteine
  MOD_RES (1198)..(1198): Selenocysteine
  MOD_RES (1209)..(1209): Selenocysteine
  MOD_RES (1261)..(1261): Selenocysteine
  MOD_RES (1286)..(1286): Selenocysteine
  MOD_RES (1298)..(1298): Selenocysteine
  MOD_RES (1300)..(1300): Selenocysteine
  MOD_RES (1307)..(1307): Selenocysteine
  MOD_RES (1316)..(1316): Selenocysteine
  MOD_RES (1319)..(1319): Selenocysteine
  MOD_RES (1378)..(1378): Selenocysteine
MSGPWPSPDSRXKGXVAWLAEVLLWVGGSVVLSSEWQLGPLVERCMGAMQEGMQMVKLRGGSKGLVRFYYLDEHRSCIRWRPSRKNEKAKISIDSIQEVSEGRQSEVFQRYPDGSFDPNCCFSIYHGSHRESLDLVSXSSEVARXWVXGLRYLMAGISDEDSLARRQRXRDQWLKQXFDEADKNGDGSLSIGEVLQLLHKLNVNLPRQRVKQMFREADXDDHQGXLGFEEFCAFYKMMSXRRDLYLLMLXYSNHKDHLDAASLQRFLQVEQKMAGVXLESCQDIIEQFEPCPENKSKGLLGIDGFXNYXRSPAGDIFNPEHHHVHQDMXQPLSHYFIXSSHNXYLVGDQLMSQSRVDMYAWVLQAGCRCVEVDCWDGPDGEPIVHHGYXLXSKILFKDVIEXINKYAFIKNEYPVILSIENHCSVIQQKKMAQYLXDILGDKLDLSSVSSEDAXXLPSPQMLKGKILVKGKKLPANISEDAEEGEVSDEDSADEIDDDCKLLNGDASXNRKRVENXAKRKLDSLIKESKIRDCEDPNNFSVSXLSPSGKLGRKSKAEEDVESGEDAGASRRNGRLVVGSFSRRKKKGSKLKKAASVEEGDEGQDSPGGQSRGAXRQKKXMKLSRALSDLVKYXKSVAXHDIEMEAASSWQVSSFSEXKAHQILQQKPAQYLRFNQQQLSRIYPSSYRVDSSNYNPQPFWNAGCQMVALNYQSEGRMLQLNRAKFSANGGCGYVLKPGCMCQGVFNPNSEDPLPGQLKKQLVLRIISGQQLPKPRDSMLGDRGEIIDPFVEVEIIGLPVDCSREQXRVVDDNGFNPXWEEXLVFMVHMPEIALVRFLVWDHDPIGRDFIGQRXLAFSSMMPGYRHVYLEGMEEASIFVHVAVSDISGKVKQALGLKGLFLRGPKPGSLDSHAAGRPPARPSVSQRILRRXASAPXKSQKPGRRGFPELVLGXRDXGSKGVADDVVPPGPGPAPEAPAQEGPGSGSPRDXRPLSXQRPLPPLCSLEXIAEEPAPGPGPPPPAAVPXSSSQGRPPYPXGPGANVASPLEDXEEPRDSRPRPCNGEGAGGAYERAPGSQXDGRSQPRXLGHLPVIRRVKSEGQVPXEPLGGWRPLAAPFPAPAVYSDAXGSDPLWQRLEPCGHRDSVSSSSSMSSSDXVIDLSLPSLGLGRSRENLAGAHMGRLPPRPHSASAARPDLPPVXKSKSNPNLRAXGQRPPIPDELQPRSLAPRMAGLPFRPPWGCLSLVGVQDCPVAAKSKSLGDLXADDFAPSFEGGSRRLSHSLGLPGGXRRVSGPGVRRDXLXEQLRWLXVFQQAGDIXSPXSLGPAGEGVAGGPGFVRRSSSRSHSRVRAIASRARQAQERQQRLQGLGRQGPPEEERGXPEGACSVGHEGSVDAPAPSKGALGPASAAAENLVLLRL

SEQ ID NO: 20451 - protein, 1239 aa, Homo sapiens
  MOD_RES (1)..(1): Any amino acid
  MOD_RES (4)..(4): Selenocysteine
  MOD_RES (7)..(7): Selenocysteine
  MOD_RES (28)..(28): Selenocysteine
  MOD_RES (36)..(36): Selenocysteine
  MOD_RES (78)..(78): Selenocysteine
  MOD_RES (84)..(84): Selenocysteine
  MOD_RES (99)..(99): Selenocysteine
  MOD_RES (109)..(109): Selenocysteine
  MOD_RES (136)..(136): Selenocysteine
  MOD_RES (165)..(165): Selenocysteine
  MOD_RES (168)..(168): Selenocysteine
  MOD_RES (188)..(188): Selenocysteine
  MOD_RES (197)..(197): Selenocysteine
  MOD_RES (202)..(202): Selenocysteine
  MOD_RES (248)..(248): Selenocysteine
  MOD_RES (250)..(250): Selenocysteine
  MOD_RES (261)..(261): Selenocysteine
  MOD_RES (295)..(295): Selenocysteine
  MOD_RES (313)..(314): Selenocysteine
  MOD_RES (367)..(367): Selenocysteine
  MOD_RES (375)..(375): Selenocysteine
  MOD_RES (402)..(402): Selenocysteine
  MOD_RES (473)..(473): Selenocysteine
  MOD_RES (478)..(478): Selenocysteine
  MOD_RES (492)..(492): Selenocysteine
  MOD_RES (497)..(497): Selenocysteine
  MOD_RES (516)..(516): Selenocysteine
  MOD_RES (628)..(628): Selenocysteine
  MOD_RES (639)..(639): Selenocysteine
  MOD_RES (643)..(643): Selenocysteine
  MOD_RES (675)..(675): Selenocysteine
  MOD_RES (752)..(752): Selenocysteine
  MOD_RES (757)..(757): Selenocysteine
  MOD_RES (774)..(774): Selenocysteine
  MOD_RES (777)..(777): Selenocysteine
  MOD_RES (811)..(811): Selenocysteine
  MOD_RES (816)..(816): Selenocysteine
  MOD_RES (828)..(828): Selenocysteine
  MOD_RES (847)..(847): Selenocysteine
  MOD_RES (858)..(858): Selenocysteine
  MOD_RES (871)..(871): Selenocysteine
  MOD_RES (899)..(899): Selenocysteine
  MOD_RES (907)..(907): Selenocysteine
  MOD_RES (925)..(925): Selenocysteine
  MOD_RES (948)..(948): Selenocysteine
  MOD_RES (977)..(977): Selenocysteine
  MOD_RES (1021)..(1021): Selenocysteine
  MOD_RES (1032)..(1032): Selenocysteine
  MOD_RES (1084)..(1084): Selenocysteine
  MOD_RES (1109)..(1109): Selenocysteine
  MOD_RES (1121)..(1121): Selenocysteine
  MOD_RES (1123)..(1123): Selenocysteine
  MOD_RES (1130)..(1130): Selenocysteine
  MOD_RES (1139)..(1139): Selenocysteine
  MOD_RES (1142)..(1142): Selenocysteine
  MOD_RES (1201)..(1201): Selenocysteine
XARXWVXGLRYLMAGISDEDSLARRQRXRDQWLKQXFDEADKNGDGSLSIGEVLQLLHKLNVNLPRQRVKQMFREADXDDHQGXLGFEEFCAFYKMMSXRRDLYLLMLXYSNHKDHLDAASLQRFLQVEQKMAGVXLESCQDIIEQFEPCPENKSKGLLGIDGFXNYXRSPAGDIFNPEHHHVHQDMXQPLSHYFIXSSHNXYLVGDQLMSQSRVDMYAWVLQAGCRCVEVDCWDGPDGEPIVHHGYXLXSKILFKDVIEXINKYAFIKNEYPVILSIENHCSVIQQKKMAQYLXDILGDKLDLSSVSSEDAXXLPSPQMLKGKILVKGKKLPANISEDAEEGEVSDEDSADEIDDDCKLLNGDASXNRKRVENXAKRKLDSLIKESKIRDCEDPNNFSVSXLSPSGKLGRKSKAEEDVESGEDAGASRRNGRLVVGSFSRRKKKGSKLKKAASVEEGDEGQDSPGGQSRGAXRQKKXMKLSRALSDLVKYXKSVAXHDIEMEAASSWQVSSFSEXKAHQILQQKPAQYLRFNQQQLSRIYPSSYRVDSSNYNPQPFWNAGCQMGVFNPNSEDPLPGQLKKQLVLRIISGQQLPKPRDSMLGDRGEIIDPFVEVEIIGLPVDCSREQXRVVDDNGFNPXWEEXLVFMVHMPEIALVRFLVWDHDPIGRDFIGQRXLAFSSMMPGYRHVYLEGMEEASIFVHVAVSDISGKVKQALGLKGLFLRGPKPGSLDSHAAGRPPARPSVSQRILRRXASAPXKSQKPGRRGFPELVLGXRDXGSKGVADDVVPPGPGPAPEAPAQEGPGSGSPRDXRPLSXQRPLPPLCSLEXIAEEPAPGPGPPPPAAVPXSSSQGRPPYPXGPGANVASPLEDXEEPRDSRPRPCNGEGAGGAYERAPGSQXDGRSQPRXLGHLPVIRRVKSEGQVPXEPLGGWRPLAAPFPAPAVYSDAXGSDPLWQRLEPCGHRDSVSSSSSMSSSDXVIDLSLPSLGLGRSRENLAGAHMGRLPPRPHSASAARPDLPPVXKSKSNPNLRAXGQRPPIPDELQPRSLAPRMAGLPFRPPWGCLSLVGVQDCPVAAKSKSLGDLXADDFAPSFEGGSRRLSHSLGLPGGXRRVSGPGVRRDXLXEQLRWLXVFQQAGDIXSPXSLGPAGEGVAGGPGFVRRSSSRSHSRVRAIASRARQAQERQQRLQGLGRQGPPEEERGXPEGACSVGHEGSVDAPAPSKGALGPASAAAENLVLLRL

SEQ ID NO: 20452 - protein, 1018 aa, Homo sapiens
  MOD_RES (16)..(16): Selenocysteine
  MOD_RES (59)..(59): Selenocysteine
  MOD_RES (62)..(62): Selenocysteine
  MOD_RES (95)..(95): Selenocysteine
  MOD_RES (97)..(97): Selenocysteine
  MOD_RES (161)..(161): Selenocysteine
  MOD_RES (169)..(169): Selenocysteine
  MOD_RES (186)..(186): Selenocysteine
  MOD_RES (197)..(197): Selenocysteine
  MOD_RES (218)..(219): Selenocysteine
  MOD_RES (222)..(222): Selenocysteine
  MOD_RES (235)..(235): Selenocysteine
  MOD_RES (269)..(269): Selenocysteine
  MOD_RES (272)..(272): Selenocysteine
  MOD_RES (301)..(301): Selenocysteine
  MOD_RES (324)..(324): Selenocysteine
  MOD_RES (338)..(338): Selenocysteine
  MOD_RES (386)..(387): Selenocysteine
  MOD_RES (440)..(440): Selenocysteine
  MOD_RES (479)..(479): Selenocysteine
  MOD_RES (541)..(541): Selenocysteine
  MOD_RES (596)..(596): Selenocysteine
  MOD_RES (605)..(605): Selenocysteine
  MOD_RES (634)..(634): Selenocysteine
  MOD_RES (689)..(689): Selenocysteine
  MOD_RES (691)..(691): Selenocysteine
  MOD_RES (704)..(704): Selenocysteine
  MOD_RES (736)..(736): Selenocysteine
  MOD_RES (763)..(763): Selenocysteine
  MOD_RES (771)..(771): Selenocysteine
  MOD_RES (796)..(796): Selenocysteine
  MOD_RES (805)..(805): Selenocysteine
  MOD_RES (852)..(852): Selenocysteine
  MOD_RES (859)..(859): Selenocysteine
  MOD_RES (863)..(863): Selenocysteine
  MOD_RES (892)..(892): Selenocysteine
  MOD_RES (910)..(910): Selenocysteine
  MOD_RES (947)..(947): Selenocysteine
  MOD_RES (955)..(955): Selenocysteine
ILQDPSNQKCGGRKKXVSFSSMPSEKKISSANDCISFMQAGCELKKVRPNSRIYNRFFXLDXDLQALRWEPSKKDLEKAKLDISAIKEIRLGKNXEXFRNNGLADQICEDCAFSILHGENYESLDLVANSADVANIWVSGLRYLVSRSKQPLDFMEGNQNXPRFMWLKXVFEAADVDGNGIMLEDXSVELIKQLNPXLKEAKIRLKFKEIQKSKEKLXXRVXEEEFCEAFCELCXRPEVYFLLVQISKNKEYLDANDLMLFLEAEQGVXHIXEDICLDIIRRYELSEEGRQKGFLAIDGFXQYLLSSECDIFDPEQKKVAQDMXQPLSHYYINASHNXYLIEDQFRGPADINGYIRALKMGCRSVELDVSDGSDNEPILCNRNNMXXHVSFRSVIEVINKFAFVASEYPLILCLGNHCSLPQQKVMAQQMKKVFGNKLYXEAPLPSESYLPSPEKLKRMIIVKGKKLPSDPDVLEGEVXDEDEEAEMSRRMSVDYNGEQKQIRLCRELSDLVSICKSVQYRDFELSMKSQNYWEMCSFSEXEASRIANEYPEDFVNYNKKFLSRIYPSAMRIDSSNLNPQDFWNCGCQIVAMNFQXPGPMMDLHXGWFLQNGGCGYVLRPSIMRDEVSYFSANXKGILPGVSPLALHIKIISGQNFPKPKGACAKGDVIDPYVCIEIHGIPADCSEQRXKXVQQNSDNPIFDEXFEFQVNLPELAMIRFVVLDDDYIGDEFIGQYXIPFECLQPGYRHVPLRSFVGDIMEHVXLFVHIAIXNRSGGGKAQKRSLSVRMGKKVREYXMLRNIGLKXIDDIFKIAVHPLREAIDMRENMQNAIVSIKELCGLPPIASLKQCLLXLSSRLIXSDNXPSVSLVMKDSFPYLEPLGAIPDVQKKMLXAYDLMIQESRFLIEMADXVQEKIVQCQKAGMEFHEELHNLGAKEGLKGRKLNKAXESFAWNIXVLKGQGDLLKNAKNEAIENMKQIQLACLSCGLSKAPSSSAEAKSKRSLEAIEEKESSEENGKL

SEQ ID NO: 20453 - protein, 1095 aa, Homo sapiens
  MOD_RES (35)..(35): Selenocysteine
  MOD_RES (57)..(57): Selenocysteine
  MOD_RES (72)..(72): Selenocysteine
  MOD_RES (93)..(93): Selenocysteine
  MOD_RES (136)..(136): Selenocysteine
  MOD_RES (139)..(139): Selenocysteine
  MOD_RES (172)..(172): Selenocysteine
  MOD_RES (174)..(174): Selenocysteine
  MOD_RES (238)..(238): Selenocysteine
  MOD_RES (246)..(246): Selenocysteine
  MOD_RES (263)..(263): Selenocysteine
  MOD_RES (274)..(274): Selenocysteine
  MOD_RES (295)..(296): Selenocysteine
  MOD_RES (299)..(299): Selenocysteine
  MOD_RES (312)..(312): Selenocysteine
  MOD_RES (346)..(346): Selenocysteine
  MOD_RES (349)..(349): Selenocysteine
  MOD_RES (378)..(378): Selenocysteine
  MOD_RES (401)..(401): Selenocysteine
  MOD_RES (415)..(415): Selenocysteine
  MOD_RES (463)..(464): Selenocysteine
  MOD_RES (517)..(517): Selenocysteine
  MOD_RES (556)..(556): Selenocysteine
  MOD_RES (618)..(618): Selenocysteine
  MOD_RES (673)..(673): Selenocysteine
  MOD_RES (682)..(682): Selenocysteine
  MOD_RES (711)..(711): Selenocysteine
  MOD_RES (766)..(766): Selenocysteine
  MOD_RES (768)..(768): Selenocysteine
  MOD_RES (781)..(781): Selenocysteine
  MOD_RES (813)..(813): Selenocysteine
  MOD_RES (840)..(840): Selenocysteine
  MOD_RES (848)..(848): Selenocysteine
  MOD_RES (873)..(873): Selenocysteine
  MOD_RES (882)..(882): Selenocysteine
  MOD_RES (929)..(929): Selenocysteine
  MOD_RES (936)..(936): Selenocysteine
  MOD_RES (940)..(940): Selenocysteine
  MOD_RES (969)..(969): Selenocysteine
  MOD_RES (987)..(987): Selenocysteine
  MOD_RES (1024)..(1024): Selenocysteine
  MOD_RES (1032)..(1032): Selenocysteine
MAEGAAGREDPAPPDAAGGEDDPRVGPDAAGDCVXAASGGRMRDRRSGVALPGAAGXPADSEAGLLEAARAXPRRSSIIKDPSNQKCGGRKKXVSFSSMPSEKKISSANDCISFMQAGCELKKVRPNSRIYNRFFXLDXDLQALRWEPSKKDLEKAKLDISAIKEIRLGKNXEXFRNNGLADQICEDCAFSILHGENYESLDLVANSADVANIWVSGLRYLVSRSKQPLDFMEGNQNXPRFMWLKXVFEAADVDGNGIMLEDXSVELIKQLNPXLKEAKIRLKFKEIQKSKEKLXXRVXEEEFCEAFCELCXRPEVYFLLVQISKNKEYLDANDLMLFLEAEQGVXHIXEDICLDIIRRYELSEEGRQKGFLAIDGFXQYLLSSECDIFDPEQKKVAQDMXQPLSHYYINASHNXYLIEDQFRGPADINGYIRALKMGCRSVELDVSDGSDNEPILCNRNNMXXHVSFRSVIEVINKFAFVASEYPLILCLGNHCSLPQQKVMAQQMKKVFGNKLYXEAPLPSESYLPSPEKLKRMIIVKGKKLPSDPDVLEGEVXDEDEEAEMSRRMSVDYNGEQKQIRLCRELSDLVSICKSVQYRDFELSMKSQNYWEMCSFSEXEASRIANEYPEDFVNYNKKFLSRIYPSAMRIDSSNLNPQDFWNCGCQIVAMNFQXPGPMMDLHXGWFLQNGGCGYVLRPSIMRDEVSYFSANXKGILPGVSPLALHIKIISGQNFPKPKGACAKGDVIDPYVCIEIHGIPADCSEQRXKXVQQNSDNPIFDEXFEFQVNLPELAMIRFVVLDDDYIGDEFIGQYXIPFECLQPGYRHVPLRSFVGDIMEHVXLFVHIAIXNRSGGGKAQKRSLSVRMGKKVREYXMLRNIGLKXIDDIFKIAVHPLREAIDMRENMQNAIVSIKELCGLPPIASLKQCLLXLSSRLIXSDNXPSVSLVMKDSFPYLEPLGAIPDVQKKMLXAYDLMIQESRFLIEMADXVQEKIVQCQKAGMEFHEELHNLGAKEGLKGRKLNKAXESFAWNIXVLKGQGDLLKNAKNEAIENMKQIQLACLSCGLSKAPSSSAEAKSKRSLEAIEEKESSEENGKL

SEQ ID NO: 20454 - protein, 94 aa, Homo sapiens
  MOD_RES (35)..(35): Selenocysteine
  MOD_RES (57)..(57): Selenocysteine
  MOD_RES (72)..(72): Selenocysteine
  MOD_RES (89)..(89): Selenocysteine
MAEGAAGREDPAPPDAAGGEDDPRVGPDAAGDCVXAASGGRMRDRRSGVALPGAAGXPADSEAGLLEAARAXPRRSSIIKMGLCSCRKXAQSFH

SEQ ID NO: 20455 - protein, 1012 aa, Homo sapiens
  MOD_RES (19)..(19): Selenocysteine
  MOD_RES (62)..(62): Selenocysteine
  MOD_RES (65)..(65): Selenocysteine
  MOD_RES (98)..(98): Selenocysteine
  MOD_RES (100)..(100): Selenocysteine
  MOD_RES (164)..(164): Selenocysteine
  MOD_RES (172)..(172): Selenocysteine
  MOD_RES (189)..(189): Selenocysteine
  MOD_RES (200)..(200): Selenocysteine
  MOD_RES (221)..(222): Selenocysteine
  MOD_RES (225)..(225): Selenocysteine
  MOD_RES (238)..(238): Selenocysteine
  MOD_RES (272)..(272): Selenocysteine
  MOD_RES (275)..(275): Selenocysteine
  MOD_RES (304)..(304): Selenocysteine
  MOD_RES (327)..(327): Selenocysteine
  MOD_RES (341)..(341): Selenocysteine
  MOD_RES (389)..(390): Selenocysteine
  MOD_RES (443)..(443): Selenocysteine
  MOD_RES (482)..(482): Selenocysteine
  MOD_RES (544)..(544): Selenocysteine
  MOD_RES (599)..(599): Selenocysteine
  MOD_RES (608)..(608): Selenocysteine
  MOD_RES (637)..(637): Selenocysteine
  MOD_RES (692)..(692): Selenocysteine
  MOD_RES (694)..(694): Selenocysteine
  MOD_RES (707)..(707): Selenocysteine
  MOD_RES (739)..(739): Selenocysteine
  MOD_RES (766)..(766): Selenocysteine
  MOD_RES (774)..(774): Selenocysteine
  MOD_RES (799)..(799): Selenocysteine
  MOD_RES (808)..(808): Selenocysteine
  MOD_RES (855)..(855): Selenocysteine
  MOD_RES (862)..(862): Selenocysteine
  MOD_RES (866)..(866): Selenocysteine
  MOD_RES (895)..(895): Selenocysteine
  MOD_RES (913)..(913): Selenocysteine
  MOD_RES (950)..(950): Selenocysteine
  MOD_RES (958)..(958): Selenocysteine
MKNKLQDPSNQKCGGRKKXVSFSSMPSEKKISSANDCISFMQAGCELKKVRPNSRIYNRFFXLDXDLQALRWEPSKKDLEKAKLDISAIKEIRLGKNXEXFRNNGLADQICEDCAFSILHGENYESLDLVANSADVANIWVSGLRYLVSRSKQPLDFMEGNQNXPRFMWLKXVFEAADVDGNGIMLEDXSVELIKQLNPXLKEAKIRLKFKEIQKSKEKLXXRVXEEEFCEAFCELCXRPEVYFLLVQISKNKEYLDANDLMLFLEAEQGVXHIXEDICLDIIRRYELSEEGRQKGFLAIDGFXQYLLSSECDIFDPEQKKVAQDMXQPLSHYYINASHNXYLIEDQFRGPADINGYIRALKMGCRSVELDVSDGSDNEPILCNRNNMXXHVSFRSVIEVINKFAFVASEYPLILCLGNHCSLPQQKVMAQQMKKVFGNKLYXEAPLPSESYLPSPEKLKRMIIVKGKKLPSDPDVLEGEVXDEDEEAEMSRRMSVDYNGEQKQIRLCRELSDLVSICKSVQYRDFELSMKSQNYWEMCSFSEXEASRIANEYPEDFVNYNKKFLSRIYPSAMRIDSSNLNPQDFWNCGCQIVAMNFQXPGPMMDLHXGWFLQNGGCGYVLRPSIMRDEVSYFSANXKGILPGVSPLALHIKIISGQNFPKPKGACAKGDVIDPYVCIEIHGIPADCSEQRXKXVQQNSDNPIFDEXFEFQVNLPELAMIRFVVLDDDYIGDEFIGQYXIPFECLQPGYRHVPLRSFVGDIMEHVXLFVHIAIXNRSGGGKAQKRSLSVRMGKKVREYXMLRNIGLKXIDDIFKIAVHPLREAIDMRENMQNAIVSIKELCGLPPIASLKQCLLXLSSRLIXSDNXPSVSLVMKDSFPYLEPLGAIPDVQKKMLXAYDLMIQESRFLIEMADXVQEKIVQCQKAGMEFHEELHNLGAKEGLKGRKLNKAXESFAWNIXVLKGQGDLLKNAKNEAIENMKQIQLACLSCGLSKAPSSSAEAKSKRSLEAIEEK

SEQ ID NO: 20456 - protein, 1127 aa, Homo sapiens
  MOD_RES (16)..(16): Selenocysteine
  MOD_RES (73)..(73): Selenocysteine
  MOD_RES (84)..(84): Selenocysteine
  MOD_RES (91)..(91): Selenocysteine
  MOD_RES (112)..(112): Selenocysteine
  MOD_RES (121)..(121): Selenocysteine
  MOD_RES (129)..(129): Selenocysteine
  MOD_RES (196)..(196): Selenocysteine
  MOD_RES (200)..(200): Selenocysteine
  MOD_RES (244)..(244): Selenocysteine
  MOD_RES (256)..(256): Selenocysteine
  MOD_RES (269)..(269): Selenocysteine
  MOD_RES (288)..(288): Selenocysteine
  MOD_RES (305)..(305): Selenocysteine
  MOD_RES (324)..(324): Selenocysteine
  MOD_RES (327)..(327): Selenocysteine
  MOD_RES (340)..(340): Selenocysteine
  MOD_RES (360)..(360): Selenocysteine
  MOD_RES (406)..(406): Selenocysteine
  MOD_RES (443)..(443): Selenocysteine
  MOD_RES (457)..(457): Selenocysteine
  MOD_RES (486)..(486): Selenocysteine
  MOD_RES (489)..(489): Selenocysteine
  MOD_RES (491)..(491): Selenocysteine
  MOD_RES (545)..(546): Selenocysteine
  MOD_RES (584)..(584): Selenocysteine
  MOD_RES (706)..(706): Selenocysteine
  MOD_RES (744)..(744): Selenocysteine
  MOD_RES (799)..(799): Selenocysteine
  MOD_RES (801)..(801): Selenocysteine
  MOD_RES (846)..(846): Selenocysteine
  MOD_RES (854)..(854): Selenocysteine
  MOD_RES (865)..(865): Selenocysteine
  MOD_RES (881)..(881): Selenocysteine
  MOD_RES (910)..(910): Selenocysteine
  MOD_RES (915)..(915): Selenocysteine
  MOD_RES (931)..(931): Selenocysteine
  MOD_RES (973)..(973): Selenocysteine
  MOD_RES (986)..(986): Selenocysteine
  MOD_RES (1002)..(1003): Selenocysteine
  MOD_RES (1044)..(1044): Selenocysteine
  MOD_RES (1061)..(1061): Selenocysteine
  MOD_RES (1065)..(1065): Selenocysteine
  MOD_RES (1081)..(1081): Selenocysteine
  MOD_RES (1102)..(1102): Selenocysteine
  MOD_RES (1125)..(1125): Selenocysteine
MAECGRGGAAGGALPXSPGPALGAKGALKAGVGEGGGGGGRLGHGRARYDSGGVSNGDCSLGVSGDEARASPXRGPRGVALAPXPSAVVCXLPRESKPGGLPRRSSIIKDGXKQKRERKKXVSFSSMPXEKKISSASDCINSMVEGSELKKVRSNSRIYHRYFLLDADMQSLRWEPSKKDSEKAKIDIKSIKEVRXGKNXDIFRSNGISDQISEDCAFSVIYGENYESLDLVANSADVANIWVXGLRYLISYGKHXLDMLESSQDNMRXSWVSQMFSEIDVDNLGHIXLCNAVQCIRNLNPGLKXSKIELKFKELHKSKDKAGXEVXKEEFIEVFHELCXRPEIYFLLVQFSSNKEFLDXKDLMMFLEAEQGVAHINEEISLEIIHKYEPSKEGQEKGWLSIDGFXNYLMSPDCYIFDPEHKKVCQDMKQPLSHYFINSSHNXYLIEDQFRGPSDIXGYIRALKMGCRSVELDVWDGPDNEPVIYXGHXMXSQIVFRSVIDIINKYAFFASEYPLILCLENHCSIKQQKVMVQHMKKLLGDKLYXXSPNVEESYLPSPDVLKGKILIKAKKLSSNCSGVEGDVXDEDEGAEMSQRMGKENMEQPNNVPVKRFQLCKELSELVSICKSVQFKEFQVSFQVQKYWEVCSFNEVLASKYANENPGDFVNYNKRFLARVFPSPMRIDSSNMNPQDFWKCGCQIVAMNFQXPGLMMDLNIGWFRQNGNCGYVLRPAIMREEVSFFSANXKDSVPGVSPQLLHIKIISGQNFPKPKGSGAKGDVVDPYVYVEIHGIPADCAEQRXKXVHQNGDAPIFDESFEFQINLPELAMVRFVVLDDDYIGDEFIGQYXIPFECLQXGYRHVPLQSLXGEVLAHASLFVHVAIXNRRGGGKPHKRGLSVRKGKKSREYASLRXLWIKXVDEVFKNAQPPIRDAXDLRENMQNAVVSFKELCGLSSVANLMQCMLAVSPRFLGPDNXPLVVLNLSEQYPXMELQGIVPEVLKKIVXXYDMMIQSLKALIENADAVYEKIVHCQKAAMEFHEHLHSIGXKEGLKERKLQKAVESFXWNIXILKGQADLLKYAKNEXLENLKQIHFAAVSCGLNKPGXENADVQKPRRSLEVIPEKANDEXGE

SEQ ID NO: 20457 - protein, 1001 aa, Homo sapiens
  MOD_RES (3)..(3): Selenocysteine
  MOD_RES (70)..(70): Selenocysteine
  MOD_RES (74)..(74): Selenocysteine
  MOD_RES (118)..(118): Selenocysteine
  MOD_RES (130)..(130): Selenocysteine
  MOD_RES (143)..(143): Selenocysteine
  MOD_RES (162)..(162): Selenocysteine
  MOD_RES (179)..(179): Selenocysteine
  MOD_RES (198)..(198): Selenocysteine
  MOD_RES (201)..(201): Selenocysteine
  MOD_RES (214)..(214): Selenocysteine
  MOD_RES (234)..(234): Selenocysteine
  MOD_RES (280)..(280): Selenocysteine
  MOD_RES (317)..(317): Selenocysteine
  MOD_RES (331)..(331): Selenocysteine
  MOD_RES (360)..(360): Selenocysteine
  MOD_RES (363)..(363): Selenocysteine
  MOD_RES (365)..(365): Selenocysteine
  MOD_RES (419)..(420): Selenocysteine
  MOD_RES (458)..(458): Selenocysteine
  MOD_RES (580)..(580): Selenocysteine
  MOD_RES (618)..(618): Selenocysteine
  MOD_RES (673)..(673): Selenocysteine
  MOD_RES (675)..(675): Selenocysteine
  MOD_RES (720)..(720): Selenocysteine
  MOD_RES (728)..(728): Selenocysteine
  MOD_RES (739)..(739): Selenocysteine
  MOD_RES (755)..(755): Selenocysteine
  MOD_RES (784)..(784): Selenocysteine
  MOD_RES (789)..(789): Selenocysteine
  MOD_RES (805)..(805): Selenocysteine
  MOD_RES (847)..(847): Selenocysteine
  MOD_RES (860)..(860): Selenocysteine
  MOD_RES (876)..(877): Selenocysteine
  MOD_RES (918)..(918): Selenocysteine
  MOD_RES (935)..(935): Selenocysteine
  MOD_RES (939)..(939): Selenocysteine
  MOD_RES (955)..(955): Selenocysteine
  MOD_RES (976)..(976): Selenocysteine
  MOD_RES (999)..(999): Selenocysteine
MPXEKKISSASDCINSMVEGSELKKVRSNSRIYHRYFLLDADMQSLRWEPSKKDSEKAKIDIKSIKEVRXGKNXDIFRSNGISDQISEDCAFSVIYGENYESLDLVANSADVANIWVXGLRYLISYGKHXLDMLESSQDNMRXSWVSQMFSEIDVDNLGHIXLCNAVQCIRNLNPGLKXSKIELKFKELHKSKDKAGXEVXKEEFIEVFHELCXRPEIYFLLVQFSSNKEFLDXKDLMMFLEAEQGVAHINEEISLEIIHKYEPSKEGQEKGWLSIDGFXNYLMSPDCYIFDPEHKKVCQDMKQPLSHYFINSSHNXYLIEDQFRGPSDIXGYIRALKMGCRSVELDVWDGPDNEPVIYXGHXMXSQIVFRSVIDIINKYAFFASEYPLILCLENHCSIKQQKVMVQHMKKLLGDKLYXXSPNVEESYLPSPDVLKGKILIKAKKLSSNCSGVEGDVXDEDEGAEMSQRMGKENMEQPNNVPVKRFQLCKELSELVSICKSVQFKEFQVSFQVQKYWEVCSFNEVLASKYANENPGDFVNYNKRFLARVFPSPMRIDSSNMNPQDFWKCGCQIVAMNFQXPGLMMDLNIGWFRQNGNCGYVLRPAIMREEVSFFSANXKDSVPGVSPQLLHIKIISGQNFPKPKGSGAKGDVVDPYVYVEIHGIPADCAEQRXKXVHQNGDAPIFDESFEFQINLPELAMVRFVVLDDDYIGDEFIGQYXIPFECLQXGYRHVPLQSLXGEVLAHASLFVHVAIXNRRGGGKPHKRGLSVRKGKKSREYASLRXLWIKXVDEVFKNAQPPIRDAXDLRENMQNAVVSFKELCGLSSVANLMQCMLAVSPRFLGPDNXPLVVLNLSEQYPXMELQGIVPEVLKKIVXXYDMMIQSLKALIENADAVYEKIVHCQKAAMEFHEHLHSIGXKEGLKERKLQKAVESFXWNIXILKGQADLLKYAKNEXLENLKQIHFAAVSCGLNKPGXENADVQKPRRSLEVIPEKANDEXGE

SEQ ID NO: 20458 - protein, 704 aa, Homo sapiens
  MOD_RES (1)..(1): Any amino acid
  MOD_RES (24)..(24): Selenocysteine
  MOD_RES (61)..(61): Selenocysteine
  MOD_RES (75)..(75): Selenocysteine
  MOD_RES (104)..(104): Selenocysteine
  MOD_RES (107)..(107): Selenocysteine
  MOD_RES (109)..(109): Selenocysteine
  MOD_RES (163)..(164): Selenocysteine
  MOD_RES (202)..(202): Selenocysteine
  MOD_RES (324)..(324): Selenocysteine
  MOD_RES (362)..(362): Selenocysteine
  MOD_RES (417)..(417): Selenocysteine
  MOD_RES (419)..(419): Selenocysteine
  MOD_RES (464)..(464): Selenocysteine
  MOD_RES (472)..(472): Selenocysteine
  MOD_RES (483)..(483): Selenocysteine
  MOD_RES (499)..(499): Selenocysteine
  MOD_RES (528)..(528): Selenocysteine
  MOD_RES (533)..(533): Selenocysteine
  MOD_RES (549)..(549): Selenocysteine
  MOD_RES (591)..(591): Selenocysteine
  MOD_RES (604)..(604): Selenocysteine
  MOD_RES (620)..(621): Selenocysteine
  MOD_RES (662)..(662): Selenocysteine
  MOD_RES (679)..(679): Selenocysteine
  MOD_RES (683)..(683): Selenocysteine
  MOD_RES (690)..(690): Selenocysteine
  MOD_RES (700)..(700): Selenocysteine
XIIHKYEPSKEGQEKGWLSIDGFXNYLMSPDCYIFDPEHKKVCQDMKQPLSHYFINSSHNXYLIEDQFRGPSDIXGYIRALKMGCRSVELDVWDGPDNEPVIYXGHXMXSQIVFRSVIDIINKYAFFASEYPLILCLENHCSIKQQKVMVQHMKKLLGDKLYXXSPNVEESYLPSPDVLKGKILIKAKKLSSNCSGVEGDVXDEDEGAEMSQRMGKENMEQPNNVPVKRFQLCKELSELVSICKSVQFKEFQVSFQVQKYWEVCSFNEVLASKYANENPGDFVNYNKRFLARVFPSPMRIDSSNMNPQDFWKCGCQIVAMNFQXPGLMMDLNIGWFRQNGNCGYVLRPAIMREEVSFFSANXKDSVPGVSPQLLHIKIISGQNFPKPKGSGAKGDVVDPYVYVEIHGIPADCAEQRXKXVHQNGDAPIFDESFEFQINLPELAMVRFVVLDDDYIGDEFIGQYXIPFECLQXGYRHVPLQSLXGEVLAHASLFVHVAIXNRRGGGKPHKRGLSVRKGKKSREYASLRXLWIKXVDEVFKNAQPPIRDAXDLRENMQNAVVSFKELCGLSSVANLMQCMLAVSPRFLGPDNXPLVVLNLSEQYPXMELQGIVPEVLKKIVXXYDMMIQSLKALIENADAVYEKIVHCQKAAMEFHEHLHSIGXKEGLKERKLQKAVESFXWNIXILKIRKXGRRSIFVPQXPIMV

SEQ ID NO: 20459 - protein, 304 aa, Homo sapiens
  MOD_RES (15)..(15): Selenocysteine
  MOD_RES (24)..(24): Selenocysteine
  MOD_RES (26)..(26): Selenocysteine
  MOD_RES (75)..(75): Selenocysteine
  MOD_RES (97)..(97): Selenocysteine
  MOD_RES (101)..(101): Selenocysteine
  MOD_RES (151)..(151): Selenocysteine
  MOD_RES (171)..(171): Selenocysteine
  MOD_RES (198)..(198): Selenocysteine
  MOD_RES (201)..(201): Selenocysteine
  MOD_RES (237)..(238): Selenocysteine
  MOD_RES (249)..(250): Selenocysteine
  MOD_RES (268)..(268): Selenocysteine
  MOD_RES (273)..(273): Selenocysteine
  MOD_RES (285)..(285): Selenocysteine
MLAVRKARRKLRMGXICSPNPSGXKXSSEVCNADWMASLPPHLHNLPLSNLAIPGSHDSFSYWVDEKSPVGPDQXQAIKRLARISLVKKLMKKWSVXQNLXFREQLEAGIRYFDLRVSSKPGDADQEIYFIHGLFGIKVWDGLMEIDSFLXQHPQEIIFLDFNHFYAMDEXHHKCLVLRIQEAFGNKLCPACSVESLXLRXLWEKNCQVLIFYHCPFYKQYPFLWPGKKIPAPWANXXSVRKLILFLEXXLSERASRGSFHVSQAILXPRVKXIARGLVGGLKNXLVHRLALIPVYPLRFSRRS

SEQ ID NO: 20460 - protein, 305 aa, Homo sapiens
  MOD_RES (15)..(15): Selenocysteine
  MOD_RES (24)..(24): Selenocysteine
  MOD_RES (26)..(26): Selenocysteine
  MOD_RES (75)..(75): Selenocysteine
  MOD_RES (97)..(97): Selenocysteine
  MOD_RES (101)..(101): Selenocysteine
  MOD_RES (151)..(151): Selenocysteine
  MOD_RES (171)..(171): Selenocysteine
  MOD_RES (198)..(198): Selenocysteine
  MOD_RES (201)..(201): Selenocysteine
  MOD_RES (237)..(238): Selenocysteine
  MOD_RES (249)..(250): Selenocysteine
  MOD_RES (268)..(268): Selenocysteine
  MOD_RES (273)..(273): Selenocysteine
  MOD_RES (285)..(285): Selenocysteine
MLAVRKARRKLRMGXICSPNPSGXKXSSEVCNADWMASLPPHLHNLPLSNLAIPGSHDSFSYWVDEKSPVGPDQXQAIKRLARISLVKKLMKKWSVXQNLXFREQLEAGIRYFDLRVSSKPGDADQEIYFIHGLFGIKVWDGLMEIDSFLXQHPQEIIFLDFNHFYAMDEXHHKCLVLRIQEAFGNKLCPACSVESLXLRXLWEKNCQVLIFYHCPFYKQYPFLWPGKKIPAPWANXXSVRKLILFLEXXLSERASRGSFHVSQAILXPRVKXIARGLVGGLKNXLVHSNRWNSHGPSLLSQERS

SEQ ID NO: 20461 - protein, 341 aa, Homo sapiens
  MOD_RES (15)..(15): Selenocysteine
  MOD_RES (24)..(24): Selenocysteine
  MOD_RES (26)..(26): Selenocysteine
  MOD_RES (75)..(75): Selenocysteine
  MOD_RES (97)..(97): Selenocysteine
  MOD_RES (101)..(101): Selenocysteine
  MOD_RES (151)..(151): Selenocysteine
  MOD_RES (171)..(171): Selenocysteine
  MOD_RES (198)..(198): Selenocysteine
  MOD_RES (201)..(201): Selenocysteine
  MOD_RES (237)..(238): Selenocysteine
  MOD_RES (249)..(250): Selenocysteine
  MOD_RES (268)..(268): Selenocysteine
  MOD_RES (273)..(273): Selenocysteine
  MOD_RES (285)..(285): Selenocysteine
  MOD_RES (300)..(300): Selenocysteine
  MOD_RES (312)..(312): Selenocysteine
  MOD_RES (324)..(324): Selenocysteine
  MOD_RES (336)..(336): Selenocysteine
MLAVRKARRKLRMGXICSPNPSGXKXSSEVCNADWMASLPPHLHNLPLSNLAIPGSHDSFSYWVDEKSPVGPDQXQAIKRLARISLVKKLMKKWSVXQNLXFREQLEAGIRYFDLRVSSKPGDADQEIYFIHGLFGIKVWDGLMEIDSFLXQHPQEIIFLDFNHFYAMDEXHHKCLVLRIQEAFGNKLCPACSVESLXLRXLWEKNCQVLIFYHCPFYKQYPFLWPGKKIPAPWANXXSVRKLILFLEXXLSERASRGSFHVSQAILXPRVKXIARGLVGGLKNXLVHRNLPAILDWVKXQKPGAMGVNIIXSDFVDLVDFAAXVIKLNDLLQEDXALAKC

SEQ ID NO: 20462 - protein, 321 aa, Homo sapiens
  MOD_RES (18)..(18): Selenocysteine
  MOD_RES (29)..(29): Selenocysteine
  MOD_RES (57)..(57): Selenocysteine
  MOD_RES (67)..(67): Selenocysteine
  MOD_RES (79)..(79): Selenocysteine
  MOD_RES (81)..(81): Selenocysteine
  MOD_RES (85)..(85): Selenocysteine
  MOD_RES (101)..(101): Selenocysteine
  MOD_RES (133)..(133): Selenocysteine
  MOD_RES (219)..(220): Selenocysteine
  MOD_RES (234)..(234): Selenocysteine
  MOD_RES (250)..(250): Selenocysteine
  MOD_RES (255)..(255): Selenocysteine
  MOD_RES (267)..(267): Selenocysteine
  MOD_RES (269)..(269): Selenocysteine
  MOD_RES (282)..(282): Selenocysteine
  MOD_RES (294)..(294): Selenocysteine
  MOD_RES (306)..(306): Selenocysteine
  MOD_RES (321)..(321): Selenocysteine
MASSQGKNELKLADWMAXLPESMHSIPLXNLAIPGSHDSFSFYIDEASPVGPEQPEXVQNFVSVFGXVAKKLMRKWLAXQXMNFXGQLGAGIRYFDLRISXKPRDPDNELYFAHGLFSAKVNEGLEEINAFLXDHHKEVVFLDFNHFYGMQKYHHEKLVQMLKDIYGNKMCPAIFAQEVSLKYLWEKDYQVLVFYHSPVALEVPFLWPGQMMPAPWANXXDPEKLIQFLQASIXERRKKGSFFISQVVLXPKASXVVKGVASGLREXIXERALPAMMQWVRXQKPGESGINIVXADFVELGDFISXVIKLNYVFDEGEANX

SEQ ID NO: 20463 - protein, 149 aa, Homo sapiens
  MOD_RES (41)..(41): Selenocysteine
  MOD_RES (43)..(43): Selenocysteine
  MOD_RES (55)..(55): Selenocysteine
  MOD_RES (82)..(82): Selenocysteine
  MOD_RES (97)..(97): Selenocysteine
  MOD_RES (99)..(99): Selenocysteine
  MOD_RES (130)..(130): Selenocysteine
DLQNGKFLDNGGSGYILKPHFLRESKSYFNPSNIKEGMPIXLXIRLISGIQLPLXHSSSNKGDSLVIIEVFGVPNDQMKQQXRVIKKNAFSPRWNEXFXFIIHVPELALIRFVVEGQGLIAGNEFLGQYXLPLLCMNKASEMCLGNRSS

SEQ ID NO: 20464 - protein, 266 aa, Homo sapiens
  MOD_RES (3)..(3): Selenocysteine
  MOD_RES (5)..(5): Selenocysteine
  MOD_RES (12)..(12): Selenocysteine
  MOD_RES (38)..(38): Selenocysteine
  MOD_RES (42)..(42): Selenocysteine
  MOD_RES (59)..(59): Selenocysteine
  MOD_RES (75)..(75): Selenocysteine
  MOD_RES (91)..(91): Selenocysteine
  MOD_RES (117)..(117): Selenocysteine
  MOD_RES (134)..(134): Selenocysteine
  MOD_RES (139)..(139): Selenocysteine
  MOD_RES (146)..(146): Selenocysteine
  MOD_RES (172)..(172): Selenocysteine
  MOD_RES (218)..(218): Selenocysteine
  MOD_RES (220)..(220): Selenocysteine
  MOD_RES (232)..(232): Selenocysteine
  MOD_RES (259)..(259): Selenocysteine
GYXLXSKLLFKXVIQAIHKYAFMALKFKILVKNKKIGXLKEXHERKGSDKRGDNQDKEXGVKKLPGVMLFKKKKXRKLKIALALSDLVIYXKAEKFKSFQHSRLYQQFNENNSIGEXQARKLSKLRVHEFIFHXRKFIXRIYPKAXRADSSNFNPQEFWNIGCQMVALNFQXPGLPMDLQNGKFLDNGGSGYILKPHFLRESKSYFNPSNIKEGMPIXLXIRLISGIQLPLXHSSSNKGDSLVIIEVFGVPNDQMKQQXRVIKKNG

SEQ ID NO: 20465 - protein, 131 aa, Homo sapiens
  MOD_RES (8)..(8): Selenocysteine
  MOD_RES (24)..(24): Selenocysteine
  MOD_RES (44)..(44): Selenocysteine
  MOD_RES (48)..(48): Selenocysteine
  MOD_RES (65)..(65): Selenocysteine
  MOD_RES (81)..(81): Selenocysteine
  MOD_RES (97)..(97): Selenocysteine
  MOD_RES (123)..(123): Selenocysteine
MADNLQAXFGESLLSDMLDDFPDXLPSPEALKFKILVKNKKIGXLKEXHERKGSDKRGDNQDKEXGVKKLPGVMLFKKKKXRKLKIALALSDLVIYXKAEKFKSFQHSRLYQQFNENNSIGEXQARKLSKL

SEQ ID NO: 20466 - protein, 390 aa, Homo sapiens
  MOD_RES (8)..(8): Selenocysteine
  MOD_RES (24)..(24): Selenocysteine
  MOD_RES (44)..(44): Selenocysteine
  MOD_RES (48)..(48): Selenocysteine
  MOD_RES (106)..(106): Selenocysteine
  MOD_RES (122)..(122): Selenocysteine
  MOD_RES (138)..(138): Selenocysteine
  MOD_RES (164)..(164): Selenocysteine
  MOD_RES (181)..(181): Selenocysteine
  MOD_RES (186)..(186): Selenocysteine
  MOD_RES (193)..(193): Selenocysteine
  MOD_RES (219)..(219): Selenocysteine
  MOD_RES (265)..(265): Selenocysteine
  MOD_RES (267)..(267): Selenocysteine
  MOD_RES (279)..(279): Selenocysteine
  MOD_RES (306)..(306): Selenocysteine
  MOD_RES (321)..(321): Selenocysteine
  MOD_RES (323)..(323): Selenocysteine
  MOD_RES (354)..(354): Selenocysteine
MADNLQAXFGESLLSDMLDDFPDXLPSPEALKFKILVKNKKIGXLKEXHERKGSDKRGKVEEWEEEVADGEEEEEEEEEEEEEEEDKFKESEVLESVLGDNQDKEXGVKKLPGVMLFKKKKXRKLKIALALSDLVIYXKAEKFKSFQHSRLYQQFNENNSIGEXQARKLSKLRVHEFIFHXRKFIXRIYPKAXRADSSNFNPQEFWNIGCQMVALNFQXPGLPMDLQNGKFLDNGGSGYILKPHFLRESKSYFNPSNIKEGMPIXLXIRLISGIQLPLXHSSSNKGDSLVIIEVFGVPNDQMKQQXRVIKKNAFSPRWNEXFXFIIHVPELALIRFVVEGQGLIAGNEFLGQYXLPLLCMNKGYRRIPLFSRMGESLEPASLFVYVWYVR

SEQ ID NO: 20467 - protein, 45 aa, Homo sapiens
  MOD_RES (24)..(24): Selenocysteine
MEMRWFLSKIQDDFRGGKINLEKXQRLLEKLDIRCSYIHVKQIFK

SEQ ID NO: 20468 - protein, 608 aa, Homo sapiens
  MOD_RES (24)..(24): Selenocysteine
  MOD_RES (56)..(56): Selenocysteine
  MOD_RES (68)..(68): Selenocysteine
  MOD_RES (79)..(79): Selenocysteine
  MOD_RES (97)..(97): Selenocysteine
  MOD_RES (135)..(135): Selenocysteine
  MOD_RES (158)..(158): Selenocysteine
  MOD_RES (172)..(172): Selenocysteine
  MOD_RES (218)..(218): Selenocysteine
  MOD_RES (220)..(220): Selenocysteine
  MOD_RES (227)..(227): Selenocysteine
  MOD_RES (239)..(239): Selenocysteine
  MOD_RES (254)..(254): Selenocysteine
  MOD_RES (267)..(267): Selenocysteine
  MOD_RES (283)..(283): Selenocysteine
  MOD_RES (303)..(303): Selenocysteine
  MOD_RES (307)..(307): Selenocysteine
  MOD_RES (324)..(324): Selenocysteine
  MOD_RES (340)..(340): Selenocysteine
  MOD_RES (356)..(356): Selenocysteine
  MOD_RES (382)..(382): Selenocysteine
  MOD_RES (399)..(399): Selenocysteine
  MOD_RES (404)..(404): Selenocysteine
  MOD_RES (411)..(411): Selenocysteine
  MOD_RES (437)..(437): Selenocysteine
  MOD_RES (483)..(483): Selenocysteine
  MOD_RES (485)..(485): Selenocysteine
  MOD_RES (497)..(497): Selenocysteine
  MOD_RES (524)..(524): Selenocysteine
  MOD_RES (539)..(539): Selenocysteine
  MOD_RES (541)..(541): Selenocysteine
  MOD_RES (572)..(572): Selenocysteine
MEMRWFLSKIQDDFRGGKINLEKXQRLLEKLDIRCSYIHVKQIFKDNDRLKQGRIXIEEFRAIYRIIXHREEIIEIFNXYSENRKILLASNLAQFLXQEQYAAEMSKAIAFEIIQKYEPIEEVRKAHQMSLEGFXRYMDSRECLLFKNECRKVYQDMXHPLNDYFISSSHNXYLVSDQLLGPSDLWGYVSALVKGCRCLEIDCWDGAQNEPVVYHGYXLXSKLLFKXVIQAIHKYAFMXSDYPVVLSLENHCSXAQQEVMADNLQAXFGESLLSDMLDDFPDXLPSPEALKFKILVKNKKIGXLKEXHERKGSDKRGDNQDKEXGVKKLPGVMLFKKKKXRKLKIALALSDLVIYXKAEKFKSFQHSRLYQQFNENNSIGEXQARKLSKLRVHEFIFHXRKFIXRIYPKAXRADSSNFNPQEFWNIGCQMVALNFQXPGLPMDLQNGKFLDNGGSGYILKPHFLRESKSYFNPSNIKEGMPIXLXIRLISGIQLPLXHSSSNKGDSLVIIEVFGVPNDQMKQQXRVIKKNAFSPRWNEXFXFIIHVPELALIRFVVEGQGLIAGNEFLGQYXLPLLCMNKGYRRIPLFSRMGESLEPASLFVYVWYVR

SEQ ID NO: 20469 - protein, 53 aa, Homo sapiens
  MOD_RES (24)..(24): Selenocysteine
  MOD_RES (50)..(50): Selenocysteine
MEMRWFLSKIQDDFRGGKINLEKXQRLLEKLDIRCSYIHVKQIFKLGKHXKCH

SEQ ID NO: 20470 - protein, 415 aa, Homo sapiens
  MOD_RES (24)..(24): Selenocysteine
  MOD_RES (46)..(46): Selenocysteine
  MOD_RES (61)..(61): Selenocysteine
  MOD_RES (74)..(74): Selenocysteine
  MOD_RES (90)..(90): Selenocysteine
  MOD_RES (110)..(110): Selenocysteine
  MOD_RES (114)..(114): Selenocysteine
  MOD_RES (131)..(131): Selenocysteine
  MOD_RES (147)..(147): Selenocysteine
  MOD_RES (163)..(163): Selenocysteine
  MOD_RES (189)..(189): Selenocysteine
  MOD_RES (206)..(206): Selenocysteine
  MOD_RES (211)..(211): Selenocysteine
  MOD_RES (218)..(218): Selenocysteine
  MOD_RES (244)..(244): Selenocysteine
  MOD_RES (290)..(290): Selenocysteine
  MOD_RES (292)..(292): Selenocysteine
  MOD_RES (304)..(304): Selenocysteine
  MOD_RES (331)..(331): Selenocysteine
  MOD_RES (346)..(346): Selenocysteine
  MOD_RES (348)..(348): Selenocysteine
  MOD_RES (379)..(379): Selenocysteine
MEMRWFLSKIQDDFRGGKINLEKXQRLLEKLDIRCSYIHVKQIFKXSDYPVVLSLENHCSXAQQEVMADNLQAXFGESLLSDMLDDFPDXLPSPEALKFKILVKNKKIGXLKEXHERKGSDKRGDNQDKEXGVKKLPGVMLFKKKKXRKLKIALALSDLVIYXKAEKFKSFQHSRLYQQFNENNSIGEXQARKLSKLRVHEFIFHXRKFIXRIYPKAXRADSSNFNPQEFWNIGCQMVALNFQXPGLPMDLQNGKFLDNGGSGYILKPHFLRESKSYFNPSNIKEGMPIXLXIRLISGIQLPLXHSSSNKGDSLVIIEVFGVPNDQMKQQXRVIKKNAFSPRWNEXFXFIIHVPELALIRFVVEGQGLIAGNEFLGQYXLPLLCMNKGYRRIPLFSRMGESLEPASLFVYVWYVR

SEQ ID NO: 20471 - protein, 89 aa, Homo sapiens
  MOD_RES (5)..(5): Selenocysteine
  MOD_RES (20)..(20): Selenocysteine
  MOD_RES (22)..(22): Selenocysteine
  MOD_RES (53)..(53): Selenocysteine
MKQQXRVIKKNAFSPRWNEXFXFIIHVPELALIRFVVEGQGLIAGNEFLGQYXLPLLCMNKGYRRIPLFSRMGESLEPASLFVYVWYVR

SEQ ID NO: 20472 - protein, 76 aa, Homo sapiens
  MOD_RES (31)..(31): Selenocysteine
  MOD_RES (54)..(54): Selenocysteine
  MOD_RES (68)..(68): Selenocysteine
MSKAIAFEIIQKYEPIEEVRKAHQMSLEGFXRYMDSRECLLFKNECRKVYQDMXHPLNDYFISSSHNXYLVSDQLL

SEQ ID NO: 20473 - protein, 166 aa, Homo sapiens
  MOD_RES (2)..(2): Selenocysteine
  MOD_RES (5)..(5): Selenocysteine
  MOD_RES (44)..(44): Selenocysteine
  MOD_RES (66)..(66): Selenocysteine
  MOD_RES (81)..(81): Selenocysteine
  MOD_RES (94)..(94): Selenocysteine
  MOD_RES (110)..(110): Selenocysteine
  MOD_RES (130)..(130): Selenocysteine
  MOD_RES (134)..(134): Selenocysteine
  MOD_RES (151)..(151): Selenocysteine
MXAPXGERLLNSGLICSPFWKRELKQRGQIQDDFRGGKINLEKXQRLLEKLDIRCSYIHVKQIFKXSDYPVVLSLENHCSXAQQEVMADNLQAXFGESLLSDMLDDFPDXLPSPEALKFKILVKNKKIGXLKEXHERKGSDKRGDNQDKEXGVKKLPGVMLFKKKK

SEQ ID NO: 20474 - protein, 101 aa, Homo sapiens
  MOD_RES (1)..(1): Any amino acid
  MOD_RES (7)..(7): Selenocysteine
  MOD_RES (53)..(53): Selenocysteine
  MOD_RES (55)..(55): Selenocysteine
  MOD_RES (67)..(67): Selenocysteine
XALNFQXPGLPMDLQNGKFLDNGGSGYILKPHFLRESKSYFNPSNIKEGMPIXLXIRLISGIQLPLXHSSSNKGYRRIPLFSRMGESLEPASLFVYVWYVR

SEQ ID NO: 20475 - protein, 412 aa, Homo sapiens
  MOD_RES (1)..(1): Any amino acid
  MOD_RES (7)..(7): Selenocysteine
  MOD_RES (30)..(30): Selenocysteine
  MOD_RES (44)..(44): Selenocysteine
  MOD_RES (90)..(90): Selenocysteine
  MOD_RES (92)..(92): Selenocysteine
  MOD_RES (99)..(99): Selenocysteine
  MOD_RES (111)..(111): Selenocysteine
  MOD_RES (126)..(126): Selenocysteine
  MOD_RES (139)..(139): Selenocysteine
  MOD_RES (155)..(155): Selenocysteine
  MOD_RES (175)..(175): Selenocysteine
  MOD_RES (179)..(179): Selenocysteine
  MOD_RES (196)..(196): Selenocysteine
  MOD_RES (212)..(212): Selenocysteine
  MOD_RES (228)..(228): Selenocysteine
  MOD_RES (254)..(254): Selenocysteine
  MOD_RES (271)..(271): Selenocysteine
  MOD_RES (276)..(276): Selenocysteine
  MOD_RES (283)..(283): Selenocysteine
  MOD_RES (309)..(309): Selenocysteine
  MOD_RES (355)..(355): Selenocysteine
  MOD_RES (357)..(357): Selenocysteine
  MOD_RES (369)..(369): Selenocysteine
  MOD_RES (396)..(396): Selenocysteine
XSLEGFXRYMDSRECLLFKNECRKVYQDMXHPLNDYFISSSHNXYLVSDQLLGPSDLWGYVSALVKGCRCLEIDCWDGAQNEPVVYHGYXLXSKLLFKXVIQAIHKYAFMXSDYPVVLSLENHCSXAQQEVMADNLQAXFGESLLSDMLDDFPDXLPSPEALKFKILVKNKKIGXLKEXHERKGSDKRGDNQDKEXGVKKLPGVMLFKKKKXRKLKIALALSDLVIYXKAEKFKSFQHSRLYQQFNENNSIGEXQARKLSKLRVHEFIFHXRKFIXRIYPKAXRADSSNFNPQEFWNIGCQMVALNFQXPGLPMDLQNGKFLDNGGSGYILKPHFLRESKSYFNPSNIKEGMPIXLXIRLISGIQLPLXHSSSNKGDSLVIIEVFGVPNDQMKQQXRVIKKNGQGNMVIIPA

SEQ ID NO: 20476 - protein, 152 aa, Homo sapiens
  MOD_RES (34)..(34): Selenocysteine
  MOD_RES (38)..(38): Selenocysteine
  MOD_RES (49)..(49): Selenocysteine
  MOD_RES (80)..(80): Selenocysteine
  MOD_RES (96)..(96): Selenocysteine
  MOD_RES (105)..(105): Selenocysteine
  MOD_RES (113)..(113): Selenocysteine
  MOD_RES (138)..(138): Selenocysteine
MPGLVFFKFANLGGGWGSRKMLEPGMCPAEMSLXPFVXRSLNLLCFSVXHRGRGKDNPLHFFLQLLAPSASASLGLGREXGPLPSPGLSPGLLSEXFVSEGPLLXLQISWCGXECLMDGQGPLIHLHSQNIRISFGAXQPPLLLVYEIRWNR

SEQ ID NO: 20477 - protein, 57 aa, Homo sapiens
  MOD_RES (11)..(11): Selenocysteine
  MOD_RES (30)..(30): Selenocysteine
  MOD_RES (55)..(55): Selenocysteine
MSLKNEPRVNXSALQKIAADMSNIIENLDXRELHFEGEEVDYDVSPSDPKIQEGXKY

SEQ ID NO: 20478 - protein, 142 aa, Homo sapiens
  MOD_RES (11)..(11): Selenocysteine
  MOD_RES (30)..(30): Selenocysteine
  MOD_RES (64)..(64): Selenocysteine
  MOD_RES (74)..(74): Selenocysteine
  MOD_RES (92)..(92): Selenocysteine
  MOD_RES (94)..(95): Selenocysteine
  MOD_RES (104)..(104): Selenocysteine
  MOD_RES (108)..(108): Selenocysteine
MSLKNEPRVNXSALQKIAADMSNIIENLDXRELHFEGEEVDYDVSPSDPKIQEVYIPFSAIYNXQGFKEPNIQXYLSGCPIKAQVLEVERFXSXXRVPSINLYXIELXHGEFKWQVKRKFKHFQEFHRELLKYKAFIRIPIP

SEQ ID NO: 20479 - protein, 1036 aa, Homo sapiens
  MOD_RES (11)..(11): Selenocysteine
  MOD_RES (30)..(30): Selenocysteine
  MOD_RES (64)..(64): Selenocysteine
  MOD_RES (74)..(74): Selenocysteine
  MOD_RES (92)..(92): Selenocysteine
  MOD_RES (94)..(95): Selenocysteine
  MOD_RES (104)..(104): Selenocysteine
  MOD_RES (108)..(108): Selenocysteine
  MOD_RES (143)..(143): Selenocysteine
  MOD_RES (147)..(147): Selenocysteine
  MOD_RES (188)..(188): Selenocysteine
  MOD_RES (202)..(203): Selenocysteine
  MOD_RES (291)..(291): Selenocysteine
  MOD_RES (293)..(293): Selenocysteine
  MOD_RES (305)..(305): Selenocysteine
  MOD_RES (332)..(332): Selenocysteine
  MOD_RES (379)..(379): Selenocysteine
  MOD_RES (434)..(434): Selenocysteine
  MOD_RES (437)..(437): Selenocysteine
  MOD_RES (457)..(457): Selenocysteine
  MOD_RES (495)..(495): Selenocysteine
  MOD_RES (504)..(504): Selenocysteine
  MOD_RES (583)..(583): Selenocysteine
  MOD_RES (586)..(586): Selenocysteine
  MOD_RES (594)..(594): Selenocysteine
  MOD_RES (603)..(603): Selenocysteine
  MOD_RES (635)..(635): Selenocysteine
  MOD_RES (666)..(666): Selenocysteine
  MOD_RES (687)..(688): Selenocysteine
  MOD_RES (795)..(795): Selenocysteine
  MOD_RES (811)..(811): Selenocysteine
  MOD_RES (842)..(842): Selenocysteine
  MOD_RES (852)..(852): Selenocysteine
  MOD_RES (868)..(868): Selenocysteine
  MOD_RES (896)..(896): Selenocysteine
  MOD_RES (898)..(898): Selenocysteine
  MOD_RES (952)..(952): Selenocysteine
  MOD_RES (958)..(958): Selenocysteine
  MOD_RES (1025)..(1025): Selenocysteine
  MOD_RES (1036)..(1036): Selenocysteine
MSLKNEPRVNXSALQKIAADMSNIIENLDXRELHFEGEEVDYDVSPSDPKIQEVYIPFSAIYNXQGFKEPNIQXYLSGCPIKAQVLEVERFXSXXRVPSINLYXIELXHGEFKWQVKRKFKHFQEFHRELLKYKAFIRIPIPXRRHXFRRQNVREEPREMPSLPRSSENMIREEQFLGRRKQLEDYLXKILKMPMYRNYHAXXEFLDISQLSFIHDLGPKGIEGMIMKRSGGHRIPGLNCCGQGRACYRWSKRWLIVKDSFLLYMKPDSGAIAFVLLVDKEFKIKVGKKEXEXKYGIRIDNLSRXLILKCNSYRHARWWGGAIEEFIQKHGXNFLKDHRFGSYAAIQENALAKWYVNAKGYFEDVANAMEEANEEIFIXDWWLSPEIFLKRPVVEGNRWRLDCILKRKAQQGVRIFIMLYKEVELALGINSEYXKRXLMRLHPNIKVMRHPDHVSSXVYLWAHHEKLVIIDQSVAFVGGIDLAYGRWDDNEHRLXDVGSVKRVXSGPSLGSLPPAAMESMESLRLKDKNEPVQNLPIQKSIDDVDSKLKGIGKPRKFSKFSLYKQLHRHHLHDADSISSIDSXSNXGSIRSLQXGVGELHGEXRFWHGKDYCNFVFKDWVQLDKPFADFIDRYSXPRMPWHDIASAVHGKAARDVARHFIQRWNFXKIMKSKYRSLSYPFLLPKSQXXAHELRYQVPGSVHANVQLLRSAADWSAGIKYHEESIHAAYVHVIENSRHYIYIENQFFISCADDKVVFNKIGDAIAQRILKAHRENQKYRVYVVIPLLPGFEGDISXGGGNALQAIMHFNYRXMCRGENSILGQLKAELGNQWINYISFCGLRXHAELEGNLVXELIYVHSKLLIADDNXVIIGSANINDRSMLGKRDSEMAVIVQDXEXVPSVMDGKEYQAGRFARGLRLQCFRVVLGYLDDPSEDIQDPVSDKFFKEVWVSXAARNAXIYDKVFRCLPNDEVHNLIQLRDFINKPVLAKEDPIRAEEELKKIRGFLVQFPFYFLSEESLLPSVGXKEAIVPMEVWX

SEQ ID NO: 20480 - protein, 1074 aa, Homo sapiens
  MOD_RES (11)..(11): Selenocysteine
  MOD_RES (30)..(30): Selenocysteine
  MOD_RES (64)..(64): Selenocysteine
  MOD_RES (74)..(74): Selenocysteine
  MOD_RES (92)..(92): Selenocysteine
  MOD_RES (94)..(95): Selenocysteine
  MOD_RES (104)..(104): Selenocysteine
  MOD_RES (108)..(108): Selenocysteine
  MOD_RES (143)..(143): Selenocysteine
  MOD_RES (147)..(147): Selenocysteine
  MOD_RES (188)..(188): Selenocysteine
  MOD_RES (202)..(203): Selenocysteine
  MOD_RES (291)..(291): Selenocysteine
  MOD_RES (293)..(293): Selenocysteine
  MOD_RES (305)..(305): Selenocysteine
  MOD_RES (332)..(332): Selenocysteine
  MOD_RES (379)..(379): Selenocysteine
  MOD_RES (434)..(434): Selenocysteine
  MOD_RES (437)..(437): Selenocysteine
  MOD_RES (457)..(457): Selenocysteine
  MOD_RES (495)..(495): Selenocysteine
  MOD_RES (504)..(504): Selenocysteine
  MOD_RES (583)..(583): Selenocysteine
  MOD_RES (618)..(618): Selenocysteine
  MOD_RES (624)..(624): Selenocysteine
  MOD_RES (632)..(632): Selenocysteine
  MOD_RES (641)..(641): Selenocysteine
  MOD_RES (673)..(673): Selenocysteine
  MOD_RES (704)..(704): Selenocysteine
  MOD_RES (725)..(726): Selenocysteine
  MOD_RES (833)..(833): Selenocysteine
  MOD_RES (849)..(849): Selenocysteine
  MOD_RES (880)..(880): Selenocysteine
  MOD_RES (890)..(890): Selenocysteine
  MOD_RES (906)..(906): Selenocysteine
  MOD_RES (934)..(934): Selenocysteine
  MOD_RES (936)..(936): Selenocysteine
  MOD_RES (990)..(990): Selenocysteine
  MOD_RES (996)..(996): Selenocysteine
  MOD_RES (1063)..(1063): Selenocysteine
  MOD_RES (1074)..(1074): Selenocysteine
MSLKNEPRVNXSALQKIAADMSNIIENLDXRELHFEGEEVDYDVSPSDPKIQEVYIPFSAIYNXQGFKEPNIQXYLSGCPIKAQVLEVERFXSXXRVPSINLYXIELXHGEFKWQVKRKFKHFQEFHRELLKYKAFIRIPIPXRRHXFRRQNVREEPREMPSLPRSSENMIREEQFLGRRKQLEDYLXKILKMPMYRNYHAXXEFLDISQLSFIHDLGPKGIEGMIMKRSGGHRIPGLNCCGQGRACYRWSKRWLIVKDSFLLYMKPDSGAIAFVLLVDKEFKIKVGKKEXEXKYGIRIDNLSRXLILKCNSYRHARWWGGAIEEFIQKHGXNFLKDHRFGSYAAIQENALAKWYVNAKGYFEDVANAMEEANEEIFIXDWWLSPEIFLKRPVVEGNRWRLDCILKRKAQQGVRIFIMLYKEVELALGINSEYXKRXLMRLHPNIKVMRHPDHVSSXVYLWAHHEKLVIIDQSVAFVGGIDLAYGRWDDNEHRLXDVGSVKRVXSGPSLGSLPPAAMESMESLRLKDKNEPVQNLPIQKSIDDVDSKLKGIGKPRKFSKFSLYKQLHRHHLHDADSISSIDSXSSYFNHYRSHHNLIHGLKPHFKLFHPSSESEQGLXRPHADXGSIRSLQXGVGELHGEXRFWHGKDYCNFVFKDWVQLDKPFADFIDRYSXPRMPWHDIASAVHGKAARDVARHFIQRWNFXKIMKSKYRSLSYPFLLPKSQXXAHELRYQVPGSVHANVQLLRSAADWSAGIKYHEESIHAAYVHVIENSRHYIYIENQFFISCADDKVVFNKIGDAIAQRILKAHRENQKYRVYVVIPLLPGFEGDISXGGGNALQAIMHFNYRXMCRGENSILGQLKAELGNQWINYISFCGLRXHAELEGNLVXELIYVHSKLLIADDNXVIIGSANINDRSMLGKRDSEMAVIVQDXEXVPSVMDGKEYQAGRFARGLRLQCFRVVLGYLDDPSEDIQDPVSDKFFKEVWVSXAARNAXIYDKVFRCLPNDEVHNLIQLRDFINKPVLAKEDPIRAEEELKKIRGFLVQFPFYFLSEESLLPSVGXKEAIVPMEVWX

SEQ ID NO: 20481 - protein, 234 aa, Homo sapiens
  MOD_RES (1)..(1): Any amino acid
  MOD_RES (96)..(96): Selenocysteine
  MOD_RES (112)..(112): Selenocysteine
  MOD_RES (143)..(143): Selenocysteine
  MOD_RES (153)..(153): Selenocysteine
  MOD_RES (169)..(169): Selenocysteine
  MOD_RES (197)..(197): Selenocysteine
  MOD_RES (199)..(199): Selenocysteine
  MOD_RES (228)..(228): Selenocysteine
XHANVQLLRSAADWSAGIKYHEESIHAAYVHVIENSRHYIYIENQFFISCADDKVVFNKIGDAIAQRILKAHRENQKYRVYVVIPLLPGFEGDISXGGGNALQAIMHFNYRXMCRGENSILGQLKAELGNQWINYISFCGLRXHAELEGNLVXELIYVHSKLLIADDNXVIIGSANINDRSMLGKRDSEMAVIVQDXEXVPSVMDGKEYQAGRFARGLRLQCFRSKMXPGVEDP

SEQ ID NO: 20482 - protein, 128 aa, Homo sapiens
  MOD_RES (2)..(2): Selenocysteine
  MOD_RES (4)..(4): Selenocysteine
  MOD_RES (11)..(11): Selenocysteine
  MOD_RES (29)..(29): Selenocysteine
  MOD_RES (66)..(66): Selenocysteine
  MOD_RES (72)..(72): Selenocysteine
  MOD_RES (76)..(76): Selenocysteine
  MOD_RES (83)..(83): Selenocysteine
  MOD_RES (85)..(85): Selenocysteine
  MOD_RES (92)..(92): Selenocysteine
  MOD_RES (99)..(100): Selenocysteine
MXAXPESLFPXGDELDSSQLQMESDEVDXLKEGEDPADRMHPFLAIYELQSLKVHPLVFAPGVPVXAQVVGXERYXSGSKVGXCXLYSVRLXHGDFSWXXKKKYRHFQELHRDLLRHKVLMSLLPLAR

SEQ ID NO: 20483 - protein, 172 aa, Homo sapiens
  MOD_RES (2)..(2): Selenocysteine
  MOD_RES (4)..(4): Selenocysteine
  MOD_RES (11)..(11): Selenocysteine
  MOD_RES (29)..(29): Selenocysteine
  MOD_RES (66)..(66): Selenocysteine
  MOD_RES (72)..(72): Selenocysteine
  MOD_RES (76)..(76): Selenocysteine
  MOD_RES (83)..(83): Selenocysteine
  MOD_RES (85)..(85): Selenocysteine
  MOD_RES (92)..(92): Selenocysteine
  MOD_RES (99)..(100): Selenocysteine
  MOD_RES (156)..(156): Selenocysteine
MXAXPESLFPXGDELDSSQLQMESDEVDXLKEGEDPADRMHPFLAIYELQSLKVHPLVFAPGVPVXAQVVGXERYXSGSKVGXCXLYSVRLXHGDFSWXXKKKYRHFQELHRDLLRHKVLMSLLPLARFAVAYSPARDAGNREMPSLPRAGPEGSXRHAASKQKYLENYLNR

SEQ ID NO: 20484 - protein, 922 aa, Homo sapiens
  MOD_RES (2)..(2): Selenocysteine
  MOD_RES (4)..(4): Selenocysteine
  MOD_RES (11)..(11): Selenocysteine
  MOD_RES (29)..(29): Selenocysteine
  MOD_RES (66)..(66): Selenocysteine
  MOD_RES (72)..(72): Selenocysteine
  MOD_RES (76)..(76): Selenocysteine
  MOD_RES (83)..(83): Selenocysteine
  MOD_RES (85)..(85): Selenocysteine
  MOD_RES (92)..(92): Selenocysteine
  MOD_RES (99)..(100): Selenocysteine
  MOD_RES (156)..(156): Selenocysteine
  MOD_RES (175)..(175): Selenocysteine
  MOD_RES (186)..(186): Selenocysteine
  MOD_RES (222)..(222): Selenocysteine
  MOD_RES (252)..(252): Selenocysteine
  MOD_RES (274)..(274): Selenocysteine
  MOD_RES (284)..(284): Selenocysteine
  MOD_RES (307)..(307): Selenocysteine
  MOD_RES (333)..(333): Selenocysteine
  MOD_RES (362)..(362): Selenocysteine
  MOD_RES (437)..(437): Selenocysteine
  MOD_RES (473)..(473): Selenocysteine
  MOD_RES (488)..(488): Selenocysteine
  MOD_RES (496)..(496): Selenocysteine
  MOD_RES (516)..(516): Selenocysteine
  MOD_RES (534)..(535): Selenocysteine
  MOD_RES (566)..(566): Selenocysteine
  MOD_RES (568)..(569): Selenocysteine
  MOD_RES (575)..(575): Selenocysteine
  MOD_RES (577)..(577): Selenocysteine
  MOD_RES (586)..(586): Selenocysteine
  MOD_RES (588)..(588): Selenocysteine
  MOD_RES (595)..(595): Selenocysteine
  MOD_RES (602)..(603): Selenocysteine
  MOD_RES (617)..(617): Selenocysteine
  MOD_RES (629)..(629): Selenocysteine
  MOD_RES (652)..(652): Selenocysteine
  MOD_RES (693)..(693): Selenocysteine
  MOD_RES (706)..(706): Selenocysteine
  MOD_RES (709)..(709): Selenocysteine
  MOD_RES (727)..(727): Selenocysteine
  MOD_RES (740)..(740): Selenocysteine
  MOD_RES (766)..(766): Selenocysteine
  MOD_RES (794)..(794): Selenocysteine
  MOD_RES (796)..(796): Selenocysteine
  MOD_RES (817)..(817): Selenocysteine
  MOD_RES (858)..(858): Selenocysteine
  MOD_RES (863)..(863): Selenocysteine
  MOD_RES (875)..(875): Selenocysteine
  MOD_RES (886)..(886): Selenocysteine
  MOD_RES (922)..(922): Selenocysteine
MXAXPESLFPXGDELDSSQLQMESDEVDXLKEGEDPADRMHPFLAIYELQSLKVHPLVFAPGVPVXAQVVGXERYXSGSKVGXCXLYSVRLXHGDFSWXXKKKYRHFQELHRDLLRHKVLMSLLPLARFAVAYSPARDAGNREMPSLPRAGPEGSXRHAASKQKYLENYLNRLLXMSFYRNYHAMXEFLEVSQLSFIPDLGRKGLEGMIRKRSGGHRVPGLXCCGRDQVCYRWSKRWLVVKDSFLLYMCLEXGAISFVQLFDPGFEVQVGKRSXEARHGVRIDXSHRSLILKCSSYRQARWWAQEIXELAQGPGRDFLQLHRHDSYAPPRPGXLARWFVNGAGYFAAVADAILRAQEEIFIXDWWLSPEVYLKRPAHSDDWRLDIMLKRKAEEGVRVSILLFKEVELALGINSGYSKRALMLLHPNIKVMRHPDQVXLWAHHEKLLVVDQVVAFLGGLDLAYGRWDDLHYRLXDLGDSSESAASQPPXPRPDSPAXPDLSHNQFFWLGKDYSNLIXKDWVQLDRPFEDFIDREXXPRMPWRDVGVVVHGLPARDLARHFIQRWNFXKXXKAKYKXPXYPYLLPKSXSXANQLPFXLPGGQCXXVQVLRSVDRWSAGXLENSILNAYLHXIRESQHFLYIENQFFISCSDGRXVLNKVGDEIVDRILKAHKQGWCYRVYVLLPLLPGFEGDISXGGGNSIQAILHFXYRXLCRGEYSILHRLKAAMGXAWRDYISICGLRXHGELGGHPVSELIYIHSKVLIADDRXVIIGSANINDRSLLGKRDSELAVLIEDXEXEPSLMNGAEYQAGSVILGANXRPDLDLRDPICDDFFQLWQDMAESNANIYEQIFRCLPSNAXRSLRXLREYVAVEPLAXVSPPLARSELXQVQGHLVHFPLKFLEDESLLPPLGSKEGMIPLEVWX

SEQ ID NO: 20485 - protein, 933 aa, Homo sapiens
  MOD_RES (2)..(2): Selenocysteine
  MOD_RES (4)..(4): Selenocysteine
  MOD_RES (11)..(11): Selenocysteine
  MOD_RES (29)..(29): Selenocysteine
  MOD_RES (66)..(66): Selenocysteine
  MOD_RES (72)..(72): Selenocysteine
  MOD_RES (76)..(76): Selenocysteine
  MOD_RES (83)..(83): Selenocysteine
  MOD_RES (85)..(85): Selenocysteine
  MOD_RES (92)..(92): Selenocysteine
  MOD_RES (99)..(100): Selenocysteine
  MOD_RES (156)..(156): Selenocysteine
  MOD_RES (175)..(175): Selenocysteine
  MOD_RES (186)..(186): Selenocysteine
  MOD_RES (222)..(222): Selenocysteine
  MOD_RES (252)..(252): Selenocysteine
  MOD_RES (274)..(274): Selenocysteine
  MOD_RES (284)..(284): Selenocysteine
  MOD_RES (307)..(307): Selenocysteine
  MOD_RES (333)..(333): Selenocysteine
  MOD_RES (362)..(362): Selenocysteine
  MOD_RES (437)..(437): Selenocysteine
  MOD_RES (473)..(473): Selenocysteine
  MOD_RES (488)..(488): Selenocysteine
  MOD_RES (496)..(496): Selenocysteine
  MOD_RES (516)..(516): Selenocysteine
  MOD_RES (534)..(535): Selenocysteine
  MOD_RES (566)..(566): Selenocysteine
  MOD_RES (568)..(569): Selenocysteine
  MOD_RES (575)..(575): Selenocysteine
  MOD_RES (577)..(577): Selenocysteine
  MOD_RES (586)..(586): Selenocysteine
  MOD_RES (588)..(588): Selenocysteine
  MOD_RES (595)..(595): Selenocysteine
  MOD_RES (602)..(603): Selenocysteine
  MOD_RES (617)..(617): Selenocysteine
  MOD_RES (629)..(629): Selenocysteine
  MOD_RES (652)..(652): Selenocysteine
  MOD_RES (693)..(693): Selenocysteine
  MOD_RES (706)..(706): Selenocysteine
  MOD_RES (709)..(709): Selenocysteine
  MOD_RES (727)..(727): Selenocysteine
  MOD_RES (740)..(740): Selenocysteine
  MOD_RES (766)..(766): Selenocysteine
  MOD_RES (794)..(794): Selenocysteine
  MOD_RES (796)..(796): Selenocysteine
  MOD_RES (828)..(828): Selenocysteine
  MOD_RES (869)..(869): Selenocysteine
  MOD_RES (874)..(874): Selenocysteine
  MOD_RES (886)..(886): Selenocysteine
  MOD_RES (897)..(897): Selenocysteine
  MOD_RES (933)..(933): Selenocysteine
MXAXPESLFPXGDELDSSQLQMESDEVDXLKEGEDPADRMHPFLAIYELQSLKVHPLVFAPGVPVXAQVVGXERYXSGSKVGXCXLYSVRLXHGDFSWXXKKKYRHFQELHRDLLRHKVLMSLLPLARFAVAYSPARDAGNREMPSLPRAGPEGSXRHAASKQKYLENYLNRLLXMSFYRNYHAMXEFLEVSQLSFIPDLGRKGLEGMIRKRSGGHRVPGLXCCGRDQVCYRWSKRWLVVKDSFLLYMCLEXGAISFVQLFDPGFEVQVGKRSXEARHGVRIDXSHRSLILKCSSYRQARWWAQEIXELAQGPGRDFLQLHRHDSYAPPRPGXLARWFVNGAGYFAAVADAILRAQEEIFIXDWWLSPEVYLKRPAHSDDWRLDIMLKRKAEEGVRVSILLFKEVELALGINSGYSKRALMLLHPNIKVMRHPDQVXLWAHHEKLLVVDQVVAFLGGLDLAYGRWDDLHYRLXDLGDSSESAASQPPXPRPDSPAXPDLSHNQFFWLGKDYSNLIXKDWVQLDRPFEDFIDREXXPRMPWRDVGVVVHGLPARDLARHFIQRWNFXKXXKAKYKXPXYPYLLPKSXSXANQLPFXLPGGQCXXVQVLRSVDRWSAGXLENSILNAYLHXIRESQHFLYIENQFFISCSDGRXVLNKVGDEIVDRILKAHKQGWCYRVYVLLPLLPGFEGDISXGGGNSIQAILHFXYRXLCRGEYSILHRLKAAMGXAWRDYISICGLRXHGELGGHPVSELIYIHSKVLIADDRXVIIGSANINDRSLLGKRDSELAVLIEDXEXEPSLMNGAEYQAGRFALSLRKHCFGVILGANXRPDLDLRDPICDDFFQLWQDMAESNANIYEQIFRCLPSNAXRSLRXLREYVAVEPLAXVSPPLARSELXQVQGHLVHFPLKFLEDESLLPPLGSKEGMIPLEVWX

SEQ ID NO: 20486 - protein, 196 aa, Homo sapiens
  MOD_RES (1)..(2): Selenocysteine
  MOD_RES (8)..(8): Selenocysteine
  MOD_RES (10)..(10): Selenocysteine
  MOD_RES (19)..(19): Selenocysteine
  MOD_RES (21)..(21): Selenocysteine
  MOD_RES (28)..(28): Selenocysteine
  MOD_RES (35)..(36): Selenocysteine
  MOD_RES (50)..(50): Selenocysteine
  MOD_RES (91)..(91): Selenocysteine
  MOD_RES (104)..(104): Selenocysteine
  MOD_RES (107)..(107): Selenocysteine
  MOD_RES (125)..(125): Selenocysteine
  MOD_RES (138)..(138): Selenocysteine
  MOD_RES (164)..(164): Selenocysteine
  MOD_RES (192)..(192): Selenocysteine
  MOD_RES (194)..(194): Selenocysteine
XXKAKYKXPXYPYLLPKSXSXANQLPFXLPGGQCXXVQNQFFISCSDGRXVLNKVGDEIVDRILKAHKQGWCYRVYVLLPLLPGFEGDISXGGGNSIQAILHFXYRXLCRGEYSILHRLKAAMGXAWRDYISICGLRXHGELGGHPVSELIYIHSKVLIADDRXVIIGSANINDRSLLGKRDSELAVLIEDXEXEP

SEQ ID NO: 20487 - protein, 197 aa, Homo sapiens
  MOD_RES (1)..(1): Any amino acid
  MOD_RES (4)..(4): Selenocysteine
  MOD_RES (7)..(7): Selenocysteine
  MOD_RES (25)..(25): Selenocysteine
  MOD_RES (38)..(38): Selenocysteine
  MOD_RES (64)..(64): Selenocysteine
  MOD_RES (92)..(92): Selenocysteine
  MOD_RES (94)..(94): Selenocysteine
  MOD_RES (126)..(126): Selenocysteine
  MOD_RES (167)..(167): Selenocysteine
  MOD_RES (172)..(172): Selenocysteine
  MOD_RES (184)..(184): Selenocysteine
XHFXYRXLCRGEYSILHRLKAAMGXAWRDYISICGLRXHGELGGHPVSELIYIHSKVLIADDRXVIIGSANINDRSLLGKRDSELAVLIEDXEXEPSLMNGAEYQAGRFALSLRKHCFGVILGANXRPDLDLRDPICDDFFQLWQDMAESNANIYEQIFRCLPSNAXRSLRXLREYVAVEPLAXGPPSPLLPRWREG

SEQ ID NO: 20488 - protein, 48 aa, Homo sapiens
  MOD_RES (1)..(1): Any amino acid
  MOD_RES (19)..(19): Selenocysteine
  MOD_RES (45)..(45): Selenocysteine
XILKCSSYRQARWWAQEIXELAQGPGRDFLQLHRHDSYAPPRPGXLAR

SEQ ID NO: 20489 - protein, 350 aa, Homo sapiens
  MOD_RES (20)..(20): Selenocysteine
  MOD_RES (54)..(54): Selenocysteine
  MOD_RES (56)..(56): Selenocysteine
  MOD_RES (72)..(74): Selenocysteine
  MOD_RES (114)..(114): Selenocysteine
  MOD_RES (123)..(123): Selenocysteine
  MOD_RES (136)..(136): Selenocysteine
  MOD_RES (157)..(157): Selenocysteine
  MOD_RES (204)..(204): Selenocysteine
  MOD_RES (298)..(298): Selenocysteine
  MOD_RES (319)..(319): Selenocysteine
  MOD_RES (331)..(331): Selenocysteine
  MOD_RES (336)..(336): Selenocysteine
  MOD_RES (348)..(348): Selenocysteine
MEPKRIREGYLVKKGSVFNXWKPMWVVLLEDGIEFYKKKSDNSPKGMIPLKGSXLXSPCQDFGKRMFVFKIXXXKQQDHFFQAAFLEERDAWVRDIKKAIKCIEGGQKFARKSXRRSIRLPEXIDLGALYLSMKDXEKGIKELNLEKDKKIFNHCFXGNCVIDWLVSNQSVRNRQEGLMIASSLLNEGYLQPAGDMSKSAVDGXAENPFLDNPDAFYYFPDSGFFCEENSSDDDVILKEEFRGVIIKQGCLLKQGHRRKNWKVRKFILREDPAYLHYYDPAGAEDPLGAIHLRGCVVXSVESNSNGRKSEEENLFEIIXADEVHYFLQAAXPKERXEWIRAIQMASRXGK

SEQ ID NO: 20490 - protein, 127 aa, Homo sapiens
  MOD_RES (16)..(16): Selenocysteine
  MOD_RES (29)..(29): Selenocysteine
  MOD_RES (41)..(41): Selenocysteine
  MOD_RES (43)..(43): Selenocysteine
  MOD_RES (60)..(60): Selenocysteine
  MOD_RES (62)..(62): Selenocysteine
  MOD_RES (64)..(64): Selenocysteine
  MOD_RES (84)..(84): Selenocysteine
  MOD_RES (116)..(116): Selenocysteine
  MOD_RES (120)..(120): Selenocysteine
IVHNWKARWFILRQNXLVYYKLEGGRRVXPPKGRILLDGCXIXCPCLEYENRPLLIKLKXQXSXEYFLEACSREERDAWAFEIXGAIHAGQPGKVQQLHSLRNSFKLPPHISLQDXRGKXGRCVALF

SEQ ID NO: 20491 - protein, 353 aa, Homo sapiens
  MOD_RES (32)..(32): Selenocysteine
  MOD_RES (45)..(45): Selenocysteine
  MOD_RES (57)..(57): Selenocysteine
  MOD_RES (59)..(59): Selenocysteine
  MOD_RES (76)..(76): Selenocysteine
  MOD_RES (78)..(78): Selenocysteine
  MOD_RES (80)..(80): Selenocysteine
  MOD_RES (100)..(100): Selenocysteine
  MOD_RES (141)..(141): Selenocysteine
  MOD_RES (154)..(154): Selenocysteine
  MOD_RES (158)..(158): Selenocysteine
  MOD_RES (174)..(174): Selenocysteine
  MOD_RES (182)..(182): Selenocysteine
  MOD_RES (218)..(218): Selenocysteine
  MOD_RES (222)..(222): Selenocysteine
  MOD_RES (241)..(241): Selenocysteine
  MOD_RES (247)..(247): Selenocysteine
  MOD_RES (311)..(311): Selenocysteine
  MOD_RES (326)..(326): Selenocysteine
  MOD_RES (330)..(330): Selenocysteine
  MOD_RES (353)..(353): Selenocysteine
MEDGVLKEGFLVKRGHIVHNWKARWFILRQNXLVYYKLEGGRRVXPPKGRILLDGCXIXCPCLEYENRPLLIKLKXQXSXEYFLEACSREERDAWAFEIXGAIHAGQPGKVQQLHSLRNSFKLPPHISLHRIVDKMHDSNXGIRSSPNMEQGSXYKKXFLGSSLVDWLISNSFXASRLEAVXLASMLMEENFLRPVGVRSMGAIRSGDLAEQFLDDSXALYXFAESYKKKISPKEEISLSXVELSGXVVKQGYLAKQGHKRKNWKVRRFVLRKDPAFLHYYDPSKEENRPVGGFSLRGSLVSALEDNGVPXGVKGNVQGNLFKVIXKDDXHYYIQASSKAERAEWIEAIKKLX

SEQ ID NO: 20492 - protein, 77 aa, Homo sapiens
  MOD_RES (32)..(32): Selenocysteine
  MOD_RES (45)..(45): Selenocysteine
  MOD_RES (57)..(57): Selenocysteine
  MOD_RES (59)..(59): Selenocysteine
MEDGVLKEGFLVKRGHIVHNWKARWFILRQNXLVYYKLEGGRRVXPPKGRILLDGCXIXCPCLEYENRPSHCGQDAR

SEQ ID NO: 20493 - protein, 204 aa, Homo sapiens
  MOD_RES (10)..(10): Selenocysteine
  MOD_RES (12)..(12): Selenocysteine
  MOD_RES (14)..(14): Selenocysteine
  MOD_RES (34)..(34): Selenocysteine
  MOD_RES (75)..(75): Selenocysteine
  MOD_RES (88)..(88): Selenocysteine
  MOD_RES (92)..(92): Selenocysteine
  MOD_RES (108)..(108): Selenocysteine
  MOD_RES (116)..(116): Selenocysteine
  MOD_RES (152)..(152): Selenocysteine
  MOD_RES (156)..(156): Selenocysteine
NRPLLIKLKXQXSXEYFLEACSREERDAWAFEIXGAIHAGQPGKVQQLHSLRNSFKLPPHISLHRIVDKMHDSNXGIRSSPNMEQGSXYKKXFLGSSLVDWLISNSFXASRLEAVXLASMLMEENFLRPVGVRSMGAIRSGDLAEQFLDDSXALYXFGHKRKNWKVRRFVLRKDPAFLHYYDPSKEENRPVGGFSLRGSLVSAL

SEQ ID NO: 20494 - protein, 117 aa, Homo sapiens
  MOD_RES (1)..(1): Any amino acid
  MOD_RES (10)..(10): Selenocysteine
  MOD_RES (14)..(14): Selenocysteine
  MOD_RES (33)..(33): Selenocysteine
  MOD_RES (39)..(39): Selenocysteine
  MOD_RES (75)..(75): Selenocysteine
  MOD_RES (90)..(90): Selenocysteine
  MOD_RES (94)..(94): Selenocysteine
  MOD_RES (117)..(117): Selenocysteine
XAEQFLDDSXALYXFAESYKKKISPKEEISLSXVELSGXVVKQGYLAKQEENRPVGGFSLRGSLVSALEDNGVPXGVKGNVQGNLFKVIXKDDXHYYIQASSKAERAEWIEAIKKLX

SEQ ID NO: 20495 - protein, 133 aa, Homo sapiens
  MOD_RES (34)..(34): Selenocysteine
  MOD_RES (62)..(62): Selenocysteine
  MOD_RES (71)..(71): Selenocysteine
  MOD_RES (114)..(114): Selenocysteine
MPYVDRQNRICGFLDIEENENSGKFLRRYFILDXREDSFVWYMDNPQNLPSGSSRVGAIKLXYISKVSDAXKLRPKAEFCFVMNAGMRKYFLQANDQQDLVEWVNVLNKAIKIXVPKQSDSQPNSDNLSRHGE

SEQ ID NO: 20496 - protein, 334 aa, Homo sapiens
  MOD_RES (34)..(34): Selenocysteine
  MOD_RES (62)..(62): Selenocysteine
  MOD_RES (71)..(71): Selenocysteine
  MOD_RES (114)..(114): Selenocysteine
  MOD_RES (143)..(143): Selenocysteine
  MOD_RES (153)..(153): Selenocysteine
  MOD_RES (155)..(155): Selenocysteine
  MOD_RES (183)..(183): Selenocysteine
  MOD_RES (219)..(219): Selenocysteine
  MOD_RES (262)..(263): Selenocysteine
  MOD_RES (266)..(266): Selenocysteine
  MOD_RES (316)..(316): Selenocysteine
  MOD_RES (324)..(324): Selenocysteine
MPYVDRQNRICGFLDIEENENSGKFLRRYFILDXREDSFVWYMDNPQNLPSGSSRVGAIKLXYISKVSDAXKLRPKAEFCFVMNAGMRKYFLQANDQQDLVEWVNVLNKAIKIXVPKQSDSQPNSDNLSRHGECGKKQVSYRXDIVGGVPIIXPXQKEEVNECGESIDRNNLKRSQSHLPYFXPKPPQDSAVIKAGYCVKQGAVMKNWKRRYFQLDENXIGYFKSELEKEPLRVIPLKEVHKVQECKQSDIMMRDNLFEIVXXSRXFYVQADSPEEMHSWIKAVSGAIVAQRGPGRSASSMRQARRLSNPCIQRYXSRAGECSXYVGSHANVPS

SEQ ID NO: 20497 - protein, 383 aa, Homo sapiens
  MOD_RES (34)..(34): Selenocysteine
  MOD_RES (62)..(62): Selenocysteine
  MOD_RES (71)..(71): Selenocysteine
  MOD_RES (114)..(114): Selenocysteine
  MOD_RES (143)..(143): Selenocysteine
  MOD_RES (153)..(153): Selenocysteine
  MOD_RES (155)..(155): Selenocysteine
  MOD_RES (183)..(183): Selenocysteine
  MOD_RES (219)..(219): Selenocysteine
  MOD_RES (262)..(263): Selenocysteine
  MOD_RES (266)..(266): Selenocysteine
  MOD_RES (325)..(325): Selenocysteine
  MOD_RES (331)..(331): Selenocysteine
  MOD_RES (345)..(345): Selenocysteine
  MOD_RES (359)..(359): Selenocysteine
  MOD_RES (369)..(369): Selenocysteine
MPYVDRQNRICGFLDIEENENSGKFLRRYFILDXREDSFVWYMDNPQNLPSGSSRVGAIKLXYISKVSDAXKLRPKAEFCFVMNAGMRKYFLQANDQQDLVEWVNVLNKAIKIXVPKQSDSQPNSDNLSRHGECGKKQVSYRXDIVGGVPIIXPXQKEEVNECGESIDRNNLKRSQSHLPYFXPKPPQDSAVIKAGYCVKQGAVMKNWKRRYFQLDENXIGYFKSELEKEPLRVIPLKEVHKVQECKQSDIMMRDNLFEIVXXSRXFYVQADSPEEMHSWIKAVSGAIVAQRGPGRSASSMRQARRLSNPCIQRSIPPVLQNPNXLSVLPXQPPPPHIPQPLAAXLWSQPLPWRSEDFXSLLPRSSQGXSRSRLSLQENQLPK

SEQ ID NO: 20498 - protein, 404 aa, Homo sapiens
  MOD_RES (34)..(34): Selenocysteine
  MOD_RES (62)..(62): Selenocysteine
  MOD_RES (71)..(71): Selenocysteine
  MOD_RES (114)..(114): Selenocysteine
  MOD_RES (143)..(143): Selenocysteine
  MOD_RES (153)..(153): Selenocysteine
  MOD_RES (155)..(155): Selenocysteine
  MOD_RES (183)..(183): Selenocysteine
  MOD_RES (219)..(219): Selenocysteine
  MOD_RES (262)..(263): Selenocysteine
  MOD_RES (266)..(266): Selenocysteine
  MOD_RES (316)..(316): Selenocysteine
  MOD_RES (320)..(320): Selenocysteine
  MOD_RES (322)..(322): Selenocysteine
  MOD_RES (326)..(326): Selenocysteine
  MOD_RES (336)..(336): Selenocysteine
  MOD_RES (338)..(338): Selenocysteine
  MOD_RES (360)..(360): Selenocysteine
  MOD_RES (371)..(371): Selenocysteine
MPYVDRQNRICGFLDIEENENSGKFLRRYFILDXREDSFVWYMDNPQNLPSGSSRVGAIKLXYISKVSDAXKLRPKAEFCFVMNAGMRKYFLQANDQQDLVEWVNVLNKAIKIXVPKQSDSQPNSDNLSRHGECGKKQVSYRXDIVGGVPIIXPXQKEEVNECGESIDRNNLKRSQSHLPYFXPKPPQDSAVIKAGYCVKQGAVMKNWKRRYFQLDENXIGYFKSELEKEPLRVIPLKEVHKVQECKQSDIMMRDNLFEIVXXSRXFYVQADSPEEMHSWIKAVSGAIVAQRGPGRSASSEHPPGPSESKHAFRPXNAAXAXSHSXASRSNSLVSXFXMEKRGFYESLAKVKPGNFKVQXVSPREPASKVXEQALLRPQSKNGPQEKDCDLVDLDDASLPVSDV

SEQ ID NO: 20499 - protein, 154 aa, Homo sapiens
  MOD_RES (19)..(19): Selenocysteine
  MOD_RES (38)..(38): Selenocysteine
  MOD_RES (46)..(46): Selenocysteine
  MOD_RES (85)..(85): Selenocysteine
  MOD_RES (100)..(100): Selenocysteine
  MOD_RES (109)..(109): Selenocysteine
  MOD_RES (117)..(117): Selenocysteine
  MOD_RES (124)..(124): Selenocysteine
  MOD_RES (140)..(140): Selenocysteine
MALVRGGWLWRQMHLEYRXGSILRRWKRNWFALWLDGXLGYYHDEXAQDEEDRVLIHFNVRDIKIGPECHDVQPPEGRSRDGLLXVNLREGGRLHLCAEXKDDALAWKXALLEANSXPAPAGAXVPPRSRRVCSKVRCVXRSWSPCKVERRIWV

SEQ ID NO: 20500 - protein, 180 aa, Homo sapiens
  MOD_RES (19)..(19): Selenocysteine
  MOD_RES (38)..(38): Selenocysteine
  MOD_RES (46)..(46): Selenocysteine
  MOD_RES (85)..(85): Selenocysteine
  MOD_RES (100)..(100): Selenocysteine
  MOD_RES (109)..(109): Selenocysteine
  MOD_RES (117)..(117): Selenocysteine
  MOD_RES (140)..(140): Selenocysteine
  MOD_RES (156)..(156): Selenocysteine
MALVRGGWLWRQMHLEYRXGSILRRWKRNWFALWLDGXLGYYHDEXAQDEEDRVLIHFNVRDIKIGPECHDVQPPEGRSRDGLLXVNLREGGRLHLCAEXKDDALAWKXALLEANSXPVRVYSPYQDYYEVVPPNAHEAXYVRSYYGPPYAGPGVXHVIVREDPCYSAGAPLAMGMLAGA

SEQ ID NO: 20501 - protein, 138 aa, Homo sapiens
  MOD_RES (27)..(27): Selenocysteine
  MOD_RES (42)..(42): Selenocysteine
  MOD_RES (51)..(51): Selenocysteine
  MOD_RES (59)..(59): Selenocysteine
  MOD_RES (82)..(82): Selenocysteine
  MOD_RES (98)..(98): Selenocysteine
  MOD_RES (124)..(124): Selenocysteine
MALVRGGWLWRQNVQPPEGRSRDGLLXVNLREGGRLHLCAEXKDDALAWKXALLEANSXPVRVYSPYQDYYEVVPPNAHEAXYVRSYYGPPYAGPGVXHVIVREDPCYSAGAPLAMGMLAGAAXGAALGSLMWSPCWF

SEQ ID NO: 20502 - protein, 85 aa, Homo sapiens
  MOD_RES (31)..(31): Selenocysteine
  MOD_RES (39)..(39): Selenocysteine
  MOD_RES (78)..(78): Selenocysteine
MALVRGGWLWRQSSILRRWKRNWFALWLDGXLGYYHDEXAQDEEDRVLIHFNVRDIKIGPECHDVQPPEGRSRDGLLXVNLREGG

SEQ ID NO: 20503 - protein, 160 aa, Homo sapiens
  MOD_RES (31)..(31): Selenocysteine
  MOD_RES (39)..(39): Selenocysteine
  MOD_RES (78)..(78): Selenocysteine
  MOD_RES (93)..(93): Selenocysteine
  MOD_RES (102)..(102): Selenocysteine
  MOD_RES (110)..(110): Selenocysteine
  MOD_RES (117)..(117): Selenocysteine
  MOD_RES (133)..(133): Selenocysteine
MALVRGGWLWRQSSILRRWKRNWFALWLDGXLGYYHDEXAQDEEDRVLIHFNVRDIKIGPECHDVQPPEGRSRDGLLXVNLREGGRLHLCAEXKDDALAWKXALLEANSXPAPAGAXVPPRSRRVCSKVRCVXRSWSPCKVERRIWVRVYSPYQDYYEVV

SEQ ID NO: 20504 - protein, 224 aa, Homo sapiens
  MOD_RES (31)..(31): Selenocysteine
  MOD_RES (39)..(39): Selenocysteine
  MOD_RES (78)..(78): Selenocysteine
  MOD_RES (93)..(93): Selenocysteine
  MOD_RES (102)..(102): Selenocysteine
  MOD_RES (110)..(110): Selenocysteine
  MOD_RES (117)..(117): Selenocysteine
  MOD_RES (133)..(133): Selenocysteine
  MOD_RES (168)..(168): Selenocysteine
  MOD_RES (184)..(184): Selenocysteine
  MOD_RES (210)..(210): Selenocysteine
MALVRGGWLWRQSSILRRWKRNWFALWLDGXLGYYHDEXAQDEEDRVLIHFNVRDIKIGPECHDVQPPEGRSRDGLLXVNLREGGRLHLCAEXKDDALAWKXALLEANSXPAPAGAXVPPRSRRVCSKVRCVXRSWSPCKVERRIWVRVYSPYQDYYEVVPPNAHEAXYVRSYYGPPYAGPGVXHVIVREDPCYSAGAPLAMGMLAGAAXGAALGSLMWSPCWF

SEQ ID NO: 20505 - protein, 146 aa, Homo sapiens
  MOD_RES (31)..(31): Selenocysteine
  MOD_RES (39)..(39): Selenocysteine
  MOD_RES (78)..(78): Selenocysteine
  MOD_RES (93)..(93): Selenocysteine
  MOD_RES (102)..(102): Selenocysteine
  MOD_RES (110)..(110): Selenocysteine
  MOD_RES (146)..(146): Selenocysteine
MALVRGGWLWRQSSILRRWKRNWFALWLDGXLGYYHDEXAQDEEDRVLIHFNVRDIKIGPECHDVQPPEGRSRDGLLXVNLREGGRLHLCAEXKDDALAWKXALLEANSXPMIRLKLIHPHNKYLLSCYYGPGGVPSARDQRCASX

SEQ ID NO: 20506 - protein, 117 aa, Homo sapiens
  MOD_RES (31)..(31): Selenocysteine
  MOD_RES (39)..(39): Selenocysteine
  MOD_RES (78)..(78): Selenocysteine
  MOD_RES (93)..(93): Selenocysteine
  MOD_RES (102)..(102): Selenocysteine
  MOD_RES (110)..(110): Selenocysteine
MALVRGGWLWRQSSILRRWKRNWFALWLDGXLGYYHDEXAQDEEDRVLIHFNVRDIKIGPECHDVQPPEGRSRDGLLXVNLREGGRLHLCAEXKDDALAWKXALLEANSXPVRVYSP

SEQ ID NO: 20507 - protein, 151 aa, Homo sapiens
  MOD_RES (31)..(31): Selenocysteine
  MOD_RES (39)..(39): Selenocysteine
  MOD_RES (78)..(78): Selenocysteine
  MOD_RES (93)..(93): Selenocysteine
  MOD_RES (102)..(102): Selenocysteine
  MOD_RES (110)..(110): Selenocysteine
  MOD_RES (133)..(133): Selenocysteine
MALVRGGWLWRQSSILRRWKRNWFALWLDGXLGYYHDEXAQDEEDRVLIHFNVRDIKIGPECHDVQPPEGRSRDGLLXVNLREGGRLHLCAEXKDDALAWKXALLEANSXPVRVYSPYQDYYEVVPPNAHEAXYVRSYYGPPYAGKSPACP

SEQ ID NO: 20508 - protein, 154 aa, Homo sapiens
  MOD_RES (31)..(31): Selenocysteine
  MOD_RES (39)..(39): Selenocysteine
  MOD_RES (78)..(78): Selenocysteine
  MOD_RES (93)..(93): Selenocysteine
  MOD_RES (102)..(102): Selenocysteine
  MOD_RES (110)..(110): Selenocysteine
  MOD_RES (133)..(133): Selenocysteine
  MOD_RES (149)..(149): Selenocysteine
MALVRGGWLWRQSSILRRWKRNWFALWLDGXLGYYHDEXAQDEEDRVLIHFNVRDIKIGPECHDVQPPEGRSRDGLLXVNLREGGRLHLCAEXKDDALAWKXALLEANSXPVRVYSPYQDYYEVVPPNAHEAXYVRSYYGPPYAGPGVXHVIVR

SEQ ID NO: 20509 - protein, 163 aa, Homo sapiens
  MOD_RES (31)..(31): Selenocysteine
  MOD_RES (39)..(39): Selenocysteine
  MOD_RES (78)..(78): Selenocysteine
  MOD_RES (93)..(93): Selenocysteine
  MOD_RES (102)..(102): Selenocysteine
  MOD_RES (110)..(110): Selenocysteine
  MOD_RES (133)..(133): Selenocysteine
  MOD_RES (149)..(149): Selenocysteine
MALVRGGWLWRQSSILRRWKRNWFALWLDGXLGYYHDEXAQDEEDRVLIHFNVRDIKIGPECHDVQPPEGRSRDGLLXVNLREGGRLHLCAEXKDDALAWKXALLEANSXPVRVYSPYQDYYEVVPPNAHEAXYVRSYYGPPYAGPGVXHVIVREDPCYSAGA

SEQ ID NO: 20510 - protein, 189 aa, Homo sapiens
  MOD_RES (31)..(31): Selenocysteine
  MOD_RES (39)..(39): Selenocysteine
  MOD_RES (78)..(78): Selenocysteine
  MOD_RES (93)..(93): Selenocysteine
  MOD_RES (102)..(102): Selenocysteine
  MOD_RES (110)..(110): Selenocysteine
  MOD_RES (133)..(133): Selenocysteine
  MOD_RES (149)..(149): Selenocysteine
  MOD_RES (175)..(175): Selenocysteine
MALVRGGWLWRQSSILRRWKRNWFALWLDGXLGYYHDEXAQDEEDRVLIHFNVRDIKIGPECHDVQPPEGRSRDGLLXVNLREGGRLHLCAEXKDDALAWKXALLEANSXPVRVYSPYQDYYEVVPPNAHEAXYVRSYYGPPYAGPGVXHVIVREDPCYSAGAPLAMGMLAGAAXGAALGSLMWSPCWF

SEQ ID NO: 20511 - protein, 68 aa, Homo sapiens
  MOD_RES (31)..(31): Selenocysteine
  MOD_RES (39)..(39): Selenocysteine
  MOD_RES (68)..(68): Selenocysteine
MALVRGGWLWRQSSILRRWKRNWFALWLDGXLGYYHDEXAQDEEDRVLIHFNVRDIKIGPECHGEPGX

SEQ ID NO: 20512 - protein, 243 aa, Homo sapiens
  MOD_RES (50)..(50): Selenocysteine
  MOD_RES (58)..(58): Selenocysteine
  MOD_RES (97)..(97): Selenocysteine
  MOD_RES (112)..(112): Selenocysteine
  MOD_RES (121)..(121): Selenocysteine
  MOD_RES (129)..(129): Selenocysteine
  MOD_RES (136)..(136): Selenocysteine
  MOD_RES (152)..(152): Selenocysteine
  MOD_RES (187)..(187): Selenocysteine
  MOD_RES (203)..(203): Selenocysteine
  MOD_RES (229)..(229): Selenocysteine
MSPAAPVPPDSALESPFEEMALVRGGWLWRQSSILRRWKRNWFALWLDGXLGYYHDEXAQDEEDRVLIHFNVRDIKIGPECHDVQPPEGRSRDGLLXVNLREGGRLHLCAEXKDDALAWKXALLEANSXPAPAGAXVPPRSRRVCSKVRCVXRSWSPCKVERRIWVRVYSPYQDYYEVVPPNAHEAXYVRSYYGPPYAGPGVXHVIVREDPCYSAGAPLAMGMLAGAAXGAALGSLMWSPCWF

SEQ ID NO: 20513 - protein, 208 aa, Homo sapiens
  MOD_RES (50)..(50): Selenocysteine
  MOD_RES (58)..(58): Selenocysteine
  MOD_RES (97)..(97): Selenocysteine
  MOD_RES (112)..(112): Selenocysteine
  MOD_RES (121)..(121): Selenocysteine
  MOD_RES (129)..(129): Selenocysteine
  MOD_RES (152)..(152): Selenocysteine
  MOD_RES (168)..(168): Selenocysteine
  MOD_RES (194)..(194): Selenocysteine
MSPAAPVPPDSALESPFEEMALVRGGWLWRQSSILRRWKRNWFALWLDGXLGYYHDEXAQDEEDRVLIHFNVRDIKIGPECHDVQPPEGRSRDGLLXVNLREGGRLHLCAEXKDDALAWKXALLEANSXPVRVYSPYQDYYEVVPPNAHEAXYVRSYYGPPYAGPGVXHVIVREDPCYSAGAPLAMGMLAGAAXGAALGSLMWSPCWF

SEQ ID NO: 20514 - protein, 82 aa, Homo sapiens
  MOD_RES (8)..(8): Selenocysteine
  MOD_RES (43)..(43): Selenocysteine
MVDHLANXEINSQRIAAVESCFGASGQPLALPGRVLLGEGVLXKECRKKAKPRIFFLFNDILVYGSIVLNKRKYRSQHIIPL

SEQ ID NO: 20515 - protein, 128 aa, Homo sapiens
  MOD_RES (8)..(8): Selenocysteine
  MOD_RES (43)..(43): Selenocysteine
  MOD_RES (86)..(86): Selenocysteine
  MOD_RES (93)..(93): Selenocysteine
  MOD_RES (104)..(104): Selenocysteine
  MOD_RES (117)..(117): Selenocysteine
MVDHLANXEINSQRIAAVESCFGASGQPLALPGRVLLGEGVLXKECRKKAKPRIFFLFNDILVYGSIVLNKRKYRSQHIIPLEEVXLELLPEXLQAKNRWMIKXAKKSFVVSAASAXERQEWISHIEE

SEQ ID NO: 20516 - protein, 279 aa, Homo sapiens
  MOD_RES (8)..(8): Selenocysteine
  MOD_RES (43)..(43): Selenocysteine
  MOD_RES (86)..(86): Selenocysteine
  MOD_RES (93)..(93): Selenocysteine
  MOD_RES (104)..(104): Selenocysteine
  MOD_RES (117)..(117): Selenocysteine
  MOD_RES (137)..(137): Selenocysteine
  MOD_RES (143)..(143): Selenocysteine
  MOD_RES (155)..(155): Selenocysteine
  MOD_RES (162)..(162): Selenocysteine
  MOD_RES (164)..(164): Selenocysteine
  MOD_RES (170)..(170): Selenocysteine
MVDHLANXEINSQRIAAVESCFGASGQPLALPGRVLLGEGVLXKECRKKAKPRIFFLFNDILVYGSIVLNKRKYRSQHIIPLEEVXLELLPEXLQAKNRWMIKXAKKSFVVSAASAXERQEWISHIEECVRRQLRAXGRPPSXEHAAPWIPDKAXDICMRCXQXRFSALXRRHHCRKCGFVVCAECSRQRFLLPRLSPKPVRVCSLCYRELAAQQRQEEAEEQGAGSPGQPAHLARPICGASSGDDDDSDEDKEGSRDGDWPSSVEFYASGVAWSAFHS

SEQ ID NO: 20517 - protein, 392 aa, Homo sapiens
  MOD_RES (49)..(49): Selenocysteine
  MOD_RES (53)..(53): Selenocysteine
  MOD_RES (63)..(63): Selenocysteine
  MOD_RES (81)..(81): Selenocysteine
  MOD_RES (117)..(117): Selenocysteine
  MOD_RES (129)..(129): Selenocysteine
  MOD_RES (158)..(158): Selenocysteine
  MOD_RES (166)..(166): Selenocysteine
  MOD_RES (176)..(176): Selenocysteine
  MOD_RES (187)..(187): Selenocysteine
  MOD_RES (198)..(198): Selenocysteine
  MOD_RES (204)..(204): Selenocysteine
  MOD_RES (206)..(206): Selenocysteine
  MOD_RES (242)..(242): Selenocysteine
  MOD_RES (297)..(297): Selenocysteine
  MOD_RES (328)..(328): Selenocysteine
  MOD_RES (331)..(331): Selenocysteine
  MOD_RES (365)..(365): Selenocysteine
  MOD_RES (381)..(381): Selenocysteine
  MOD_RES (387)..(388): Selenocysteine
EERSALFGNIQDIYHFNSELLQDLENCENDPVAIAECFVSKSEEFHIYXQYCXNYPRSVAVLXECMRNKILAKFFRERQEXLKHSLPLGSYLLKPVQRILKYHLLLHEIENHLDKDXEGYDVVLDAIDXMQRVAWHINDMKRKHEHAVRLQEIQSLLXNWKGPDLXSYGELVLEGXFRIQRAKNERXLFLFDKLLLIXKKRDDXFXYKAHILCGNLMLVEVIPKEPLSFSVFHYKNPKLQHXVQAKSQQDKRLWVLHLKRLILENHAAKIPAKAKQAILEMDAIHHPGFCYSPEGGXKALFGSKEGSAPYRLRRKSEPSSRSHKVLKXSEXAQDIQKVSREEGSPQLSSARPSPAQRNSQPSSSXMISVLRAGGALRNIWXDHQISXXFGNG

SEQ ID NO: 20518 - protein, 46 aa, Homo sapiens
  MOD_RES (15)..(15): Selenocysteine
  MOD_RES (33)..(33): Selenocysteine
MELSDSDRPVSFGSXSSSASSRDSHGSFGSRMXLVSNSHMGLFNQD

SEQ ID NO: 20519 - protein, 1385 aa, Homo sapiens
  MOD_RES (15)..(15): Selenocysteine
  MOD_RES (33)..(33): Selenocysteine
  MOD_RES (74)..(74): Selenocysteine
  MOD_RES (101)..(101): Selenocysteine
  MOD_RES (107)..(107): Selenocysteine
  MOD_RES (124)..(124): Selenocysteine
  MOD_RES (127)..(127): Selenocysteine
  MOD_RES (147)..(147): Selenocysteine
  MOD_RES (153)..(153): Selenocysteine
  MOD_RES (202)..(202): Selenocysteine
  MOD_RES (206)..(206): Selenocysteine
  MOD_RES (216)..(216): Selenocysteine
  MOD_RES (234)..(234): Selenocysteine
  MOD_RES (270)..(270): Selenocysteine
  MOD_RES (282)..(282): Selenocysteine
  MOD_RES (311)..(311): Selenocysteine
  MOD_RES (319)..(319): Selenocysteine
  MOD_RES (329)..(329): Selenocysteine
  MOD_RES (340)..(340): Selenocysteine
  MOD_RES (351)..(351): Selenocysteine
  MOD_RES (357)..(357): Selenocysteine
  MOD_RES (359)..(359): Selenocysteine
  MOD_RES (395)..(395): Selenocysteine
  MOD_RES (450)..(450): Selenocysteine
  MOD_RES (481)..(481): Selenocysteine
  MOD_RES (484)..(484): Selenocysteine
  MOD_RES (518)..(518): Selenocysteine
  MOD_RES (534)..(534): Selenocysteine
  MOD_RES (574)..(574): Selenocysteine
  MOD_RES (581)..(581): Selenocysteine
  MOD_RES (596)..(596): Selenocysteine
  MOD_RES (598)..(598): Selenocysteine
  MOD_RES (617)..(617): Selenocysteine
  MOD_RES (624)..(624): Selenocysteine
  MOD_RES (628)..(628): Selenocysteine
  MOD_RES (637)..(637): Selenocysteine
  MOD_RES (644)..(644): Selenocysteine
  MOD_RES (653)..(653): Selenocysteine
  MOD_RES (682)..(682): Selenocysteine
  MOD_RES (696)..(696): Selenocysteine
  MOD_RES (702)..(702): Selenocysteine
  MOD_RES (717)..(717): Selenocysteine
  MOD_RES (720)..(720): Selenocysteine
  MOD_RES (731)..(731): Selenocysteine
  MOD_RES (744)..(744): Selenocysteine
  MOD_RES (767)..(767): Selenocysteine
  MOD_RES (803)..(803): Selenocysteine
  MOD_RES (877)..(877): Selenocysteine
  MOD_RES (890)..(890): Selenocysteine
  MOD_RES (901)..(901): Selenocysteine
  MOD_RES (957)..(957): Selenocysteine
  MOD_RES (969)..(969): Selenocysteine
  MOD_RES (972)..(972): Selenocysteine
  MOD_RES (1088)..(1088): Selenocysteine
  MOD_RES (1111)..(1111): Selenocysteine
  MOD_RES (1116)..(1116): Selenocysteine
  MOD_RES (1119)..(1119): Selenocysteine
  MOD_RES (1134)..(1134): Selenocysteine
  MOD_RES (1234)..(1234): Selenocysteine
  MOD_RES (1241)..(1241): Selenocysteine
  MOD_RES (1263)..(1263): Selenocysteine
  MOD_RES (1273)..(1273): Selenocysteine
  MOD_RES (1320)..(1320): Selenocysteine
  MOD_RES (1329)..(1329): Selenocysteine
  MOD_RES (1345)..(1345): Selenocysteine
MELSDSDRPVSFGSXSSSASSRDSHGSFGSRMXLVSNSHMGLFNQDKEVGAIKLELIPARPFSSSELQRDNPAXGQQNADEGSERPPRAQWRVDSNGAPKXIADSAXSPKLLYVDRVVQEILEXERXYVQDLKSIVEDYLDCIRDQXKLPLGXEERSALFGNIQDIYHFNSELLQDLENCENDPVAIAECFVSKSEEFHIYXQYCXNYPRSVAVLXECMRNKILAKFFRERQEXLKHSLPLGSYLLKPVQRILKYHLLLHEIENHLDKDXEGYDVVLDAIDXMQRVAWHINDMKRKHEHAVRLQEIQSLLXNWKGPDLXSYGELVLEGXFRIQRAKNERXLFLFDKLLLIXKKRDDXFXYKAHILCGNLMLVEVIPKEPLSFSVFHYKNPKLQHXVQAKSQQDKRLWVLHLKRLILENHAAKIPAKAKQAILEMDAIHHPGFCYSPEGGXKALFGSKEGSAPYRLRRKSEPSSRSHKVLKXSEXAQDIQKVSREEGSPQLSSARPSPAQRNSQPSSSXMISVLRAGGALRNIWXDHQIRQALFPSRRSPQENEDDEDDYQMFVPSFSSSDLNSXRLCEDSXSSRPCSWHMGQMESXEXSSSGHRIVRRASSAGESNXCPPEIGXSDRXRELQNSPKXEGQEEMXPFGSSIELXIDDIDHVYDNISYEDLKLMVAKREEAESXPSKSARDSVRPKSXPELAFXKRQAGHSKGSLYAQXDGXLSGGEASSQSXHELQAVEENIYDXIGLPDPPSLGFKCSSLKRAKRSXFLGLEADFVCCDSLRPFVSQDSLQLSEDEAPYHQAXPDHGYLSLLYDSPSGNLSMPHKPVSDKLSEEVDEIWNDLENYIKKNEDKARDRLLAAFPVSKDDVPDRLHAESXPELSRDVGRSVSXLSLPESQALLXPVKSRAGRASRANCPFEEDLISKEGSFMSLNRLSLASEMPLMDNPYDLANSGLSQXDPENPDLGMEAXDKXKSRVFMMARQYSQKIKKANQLLKVKSLELEQPPASQHQKSMHKDLAAILEEKKQGGPAIGARIAEYSQLYDQIVFRESPLKIQKDGWASPQESSLLRSVSPSQVHHGSGDWLLHSXYSNGELADFCLPPEQDLRSRYPXFEINXKSXPRQLSAACSVPSLQXSDPLPGSVQRCSVVVSQPNKENWCQDHLYNSLGRKGISAKSQPYHRSQSSSSVLINKSMDSINYPSDVGKQQLLSLHRSSRCESHQDLLPDIADSHQQGXEKLSDLXLQDSQKVVVVNRNLPLNAQIAXQNYFSNFKEXDGDEDDYVEIKSEEDESELELSHNRRRKSDSKFVDADFSDNVCSGNXLHSLNSPRXPKKPVNSKLGLSPYLXPYNDSDKLNDYLWRGPSPNQQNIVQSLREKFQCLSSSSFA

SEQ ID NO: 20520 - protein, 103 aa, Homo sapiens
  MOD_RES (22)..(22): Selenocysteine
  MOD_RES (45)..(45): Selenocysteine
EDSDLGGDSGSGKAGAPSSERXASRVRELARLYSERIQQMQRAEXRASANAPRRRPRVLAQPQPSPCLPQEQAEPGLLPAFGHVLESMGLHRAQGAPDAPFHM

SEQ ID NO: 20521 - protein, 127 aa, Homo sapiens
  MOD_RES (30)..(30): Selenocysteine
  MOD_RES (34)..(34): Selenocysteine
  MOD_RES (36)..(36): Selenocysteine
  MOD_RES (43)..(43): Selenocysteine
  MOD_RES (54)..(54): Selenocysteine
  MOD_RES (58)..(58): Selenocysteine
  MOD_RES (70)..(70): Selenocysteine
  MOD_RES (114)..(114): Selenocysteine
MPEGAQGLSLSKPSPSLGCGRRGEVCDCGXVCEXRXAAPAAPXMASPRGSGSSXSLSXVGSEGDPAPGPXPACSASRPEPLPGPPIRLHLSPVGIPGSARPSRLERVAREIVEXERAYVRDLRSIVE

SEQ ID NO: 20522 - protein, 198 aa, Homo sapiens
  MOD_RES (30)..(30): Selenocysteine
  MOD_RES (34)..(34): Selenocysteine
  MOD_RES (36)..(36): Selenocysteine
  MOD_RES (43)..(43): Selenocysteine
  MOD_RES (54)..(54): Selenocysteine
  MOD_RES (58)..(58): Selenocysteine
  MOD_RES (70)..(70): Selenocysteine
  MOD_RES (114)..(114): Selenocysteine
  MOD_RES (148)..(148): Selenocysteine
  MOD_RES (191)..(191): Selenocysteine
MPEGAQGLSLSKPSPSLGCGRRGEVCDCGXVCEXRXAAPAAPXMASPRGSGSSXSLSXVGSEGDPAPGPXPACSASRPEPLPGPPIRLHLSPVGIPGSARPSRLERVAREIVEXERAYVRDLRSIVEDYLGPLLDGGVLGLSVEQVGXLFANIEDIYEFSSELLEDLENSSSAGGIAECFVQRSEDFDIYXLYCMNYP

SEQ ID NO: 20523 - protein, 577 aa, Homo sapiens
  MOD_RES (30)..(30): Selenocysteine
  MOD_RES (34)..(34): Selenocysteine
  MOD_RES (36)..(36): Selenocysteine
  MOD_RES (42)..(42): Selenocysteine
  MOD_RES (53)..(53): Selenocysteine
  MOD_RES (57)..(57): Selenocysteine
  MOD_RES (69)..(69): Selenocysteine
  MOD_RES (113)..(113): Selenocysteine
  MOD_RES (147)..(147): Selenocysteine
  MOD_RES (190)..(190): Selenocysteine
  MOD_RES (260)..(260): Selenocysteine
  MOD_RES (274)..(274): Selenocysteine
  MOD_RES (304)..(304): Selenocysteine
  MOD_RES (355)..(355): Selenocysteine
  MOD_RES (383)..(383): Selenocysteine
  MOD_RES (445)..(445): Selenocysteine
  MOD_RES (460)..(460): Selenocysteine
  MOD_RES (466)..(466): Selenocysteine
  MOD_RES (534)..(534): Selenocysteine
  MOD_RES (540)..(540): Selenocysteine
  MOD_RES (543)..(543): Selenocysteine
MPEGAQGLSLSKPSPSLGCGRRGEVCDCGXVCEXRXAPAAPXMASPRGSGSSXSLSXVGSEGDPAPGPXPACSASRPEPLPGPPIRLHLSPVGIPGSARPSRLERVAREIVEXERAYVRDLRSIVEDYLGPLLDGGVLGLSVEQVGXLFANIEDIYEFSSELLEDLENSSSAGGIAECFVQRSEDFDIYXLYCMNYPSSLALLRELSLSPPAALWLQERQAQLRHSLPLQSFLLKPVQRILKYHLLLQELGKHWAEGPGXGGREMVEEAIVSMXAVAWYINDMKRKQEHAARLQEVQRRLGGWXGPELSAFGELVLEGAFRGGGGGGPRLRGGERLLFLFSRMLLVAKRRGLEYXYKGHIFCCNLSVSESPRDPLGFKVSDLXIPKHRHLLQAKNQEEKRLWIHCLQRLFFENHPASIPAKAKQVLLENSLHCAPKSKPVLEPLXPPLGSPRPRDARSFXPGRRNXAPSPGPSVIRRGRRQSEPVKDPYVMFPQNAKPGFKHAGSEGELYPPESQPPVSGSAPPEDLEDAGPPXLDPSGXSIXEEILELLNQRGLRDPGESMGLHRAQGAPDAPFHM

SEQ ID NO: 20524 - protein, 1386 aa, Homo sapiens
  MOD_RES (30)..(30): Selenocysteine
  MOD_RES (34)..(34): Selenocysteine
  MOD_RES (36)..(36): Selenocysteine
  MOD_RES (42)..(42): Selenocysteine
  MOD_RES (53)..(53): Selenocysteine
  MOD_RES (57)..(57): Selenocysteine
  MOD_RES (69)..(69): Selenocysteine
  MOD_RES (113)..(113): Selenocysteine
  MOD_RES (147)..(147): Selenocysteine
  MOD_RES (190)..(190): Selenocysteine
  MOD_RES (260)..(260): Selenocysteine
  MOD_RES (274)..(274): Selenocysteine
  MOD_RES (304)..(304): Selenocysteine
  MOD_RES (355)..(355): Selenocysteine
  MOD_RES (383)..(383): Selenocysteine
  MOD_RES (445)..(445): Selenocysteine
  MOD_RES (460)..(460): Selenocysteine
  MOD_RES (466)..(466): Selenocysteine
  MOD_RES (534)..(534): Selenocysteine
  MOD_RES (540)..(540): Selenocysteine
  MOD_RES (543)..(543): Selenocysteine
  MOD_RES (562)..(562): Selenocysteine
  MOD_RES (580)..(580): Selenocysteine
  MOD_RES (582)..(582): Selenocysteine
  MOD_RES (633)..(633): Selenocysteine
  MOD_RES (680)..(680): Selenocysteine
  MOD_RES (686)..(686): Selenocysteine
  MOD_RES (688)..(688): Selenocysteine
  MOD_RES (708)..(708): Selenocysteine
  MOD_RES (742)..(742): Selenocysteine
  MOD_RES (750)..(750): Selenocysteine
  MOD_RES (813)..(813): Selenocysteine
  MOD_RES (836)..(836): Selenocysteine
  MOD_RES (885)..(885): Selenocysteine
  MOD_RES (936)..(936): Selenocysteine
  MOD_RES (953)..(953): Selenocysteine
  MOD_RES (970)..(971): Selenocysteine
  MOD_RES (985)..(986): Selenocysteine
  MOD_RES (1002)..(1002): Selenocysteine
  MOD_RES (1018)..(1019): Selenocysteine
  MOD_RES (1031)..(1031): Selenocysteine
  MOD_RES (1035)..(1036): Selenocysteine
  MOD_RES (1051)..(1051): Selenocysteine
  MOD_RES (1056)..(1056): Selenocysteine
  MOD_RES (1093)..(1093): Selenocysteine
  MOD_RES (1109)..(1109): Selenocysteine
  MOD_RES (1138)..(1138): Selenocysteine
  MOD_RES (1143)..(1144): Selenocysteine
  MOD_RES (1153)..(1153): Selenocysteine
  MOD_RES (1162)..(1162): Selenocysteine
  MOD_RES (1187)..(1187): Selenocysteine
  MOD_RES (1189)..(1189): Selenocysteine
  MOD_RES (1195)..(1195): Selenocysteine
  MOD_RES (1212)..(1212): Selenocysteine
  MOD_RES (1229)..(1229): Selenocysteine
  MOD_RES (1233)..(1234): Selenocysteine
  MOD_RES (1257)..(1257): Selenocysteine
  MOD_RES (1313)..(1313): Selenocysteine
  MOD_RES (1337)..(1338): Selenocysteine
  MOD_RES (1367)..(1367): Selenocysteine
MPEGAQGLSLSKPSPSLGCGRRGEVCDCGXVCEXRXAPAAPXMASPRGSGSSXSLSXVGSEGDPAPGPXPACSASRPEPLPGPPIRLHLSPVGIPGSARPSRLERVAREIVEXERAYVRDLRSIVEDYLGPLLDGGVLGLSVEQVGXLFANIEDIYEFSSELLEDLENSSSAGGIAECFVQRSEDFDIYXLYCMNYPSSLALLRELSLSPPAALWLQERQAQLRHSLPLQSFLLKPVQRILKYHLLLQELGKHWAEGPGXGGREMVEEAIVSMXAVAWYINDMKRKQEHAARLQEVQRRLGGWXGPELSAFGELVLEGAFRGGGGGGPRLRGGERLLFLFSRMLLVAKRRGLEYXYKGHIFCCNLSVSESPRDPLGFKVSDLXIPKHRHLLQAKNQEEKRLWIHCLQRLFFENHPASIPAKAKQVLLENSLHCAPKSKPVLEPLXPPLGSPRPRDARSFXPGRRNXAPSPGPSVIRRGRRQSEPVKDPYVMFPQNAKPGFKHAGSEGELYPPESQPPVSGSAPPEDLEDAGPPXLDPSGXSIXEEILELLNQRGLRDPGPSXHDIPKFPGDSQVPGDSEXLXFQALPSRDSSEEEEEEEEGLEMDERGPSPLHVLEGLESSIAAEMPSIPCLXKIPDVPNLPEIPSRCEIPEGSRLPSLSDISDVFEMPCLPAIPSVPNXPSLSSXPXLSCDSWLQGPLQEPAEAPAXRRELFSGSNPGKLGEPPSGGKAGPEEDEEGVSFXDFQPQDVXQHQGFPDELAFRSCSEIRSAWQALEQGQLARPGFPEPLLILEDSDLGGDSGSGKAGAPSSERXASRVRELARLYSERIQQMQRAEXRASANAPRRRPRVLAQPQPSPCLPQEQAEPGLLPAFGHVLVCELAFPLXCAQESVPLGPAVWVQAAIPLSKQGGSPDGQGLHVSNLPKQDLPGIHVSAAXLLPEQGGSRHVQAPAAXPLPKQEGPLHLQVPALXXFSDQGHPEIQVPAXXPLPEHRSHMVIPAPSXAFCPEQGHCADIHVPXXPALPKEICSDFXVSVXXPVPKQEGHLDSESPXNIPLXKQGGSRDVQGPDPVCSQPIQPLSWHGSSLDPQGPGDXLPPLPCHLPDLQIPGXSPLPAHGSHLDHRIPANAPLSLSQELPDXQVPAXXPLPLPQVLXDIWVQALPXSPKQGSLPDIQGPAAAPPLPEPSLXDXQVQKLXPSLEQKSLIDAHVPAAXPLPERGGSLDIQGLSPXPVQXXMVLSKPGGSLASHVARLESSDLXPPHSPPPSSRQLLGPNAAALSRYLAASYISQSLARRQGPGGGAPAASRGSWSSAPXSRASSPPPQPQPPPPPARRLSYAXXVNIHVGGGGRLRPAKAQVRLNHPALLASXQESMGLHRAQGAPDAPFHM

SEQ ID NO: 20525 - protein, 49 aa, Homo sapiens
  MOD_RES (30)..(30): Selenocysteine
  MOD_RES (34)..(34): Selenocysteine
  MOD_RES (36)..(36): Selenocysteine
MPEGAQGLSLSKPSPSLGCGRRGEVCDCGXVCEXRXGEPRGRGGGACGA

SEQ ID NO: 20526 - protein, 1237 aa, Homo sapiens
  MOD_RES (30)..(30): Selenocysteine
  MOD_RES (34)..(34): Selenocysteine
  MOD_RES (36)..(36): Selenocysteine
  MOD_RES (54)..(54): Selenocysteine
  MOD_RES (88)..(88): Selenocysteine
  MOD_RES (131)..(131): Selenocysteine
  MOD_RES (201)..(201): Selenocysteine
  MOD_RES (215)..(215): Selenocysteine
  MOD_RES (245)..(245): Selenocysteine
  MOD_RES (296)..(296): Selenocysteine
  MOD_RES (324)..(324): Selenocysteine
  MOD_RES (386)..(386): Selenocysteine
  MOD_RES (401)..(401): Selenocysteine
  MOD_RES (407)..(407): Selenocysteine
  MOD_RES (475)..(475): Selenocysteine
  MOD_RES (481)..(481): Selenocysteine
  MOD_RES (484)..(484): Selenocysteine
  MOD_RES (503)..(503): Selenocysteine
  MOD_RES (521)..(521): Selenocysteine
  MOD_RES (523)..(523): Selenocysteine
  MOD_RES (574)..(574): Selenocysteine
  MOD_RES (621)..(621): Selenocysteine
  MOD_RES (627)..(627): Selenocysteine
  MOD_RES (629)..(629): Selenocysteine
  MOD_RES (649)..(649): Selenocysteine
  MOD_RES (683)..(683): Selenocysteine
  MOD_RES (691)..(691): Selenocysteine
  MOD_RES (754)..(754): Selenocysteine
  MOD_RES (777)..(777): Selenocysteine
  MOD_RES (826)..(826): Selenocysteine
  MOD_RES (877)..(877): Selenocysteine
  MOD_RES (894)..(894): Selenocysteine
  MOD_RES (911)..(912): Selenocysteine
  MOD_RES (926)..(927): Selenocysteine
  MOD_RES (943)..(943): Selenocysteine
  MOD_RES (959)..(960): Selenocysteine
  MOD_RES (972)..(972): Selenocysteine
  MOD_RES (976)..(977): Selenocysteine
  MOD_RES (992)..(992): Selenocysteine
  MOD_RES (997)..(997): Selenocysteine
  MOD_RES (1034)..(1034): Selenocysteine
  MOD_RES (1050)..(1050): Selenocysteine
  MOD_RES (1079)..(1079): Selenocysteine
  MOD_RES (1084)..(1085): Selenocysteine
  MOD_RES (1094)..(1094): Selenocysteine
  MOD_RES (1103)..(1103): Selenocysteine
  MOD_RES (1128)..(1128): Selenocysteine
  MOD_RES (1130)..(1130): Selenocysteine
  MOD_RES (1136)..(1136): Selenocysteine
  MOD_RES (1153)..(1153): Selenocysteine
  MOD_RES (1170)..(1170): Selenocysteine
  MOD_RES (1174)..(1175): Selenocysteine
  MOD_RES (1197)..(1197): Selenocysteine
  MOD_RES (1208)..(1208): Selenocysteine
  MOD_RES (1232)..(1232): Selenocysteine
MPEGAQGLSLSKPSPSLGCGRRGEVCDCGXVCEXRXGSARPSRLERVAREIVEXERAYVRDLRSIVEDYLGPLLDGGVLGLSVEQVGXLFANIEDIYEFSSELLEDLENSSSAGGIAECFVQRSEDFDIYXLYCMNYPSSLALLRELSLSPPAALWLQERQAQLRHSLPLQSFLLKPVQRILKYHLLLQELGKHWAEGPGXGGREMVEEAIVSMXAVAWYINDMKRKQEHAARLQEVQRRLGGWXGPELSAFGELVLEGAFRGGGGGGPRLRGGERLLFLFSRMLLVAKRRGLEYXYKGHIFCCNLSVSESPRDPLGFKVSDLXIPKHRHLLQAKNQEEKRLWIHCLQRLFFENHPASIPAKAKQVLLENSLHCAPKSKPVLEPLXPPLGSPRPRDARSFXPGRRNXAPSPGPSVIRRGRRQSEPVKDPYVMFPQNAKPGFKHAGSEGELYPPESQPPVSGSAPPEDLEDAGPPXLDPSGXSIXEEILELLNQRGLRDPGPSXHDIPKFPGDSQVPGDSEXLXFQALPSRDSSEEEEEEEEGLEMDERGPSPLHVLEGLESSIAAEMPSIPCLXKIPDVPNLPEIPSRCEIPEGSRLPSLSDISDVFEMPCLPAIPSVPNXPSLSSXPXLSCDSWLQGPLQEPAEAPAXRRELFSGSNPGKLGEPPSGGKAGPEEDEEGVSFXDFQPQDVXQHQGFPDELAFRSCSEIRSAWQALEQGQLARPGFPEPLLILEDSDLGGDSGSGKAGAPSSERXASRVRELARLYSERIQQMQRAEXRASANAPRRRPRVLAQPQPSPCLPQEQAEPGLLPAFGHVLVCELAFPLXCAQESVPLGPAVWVQAAIPLSKQGGSPDGQGLHVSNLPKQDLPGIHVSAAXLLPEQGGSRHVQAPAAXPLPKQEGPLHLQVPALXXFSDQGHPEIQVPAXXPLPEHRSHMVIPAPSXAFCPEQGHCADIHVPXXPALPKEICSDFXVSVXXPVPKQEGHLDSESPXNIPLXKQGGSRDVQGPDPVCSQPIQPLSWHGSSLDPQGPGDXLPPLPCHLPDLQIPGXSPLPAHGSHLDHRIPANAPLSLSQELPDXQVPAXXPLPLPQVLXDIWVQALPXSPKQGSLPDIQGPAAAPPLPEPSLXDXQVQKLXPSLEQKSLIDAHVPAAXPLPERGGSLDIQGLSPXPVQXXMVLSKPGGSLASHVARNLWAFXGPRGLLMPPSXCEPGHEASLKQGFQPDAIDPQNLXWKSRH

SEQ ID NO: 20527 - protein, 115 aa, Homo sapiens
  MOD_RES (11)..(11): Selenocysteine
  MOD_RES (17)..(17): Selenocysteine
  MOD_RES (72)..(72): Selenocysteine
  MOD_RES (78)..(78): Selenocysteine
  MOD_RES (81)..(81): Selenocysteine
SPRPRDARSFXPGRRNXAPSPGPSVIRRGRRQSAKPGFKHAGSEGELYPPESQPPVSGSAPPEDLEDAGPPXLDPSGXSIXEEILELLNQRGLRDPGESMGLHRAQGAPDAPFHM

SEQ ID NO: 20528 - protein, 153 aa, Homo sapiens
  MOD_RES (1)..(1): Selenocysteine
  MOD_RES (10)..(10): Selenocysteine
  MOD_RES (19)..(19): Selenocysteine
  MOD_RES (44)..(44): Selenocysteine
  MOD_RES (46)..(46): Selenocysteine
  MOD_RES (52)..(52): Selenocysteine
  MOD_RES (69)..(69): Selenocysteine
  MOD_RES (86)..(86): Selenocysteine
  MOD_RES (90)..(91): Selenocysteine
  MOD_RES (113)..(113): Selenocysteine
  MOD_RES (124)..(124): Selenocysteine
  MOD_RES (148)..(148): Selenocysteine
XPLPLPQVLXDIWVQALPXSPKQGSLPDIQGPAAAPPLPEPSLXDXQVQKLXPSLEQKSLIDAHVPAAXPLPERGGSLDIQGLSPXPVQXXMVLSKPGGSLASHVARNLWAFXGPRGLLMPPSXCEPGHEASLKQGFQPDAIDPQNLXWKSRH

SEQ ID NO: 20529 - protein, 95 aa, Homo sapiens
  MOD_RES (1)..(1): Any amino acid
  MOD_RES (15)..(15): Selenocysteine
  MOD_RES (36)..(37): Selenocysteine
  MOD_RES (55)..(55): Selenocysteine
  MOD_RES (66)..(66): Selenocysteine
  MOD_RES (90)..(90): Selenocysteine
XFQGCSGPRPCLQSXHPAFVLAWKQPGSPGPRRHPXXLAMSPPRPSDSRNLWAFXGPRGLLMPPSXCEPGHEASLKQGFQPDAIDPQNLXWKSRH

SEQ ID NO: 20530 - protein, 41 aa, Homo sapiens
  MOD_RES (1)..(1): Any amino acid
  MOD_RES (8)..(8): Selenocysteine
  MOD_RES (16)..(16): Selenocysteine
  MOD_RES (19)..(19): Selenocysteine
XIPRAQAXPYHPCHVXSQXFRFQESMGLHRAQGAPDAPFHM

SEQ ID NO: 20531 - protein, 84 aa, Homo sapiens
  MOD_RES (1)..(1): Any amino acid
  MOD_RES (17)..(17): Selenocysteine
  MOD_RES (21)..(22): Selenocysteine
  MOD_RES (44)..(44): Selenocysteine
  MOD_RES (55)..(55): Selenocysteine
  MOD_RES (79)..(79): Selenocysteine
XLPERGGSLDIQGLSPXPVQXXMVLSKPGGSLASHVARNLWAFXGPRGLLMPPSXCEPGHEASLKQGFQPDAIDPQNLXWKSRH

SEQ ID NO: 20532 - protein, 1254 aa, Homo sapiens
  MOD_RES (1)..(1): Any amino acid
  MOD_RES (10)..(10): Selenocysteine
  MOD_RES (44)..(44): Selenocysteine
  MOD_RES (87)..(87): Selenocysteine
  MOD_RES (157)..(157): Selenocysteine
  MOD_RES (171)..(171): Selenocysteine
  MOD_RES (201)..(201): Selenocysteine
  MOD_RES (252)..(252): Selenocysteine
  MOD_RES (280)..(280): Selenocysteine
  MOD_RES (342)..(342): Selenocysteine
  MOD_RES (357)..(357): Selenocysteine
  MOD_RES (363)..(363): Selenocysteine
  MOD_RES (402)..(402): Selenocysteine
  MOD_RES (408)..(408): Selenocysteine
  MOD_RES (411)..(411): Selenocysteine
  MOD_RES (430)..(430): Selenocysteine
  MOD_RES (448)..(448): Selenocysteine
  MOD_RES (450)..(450): Selenocysteine
  MOD_RES (501)..(501): Selenocysteine
  MOD_RES (548)..(548): Selenocysteine
  MOD_RES (554)..(554): Selenocysteine
  MOD_RES (556)..(556): Selenocysteine
  MOD_RES (576)..(576): Selenocysteine
  MOD_RES (610)..(610): Selenocysteine
  MOD_RES (618)..(618): Selenocysteine
  MOD_RES (681)..(681): Selenocysteine
  MOD_RES (704)..(704): Selenocysteine
  MOD_RES (753)..(753): Selenocysteine
  MOD_RES (804)..(804): Selenocysteine
  MOD_RES (821)..(821): Selenocysteine
  MOD_RES (838)..(839): Selenocysteine
  MOD_RES (853)..(854): Selenocysteine
  MOD_RES (870)..(870): Selenocysteine
  MOD_RES (886)..(887): Selenocysteine
  MOD_RES (899)..(899): Selenocysteine
  MOD_RES (903)..(904): Selenocysteine
  MOD_RES (919)..(919): Selenocysteine
  MOD_RES (924)..(924): Selenocysteine
  MOD_RES (961)..(961): Selenocysteine
  MOD_RES (977)..(977): Selenocysteine
  MOD_RES (1006)..(1006): Selenocysteine
  MOD_RES (1011)..(1012): Selenocysteine
  MOD_RES (1021)..(1021): Selenocysteine
  MOD_RES (1030)..(1030): Selenocysteine
  MOD_RES (1055)..(1055): Selenocysteine
  MOD_RES (1057)..(1057): Selenocysteine
  MOD_RES (1063)..(1063): Selenocysteine
  MOD_RES (1080)..(1080): Selenocysteine
  MOD_RES (1097)..(1097): Selenocysteine
  MOD_RES (1101)..(1102): Selenocysteine
  MOD_RES (1125)..(1125): Selenocysteine
  MOD_RES (1181)..(1181): Selenocysteine
  MOD_RES (1205)..(1206): Selenocysteine
  MOD_RES (1235)..(1235): Selenocysteine
XRVAREIVEXERAYVRDLRSIVEDYLGPLLDGGVLGLSVEQVGXLFANIEDIYEFSSELLEDLENSSSAGGIAECFVQRSEDFDIYXLYCMNYPSSLALLRELSLSPPAALWLQERQAQLRHSLPLQSFLLKPVQRILKYHLLLQELGKHWAEGPGXGGREMVEEAIVSMXAVAWYINDMKRKQEHAARLQEVQRRLGGWXGPELSAFGELVLEGAFRGGGGGGPRLRGGERLLFLFSRMLLVAKRRGLEYXYKGHIFCCNLSVSESPRDPLGFKVSDLXIPKHRHLLQAKNQEEKRLWIHCLQRLFFENHPASIPAKAKQVLLENSLHCAPKSKPVLEPLXPPLGSPRPRDARSFXPGRRNXAKPGFKHAGSEGELYPPESQPPVSGSAPPEDLEDAGPPXLDPSGXSIXEEILELLNQRGLRDPGPSXHDIPKFPGDSQVPGDSEXLXFQALPSRDSSEEEEEEEEGLEMDERGPSPLHVLEGLESSIAAEMPSIPCLXKIPDVPNLPEIPSRCEIPEGSRLPSLSDISDVFEMPCLPAIPSVPNXPSLSSXPXLSCDSWLQGPLQEPAEAPAXRRELFSGSNPGKLGEPPSGGKAGPEEDEEGVSFXDFQPQDVXQHQGFPDELAFRSCSEIRSAWQALEQGQLARPGFPEPLLILEDSDLGGDSGSGKAGAPSSERXASRVRELARLYSERIQQMQRAEXRASANAPRRRPRVLAQPQPSPCLPQEQAEPGLLPAFGHVLVCELAFPLXCAQESVPLGPAVWVQAAIPLSKQGGSPDGQGLHVSNLPKQDLPGIHVSAAXLLPEQGGSRHVQAPAAXPLPKQEGPLHLQVPALXXFSDQGHPEIQVPAXXPLPEHRSHMVIPAPSXAFCPEQGHCADIHVPXXPALPKEICSDFXVSVXXPVPKQEGHLDSESPXNIPLXKQGGSRDVQGPDPVCSQPIQPLSWHGSSLDPQGPGDXLPPLPCHLPDLQIPGXSPLPAHGSHLDHRIPANAPLSLSQELPDXQVPAXXPLPLPQVLXDIWVQALPXSPKQGSLPDIQGPAAAPPLPEPSLXDXQVQKLXPSLEQKSLIDAHVPAAXPLPERGGSLDIQGLSPXPVQXXMVLSKPGGSLASHVARLESSDLXPPHSPPPSSRQLLGPNAAALSRYLAASYISQSLARRQGPGGGAPAASRGSWSSAPXSRASSPPPQPQPPPPPARRLSYAXXVNIHVGGGGRLRPAKAQVRLNHPALLASXQESMGLHRAQGAPDAPFHM

SEQ ID NO: 20533 - protein, 63 aa, Homo sapiens
  MOD_RES (26)..(26): Selenocysteine
  MOD_RES (41)..(41): Selenocysteine
  MOD_RES (43)..(44): Selenocysteine
MGALLRKANLPGVPSPGSNARMPVSXSLHQDGSQERPVSLXSXXSSSGSSCDSRSAMEEPSSS

SEQ ID NO: 20534 - protein, 752 aa, Homo sapiens
  MOD_RES (23)..(23): Selenocysteine
  MOD_RES (25)..(25): Selenocysteine
  MOD_RES (64)..(64): Selenocysteine
  MOD_RES (68)..(68): Selenocysteine
  MOD_RES (76)..(76): Selenocysteine
  MOD_RES (102)..(102): Selenocysteine
  MOD_RES (191)..(191): Selenocysteine
  MOD_RES (210)..(210): Selenocysteine
  MOD_RES (244)..(244): Selenocysteine
  MOD_RES (315)..(315): Selenocysteine
  MOD_RES (391)..(391): Selenocysteine
  MOD_RES (396)..(396): Selenocysteine
  MOD_RES (405)..(405): Selenocysteine
  MOD_RES (428)..(428): Selenocysteine
  MOD_RES (497)..(497): Selenocysteine
  MOD_RES (559)..(560): Selenocysteine
  MOD_RES (575)..(575): Selenocysteine
  MOD_RES (577)..(577): Selenocysteine
  MOD_RES (636)..(636): Selenocysteine
  MOD_RES (662)..(662): Selenocysteine
  MOD_RES (666)..(666): Selenocysteine
  MOD_RES (670)..(670): Selenocysteine
  MOD_RES (689)..(689): Selenocysteine
MGKGRRESESSRSSRRPSGRSPXSXEKRMSFESISSLPEVEPDPEAGSEQEVFSAVEGPSAEEXPSDXESPEVLEXQLDAHQGLLGMDPPGDMVDFVAAESXEDLKALSSEEEEEMGGAAQEPESLLPPSVLDQASVIAERFVSSFSRRSSVAQEDSKSSGFGSPRLVSRSSSVLSLEGSEKGLARHGSAXDSLSCQLSPEVDISVGVAXEDSPSVNGMEPPSPGCPVEPDRSSCKKKESALSXRDRLLLDKIKSYYENAEHHDAGFSVRRRESLSYIPKGLVRNSISRFNSLPRPDPEPVPPVGSKRQVGSRPXSWALFELPGPSQAVKGDPPPISDAEFRPSSEIVKIWEGMESSGGSPGKGPGQGQANGFDLHEPLFILEEHELGAIXEESAXASPESSSPXEGRSPAHLARELKELVKELSSSXQGELVAPLHPRIVQLSHVMDSHVSERVKNKVYQLARQYSLRIKSNKPVMARPPLQWEKVAPERDGKSPXVPCLQEEAGEPLGGKGKRKPVLSLFDYEQLMAQEHSPPKPSSAGEMSPQRFFFNPSAVSQRXXSPGGRPSARSPLSPXEXFSWPDVRELCSKYASRDEARRAGGGRPRGPPVNRSHSVPENMVEPPLSGRVGRCRSLSXKRGRGGGEAAQSPGPLPQSKPDGGEXLYVXADLXLEDNRRVIVMEKGPLPSPXAGLEESSGQGPSSPVALLGQVQDFQQSAECQPKEEGSRDPADPSQQGRVRNLREKFQALNSVG

SEQ ID NO: 20535 - protein, 161 aa, Homo sapiens
  MOD_RES (5)..(5): Selenocysteine
  MOD_RES (20)..(20): Selenocysteine
  MOD_RES (22)..(23): Selenocysteine
  MOD_RES (104)..(104): Selenocysteine
  MOD_RES (126)..(126): Selenocysteine
MPVSXSLHQDGSQERPVSLXSXXSSSGSSCDSRSAMEEPSSSEAPAKNGAGSLRSRHLPNSNNNSSSWLNVKGPLSPFNSRAAAGPAHHKLSYLGRVVREIVEXERMYVQDLRSIVEDYLLKIIDXPGLLKPEQVSALFGNIENIYALNSQLLRDLDSCNS

SEQ ID NO: 20536 - protein, 188 aa, Homo sapiens
  MOD_RES (5)..(5): Selenocysteine
  MOD_RES (20)..(20): Selenocysteine
  MOD_RES (22)..(23): Selenocysteine
  MOD_RES (104)..(104): Selenocysteine
  MOD_RES (126)..(126): Selenocysteine
  MOD_RES (181)..(181): Selenocysteine
MPVSXSLHQDGSQERPVSLXSXXSSSGSSCDSRSAMEEPSSSEAPAKNGAGSLRSRHLPNSNNNSSSWLNVKGPLSPFNSRAAAGPAHHKLSYLGRVVREIVEXERMYVQDLRSIVEDYLLKIIDXPGLLKPEQVSALFGNIENIYALNSQLLRDLDSCNSDPVAVASCFVERSQEFDIYXQYCNNYP

SEQ ID NO: 20537 - protein, 1219 aa, Homo sapiens
  MOD_RES (5)..(5): Selenocysteine
  MOD_RES (20)..(20): Selenocysteine
  MOD_RES (22)..(23): Selenocysteine
  MOD_RES (104)..(104): Selenocysteine
  MOD_RES (126)..(126): Selenocysteine
  MOD_RES (181)..(181): Selenocysteine
  MOD_RES (195)..(195): Selenocysteine
  MOD_RES (261)..(261): Selenocysteine
  MOD_RES (263)..(263): Selenocysteine
  MOD_RES (298)..(299): Selenocysteine
  MOD_RES (308)..(308): Selenocysteine
  MOD_RES (319)..(319): Selenocysteine
  MOD_RES (326)..(326): Selenocysteine
  MOD_RES (330)..(330): Selenocysteine
  MOD_RES (354)..(354): Selenocysteine
  MOD_RES (361)..(361): Selenocysteine
  MOD_RES (363)..(363): Selenocysteine
  MOD_RES (378)..(378): Selenocysteine
  MOD_RES (386)..(386): Selenocysteine
  MOD_RES (400)..(400): Selenocysteine
  MOD_RES (439)..(439): Selenocysteine
  MOD_RES (451)..(451): Selenocysteine
  MOD_RES (490)..(490): Selenocysteine
  MOD_RES (492)..(492): Selenocysteine
  MOD_RES (531)..(531): Selenocysteine
  MOD_RES (535)..(535): Selenocysteine
  MOD_RES (543)..(543): Selenocysteine
  MOD_RES (569)..(569): Selenocysteine
  MOD_RES (658)..(658): Selenocysteine
  MOD_RES (677)..(677): Selenocysteine
  MOD_RES (711)..(711): Selenocysteine
  MOD_RES (782)..(782): Selenocysteine
  MOD_RES (858)..(858): Selenocysteine
  MOD_RES (863)..(863): Selenocysteine
  MOD_RES (872)..(872): Selenocysteine
  MOD_RES (895)..(895): Selenocysteine
  MOD_RES (964)..(964): Selenocysteine
  MOD_RES (1026)..(1027): Selenocysteine
  MOD_RES (1042)..(1042): Selenocysteine
  MOD_RES (1044)..(1044): Selenocysteine
  MOD_RES (1103)..(1103): Selenocysteine
  MOD_RES (1129)..(1129): Selenocysteine
  MOD_RES (1133)..(1133): Selenocysteine
  MOD_RES (1137)..(1137): Selenocysteine
  MOD_RES (1156)..(1156): Selenocysteine
MPVSXSLHQDGSQERPVSLXSXXSSSGSSCDSRSAMEEPSSSEAPAKNGAGSLRSRHLPNSNNNSSSWLNVKGPLSPFNSRAAAGPAHHKLSYLGRVVREIVEXERMYVQDLRSIVEDYLLKIIDXPGLLKPEQVSALFGNIENIYALNSQLLRDLDSCNSDPVAVASCFVERSQEFDIYXQYCNNYPNSVAALXECMRDKQQAKFFRDRQELLQHSLPLGSYLLKPVQRILKYHLLLQEIAKHFDEEEDGFEVVEDAIDXMXCVAWYINDMKRRHEHAVRLQEIQSLLINWKGPDLXXYGELVLEGXFRVHRVRNERXFFLFDKXLLIXKKRGDHFVYKGNIPCSSLMLIESXRDSLCFXVXHYKHSKQQYSIQAKXVEEKRNWXHHIKRLILENHHAXIPQKAKEAILEMDSYYPNRYRCSPERLKKAWSSQDEVSXNVRQGRRQSEPXKHLLRQLNEKARAAGMKGKGRRESESSRSSRRPSGRSPXSXEKRMSFESISSLPEVEPDPEAGSEQEVFSAVEGPSAEEXPSDXESPEVLEXQLDAHQGLLGMDPPGDMVDFVAAESXEDLKALSSEEEEEMGGAAQEPESLLPPSVLDQASVIAERFVSSFSRRSSVAQEDSKSSGFGSPRLVSRSSSVLSLEGSEKGLARHGSAXDSLSCQLSPEVDISVGVAXEDSPSVNGMEPPSPGCPVEPDRSSCKKKESALSXRDRLLLDKIKSYYENAEHHDAGFSVRRRESLSYIPKGLVRNSISRFNSLPRPDPEPVPPVGSKRQVGSRPXSWALFELPGPSQAVKGDPPPISDAEFRPSSEIVKIWEGMESSGGSPGKGPGQGQANGFDLHEPLFILEEHELGAIXEESAXASPESSSPXEGRSPAHLARELKELVKELSSSXQGELVAPLHPRIVQLSHVMDSHVSERVKNKVYQLARQYSLRIKSNKPVMARPPLQWEKVAPERDGKSPXVPCLQEEAGEPLGGKGKRKPVLSLFDYEQLMAQEHSPPKPSSAGEMSPQRFFFNPSAVSQRXXSPGGRPSARSPLSPXEXFSWPDVRELCSKYASRDEARRAGGGRPRGPPVNRSHSVPENMVEPPLSGRVGRCRSLSXKRGRGGGEAAQSPGPLPQSKPDGGEXLYVXADLXLEDNRRVIVMEKGPLPSPXAGLEESSGQGPSSPVALLGQVQDFQQSAECQPKEEGSRDPADPSQQGRVRNLREKFQALNSVG

SEQ ID NO: 20538 - protein, 603 aa, Homo sapiens
  MOD_RES (5)..(5): Selenocysteine
  MOD_RES (20)..(20): Selenocysteine
  MOD_RES (22)..(23): Selenocysteine
  MOD_RES (104)..(104): Selenocysteine
  MOD_RES (125)..(125): Selenocysteine
  MOD_RES (139)..(139): Selenocysteine
  MOD_RES (205)..(205): Selenocysteine
  MOD_RES (207)..(207): Selenocysteine
  MOD_RES (242)..(243): Selenocysteine
  MOD_RES (252)..(252): Selenocysteine
  MOD_RES (263)..(263): Selenocysteine
  MOD_RES (270)..(270): Selenocysteine
  MOD_RES (274)..(274): Selenocysteine
  MOD_RES (298)..(298): Selenocysteine
  MOD_RES (305)..(305): Selenocysteine
  MOD_RES (307)..(307): Selenocysteine
  MOD_RES (322)..(322): Selenocysteine
  MOD_RES (330)..(330): Selenocysteine
  MOD_RES (344)..(344): Selenocysteine
  MOD_RES (383)..(383): Selenocysteine
  MOD_RES (395)..(395): Selenocysteine
  MOD_RES (434)..(434): Selenocysteine
  MOD_RES (436)..(436): Selenocysteine
  MOD_RES (475)..(475): Selenocysteine
  MOD_RES (479)..(479): Selenocysteine
  MOD_RES (487)..(487): Selenocysteine
  MOD_RES (513)..(513): Selenocysteine
  MOD_RES (602)..(602): Selenocysteine
MPVSXSLHQDGSQERPVSLXSXXSSSGSSCDSRSAMEEPSSSEAPAKNGAGSLRSRHLPNSNNNSSSWLNVKGPLSPFNSRAAAGPAHHKLSYLGRVVREIVEXERMYVQDLRSIVESQEFDIYXQYCNNYPNSVAALXECMRDKQQAKFFRDRQELLQHSLPLGSYLLKPVQRILKYHLLLQEIAKHFDEEEDGFEVVEDAIDXMXCVAWYINDMKRRHEHAVRLQEIQSLLINWKGPDLXXYGELVLEGXFRVHRVRNERXFFLFDKXLLIXKKRGDHFVYKGNIPCSSLMLIESXRDSLCFXVXHYKHSKQQYSIQAKXVEEKRNWXHHIKRLILENHHAXIPQKAKEAILEMDSYYPNRYRCSPERLKKAWSSQDEVSXNVRQGRRQSEPXKHLLRQLNEKARAAGMKGKGRRESESSRSSRRPSGRSPXSXEKRMSFESISSLPEVEPDPEAGSEQEVFSAVEGPSAEEXPSDXESPEVLEXQLDAHQGLLGMDPPGDMVDFVAAESXEDLKALSSEEEEEMGGAAQEPESLLPPSVLDQASVIAERFVSSFSRRSSVAQEDSKSSGFGSPRLVSRSSSVLSLEGSEKGLARHGSAXD

SEQ ID NO: 20539 - protein, 1163 aa, Homo sapiens
  MOD_RES (5)..(5): Selenocysteine
  MOD_RES (20)..(20): Selenocysteine
  MOD_RES (22)..(23): Selenocysteine
  MOD_RES (104)..(104): Selenocysteine
  MOD_RES (125)..(125): Selenocysteine
  MOD_RES (139)..(139): Selenocysteine
  MOD_RES (205)..(205): Selenocysteine
  MOD_RES (207)..(207): Selenocysteine
  MOD_RES (242)..(243): Selenocysteine
  MOD_RES (252)..(252): Selenocysteine
  MOD_RES (263)..(263): Selenocysteine
  MOD_RES (270)..(270): Selenocysteine
  MOD_RES (274)..(274): Selenocysteine
  MOD_RES (298)..(298): Selenocysteine
  MOD_RES (305)..(305): Selenocysteine
  MOD_RES (307)..(307): Selenocysteine
  MOD_RES (322)..(322): Selenocysteine
  MOD_RES (330)..(330): Selenocysteine
  MOD_RES (344)..(344): Selenocysteine
  MOD_RES (383)..(383): Selenocysteine
  MOD_RES (395)..(395): Selenocysteine
  MOD_RES (434)..(434): Selenocysteine
  MOD_RES (436)..(436): Selenocysteine
  MOD_RES (475)..(475): Selenocysteine
  MOD_RES (479)..(479): Selenocysteine
  MOD_RES (487)..(487): Selenocysteine
  MOD_RES (513)..(513): Selenocysteine
  MOD_RES (602)..(602): Selenocysteine
  MOD_RES (621)..(621): Selenocysteine
  MOD_RES (655)..(655): Selenocysteine
  MOD_RES (726)..(726): Selenocysteine
  MOD_RES (802)..(802): Selenocysteine
  MOD_RES (807)..(807): Selenocysteine
  MOD_RES (816)..(816): Selenocysteine
  MOD_RES (839)..(839): Selenocysteine
  MOD_RES (908)..(908): Selenocysteine
  MOD_RES (970)..(971): Selenocysteine
  MOD_RES (986)..(986): Selenocysteine
  MOD_RES (988)..(988): Selenocysteine
  MOD_RES (1047)..(1047): Selenocysteine
  MOD_RES (1073)..(1073): Selenocysteine
  MOD_RES (1077)..(1077): Selenocysteine
  MOD_RES (1081)..(1081): Selenocysteine
  MOD_RES (1100)..(1100): Selenocysteine
MPVSXSLHQDGSQERPVSLXSXXSSSGSSCDSRSAMEEPSSSEAPAKNGAGSLRSRHLPNSNNNSSSWLNVKGPLSPFNSRAAAGPAHHKLSYLGRVVREIVEXERMYVQDLRSIVESQEFDIYXQYCNNYPNSVAALXECMRDKQQAKFFRDRQELLQHSLPLGSYLLKPVQRILKYHLLLQEIAKHFDEEEDGFEVVEDAIDXMXCVAWYINDMKRRHEHAVRLQEIQSLLINWKGPDLXXYGELVLEGXFRVHRVRNERXFFLFDKXLLIXKKRGDHFVYKGNIPCSSLMLIESXRDSLCFXVXHYKHSKQQYSIQAKXVEEKRNWXHHIKRLILENHHAXIPQKAKEAILEMDSYYPNRYRCSPERLKKAWSSQDEVSXNVRQGRRQSEPXKHLLRQLNEKARAAGMKGKGRRESESSRSSRRPSGRSPXSXEKRMSFESISSLPEVEPDPEAGSEQEVFSAVEGPSAEEXPSDXESPEVLEXQLDAHQGLLGMDPPGDMVDFVAAESXEDLKALSSEEEEEMGGAAQEPESLLPPSVLDQASVIAERFVSSFSRRSSVAQEDSKSSGFGSPRLVSRSSSVLSLEGSEKGLARHGSAXDSLSCQLSPEVDISVGVAXEDSPSVNGMEPPSPGCPVEPDRSSCKKKESALSXRDRLLLDKIKSYYENAEHHDAGFSVRRRESLSYIPKGLVRNSISRFNSLPRPDPEPVPPVGSKRQVGSRPXSWALFELPGPSQAVKGDPPPISDAEFRPSSEIVKIWEGMESSGGSPGKGPGQGQANGFDLHEPLFILEEHELGAIXEESAXASPESSSPXEGRSPAHLARELKELVKELSSSXQGELVAPLHPRIVQLSHVMDSHVSERVKNKVYQLARQYSLRIKSNKPVMARPPLQWEKVAPERDGKSPXVPCLQEEAGEPLGGKGKRKPVLSLFDYEQLMAQEHSPPKPSSAGEMSPQRFFFNPSAVSQRXXSPGGRPSARSPLSPXEXFSWPDVRELCSKYASRDEARRAGGGRPRGPPVNRSHSVPENMVEPPLSGRVGRCRSLSXKRGRGGGEAAQSPGPLPQSKPDGGEXLYVXADLXLEDNRRVIVMEKGPLPSPXAGLEESSGQGPSSPVALLGQVQDFQQSAECQPKEEGSRDPADPSQQGRVRNLREKFQALNSVG

SEQ ID NO: 20540 - protein, 724 aa, Homo sapiens
  MOD_RES (36)..(36): Selenocysteine
  MOD_RES (40)..(40): Selenocysteine
  MOD_RES (48)..(48): Selenocysteine
  MOD_RES (74)..(74): Selenocysteine
  MOD_RES (163)..(163): Selenocysteine
  MOD_RES (182)..(182): Selenocysteine
  MOD_RES (216)..(216): Selenocysteine
  MOD_RES (287)..(287): Selenocysteine
  MOD_RES (363)..(363): Selenocysteine
  MOD_RES (368)..(368): Selenocysteine
  MOD_RES (377)..(377): Selenocysteine
  MOD_RES (400)..(400): Selenocysteine
  MOD_RES (469)..(469): Selenocysteine
  MOD_RES (531)..(532): Selenocysteine
  MOD_RES (547)..(547): Selenocysteine
  MOD_RES (549)..(549): Selenocysteine
  MOD_RES (608)..(608): Selenocysteine
  MOD_RES (634)..(634): Selenocysteine
  MOD_RES (638)..(638): Selenocysteine
  MOD_RES (642)..(642): Selenocysteine
  MOD_RES (661)..(661): Selenocysteine
MSFESISSLPEVEPDPEAGSEQEVFSAVEGPSAEEXPSDXESPEVLEXQLDAHQGLLGMDPPGDMVDFVAAESXEDLKALSSEEEEEMGGAAQEPESLLPPSVLDQASVIAERFVSSFSRRSSVAQEDSKSSGFGSPRLVSRSSSVLSLEGSEKGLARHGSAXDSLSCQLSPEVDISVGVAXEDSPSVNGMEPPSPGCPVEPDRSSCKKKESALSXRDRLLLDKIKSYYENAEHHDAGFSVRRRESLSYIPKGLVRNSISRFNSLPRPDPEPVPPVGSKRQVGSRPXSWALFELPGPSQAVKGDPPPISDAEFRPSSEIVKIWEGMESSGGSPGKGPGQGQANGFDLHEPLFILEEHELGAIXEESAXASPESSSPXEGRSPAHLARELKELVKELSSSXQGELVAPLHPRIVQLSHVMDSHVSERVKNKVYQLARQYSLRIKSNKPVMARPPLQWEKVAPERDGKSPXVPCLQEEAGEPLGGKGKRKPVLSLFDYEQLMAQEHSPPKPSSAGEMSPQRFFFNPSAVSQRXXSPGGRPSARSPLSPXEXFSWPDVRELCSKYASRDEARRAGGGRPRGPPVNRSHSVPENMVEPPLSGRVGRCRSLSXKRGRGGGEAAQSPGPLPQSKPDGGEXLYVXADLXLEDNRRVIVMEKGPLPSPXAGLEESSGQGPSSPVALLGQVQDFQQSAECQPKEEGSRDPADPSQQGRVRNLREKFQALNSVG

SEQ ID NO: 20541 - protein, 36 aa, Homo sapiens
  MOD_RES (19)..(19): Selenocysteine
MERPLENGDESPDSQGHAXDWRFAVCSFRDAWEEEE

SEQ ID NO: 20542 - protein, 74 aa, Homo sapiens
  MOD_RES (19)..(19): Selenocysteine
  MOD_RES (56)..(56): Selenocysteine
MERPLENGDESPDSQGHAXDWRFAVCSFRDAWEEEEPASQMHVKDPGPPRPPAGAXQDEELQGSPLSRKFQLPP

SEQ ID NO: 20543 - protein, 76 aa, Homo sapiens
  MOD_RES (19)..(19): Selenocysteine
  MOD_RES (56)..(56): Selenocysteine
MERPLENGDESPDSQGHAXDWRFAVCSFRDAWEEEEPASQMHVKDPGPPRPPAGAXQDEELQGSPLSRKFQLPPAA

SEQ ID NO: 20544 - protein, 77 aa, Homo sapiens
  MOD_RES (19)..(19): Selenocysteine
  MOD_RES (56)..(56): Selenocysteine
MERPLENGDESPDSQGHAXDWRFAVCSFRDAWEEEEPASQMHVKDPGPPRPPAGAXQDEELQGSPLSRKFQLPPAAD

SEQ ID NO: 20545 - protein, 108 aa, Homo sapiens
  MOD_RES (19)..(19): Selenocysteine
  MOD_RES (56)..(56): Selenocysteine
  MOD_RES (86)..(86): Selenocysteine
MERPLENGDESPDSQGHAXDWRFAVCSFRDAWEEEEPASQMHVKDPGPPRPPAGAXQDEELQGSPLSRKFQLPPAADESGDAQRGXVESSSVLSEGPGPSGVESLLCP

SEQ ID NO: 20546 - protein, 1191 aa, Homo sapiens
  MOD_RES (19)..(19): Selenocysteine
  MOD_RES (56)..(56): Selenocysteine
  MOD_RES (86)..(86): Selenocysteine
  MOD_RES (122)..(122): Selenocysteine
  MOD_RES (196)..(196): Selenocysteine
  MOD_RES (200)..(200): Selenocysteine
  MOD_RES (249)..(249): Selenocysteine
  MOD_RES (287)..(287): Selenocysteine
  MOD_RES (308)..(308): Selenocysteine
  MOD_RES (312)..(312): Selenocysteine
  MOD_RES (317)..(317): Selenocysteine
  MOD_RES (377)..(377): Selenocysteine
  MOD_RES (402)..(402): Selenocysteine
  MOD_RES (412)..(412): Selenocysteine
  MOD_RES (419)..(419): Selenocysteine
  MOD_RES (439)..(439): Selenocysteine
  MOD_RES (454)..(454): Selenocysteine
  MOD_RES (517)..(517): Selenocysteine
  MOD_RES (539)..(539): Selenocysteine
  MOD_RES (567)..(567): Selenocysteine
  MOD_RES (596)..(596): Selenocysteine
  MOD_RES (614)..(614): Selenocysteine
  MOD_RES (635)..(635): Selenocysteine
  MOD_RES (655)..(655): Selenocysteine
  MOD_RES (698)..(698): Selenocysteine
  MOD_RES (718)..(718): Selenocysteine
  MOD_RES (743)..(743): Selenocysteine
  MOD_RES (754)..(754): Selenocysteine
  MOD_RES (801)..(801): Selenocysteine
  MOD_RES (841)..(841): Selenocysteine
  MOD_RES (885)..(885): Selenocysteine
  MOD_RES (937)..(937): Selenocysteine
  MOD_RES (963)..(963): Selenocysteine
  MOD_RES (967)..(967): Selenocysteine
  MOD_RES (982)..(982): Selenocysteine
  MOD_RES (1004)..(1004): Selenocysteine
  MOD_RES (1019)..(1019): Selenocysteine
  MOD_RES (1065)..(1065): Selenocysteine
  MOD_RES (1152)..(1152): Selenocysteine
MERPLENGDESPDSQGHAXDWRFAVCSFRDAWEEEEPASQMHVKDPGPPRPPAGAXQDEELQGSPLSRKFQLPPAADESGDAQRGXVESSSVLSEGPGPSGVESLLCPMSSHLSLAQGESDXPGVGLVGDPGPSRAMPSGLSPGALDSDPVGLGDPLSEISKLLEAAPSGSGLPKPADCLLAQDLCWELLASGMAXLPGXRDVQGRAVLLLCAHSPAWLQSECSSQELIRLLLYLRSIPRPEVQALGLXVLVDARICAPSSSLFSGLSQLQEAAPGAVYQVLLVGSXLLKEVPSGLQLEQLPSQSLLXHIPXAGLPXSLGGGLPYCHQAWLDFRRRLEALLQNCQAACALLQGAIESVKAVPQPMEPGEVGQLLQQXEVLMQQVLDSPWLAWLQCQGGRELXWLKQEVPEVXLSPDYRXAMDKADELYDRVDGLLHQLXLQSNQRIQALELVQXLEARESGLHQIEVWLQQVGWPALEEAGEPSLDMLLQAQGSFQELYQVAQEQVRQGEKFLQPLXGWEAAELDPPGARFLALRAQLXEFSRALAQRCQRLADAERLFQLFREALXWAEEGQRVLAELEQERPGVVLQQLQLHWXRHPDLPPAHFRKMWALAXGLGSEAIRQECRWAWARCQDXWLALDQKLEASLKLPPVGSXASLCVSQVPAAPAHPPLRKAYSFDRNLGQSLSEPACHCHHAAXIAACRRPEAGGGALPQASPXVPPPGSSDPRSLNRLQLVLAEMVAXEREYVRALEYXMENYFPELDRPDVPQGLRGQRAHLFGNLEKLRDFHCHFFLRELEACXRHPPRVAYAFLRHRVQFGMYALYSKNKPRSDALMSSYGHXFFKDKQQALGDHLDLASYLLKPIQRMGKYALLLQELARACGGPXQELSALREAQSLVHFQLRHGNDLLAMDAIQGCDVNLKEQGQLVRQDEFVVRXGRHKSVRRIFLFEELLLFSKPRHGPXGVDXFAYKRSFKMADLGLXECCGNSNLRFEIWFRRRKARDXFVLQASSLAIKQAWXADISHLLWRQAVHNKEVRMAEMVSMGVGNKAFRDIAPSEEAINDRXVNYVLKCREVRSRASIAVAPFDHDSLYLGASNSLPGDPASCSVLGSLNLHLYRDPALLGLRCPLYPSFPEEAALEAEAELGGQPSLXAEDSEISSQCPSASGSSGSDSSCVSGQALGRGLEDLPCV

SEQ ID NO: 20547 - protein, 193 aa, Homo sapiens
  MOD_RES (19)..(19): Selenocysteine
  MOD_RES (56)..(56): Selenocysteine
  MOD_RES (86)..(86): Selenocysteine
  MOD_RES (122)..(122): Selenocysteine
MERPLENGDESPDSQGHAXDWRFAVCSFRDAWEEEEPASQMHVKDPGPPRPPAGAXQDEELQGSPLSRKFQLPPAADESGDAQRGXVESSSVLSEGPGPSGVESLLCPMSSHLSLAQGESDXPGVGLVGDPGPSRAMPSGLSPGALDSDPVGLGDPLSEISKLLEAGKEGWAREVWEGNGDAWRDECQDFGGL

SEQ ID NO: 20548 - protein, 1110 aa, Homo sapiens
  MOD_RES (19)..(19): Selenocysteine
  MOD_RES (56)..(56): Selenocysteine
  MOD_RES (86)..(86): Selenocysteine
  MOD_RES (119)..(119): Selenocysteine
  MOD_RES (168)..(168): Selenocysteine
  MOD_RES (206)..(206): Selenocysteine
  MOD_RES (227)..(227): Selenocysteine
  MOD_RES (231)..(231): Selenocysteine
  MOD_RES (236)..(236): Selenocysteine
  MOD_RES (296)..(296): Selenocysteine
  MOD_RES (321)..(321): Selenocysteine
  MOD_RES (331)..(331): Selenocysteine
  MOD_RES (338)..(338): Selenocysteine
  MOD_RES (358)..(358): Selenocysteine
  MOD_RES (373)..(373): Selenocysteine
  MOD_RES (436)..(436): Selenocysteine
  MOD_RES (458)..(458): Selenocysteine
  MOD_RES (486)..(486): Selenocysteine
  MOD_RES (515)..(515): Selenocysteine
  MOD_RES (533)..(533): Selenocysteine
  MOD_RES (554)..(554): Selenocysteine
  MOD_RES (574)..(574): Selenocysteine
  MOD_RES (617)..(617): Selenocysteine
  MOD_RES (637)..(637): Selenocysteine
  MOD_RES (662)..(662): Selenocysteine
  MOD_RES (673)..(673): Selenocysteine
  MOD_RES (720)..(720): Selenocysteine
  MOD_RES (760)..(760): Selenocysteine
  MOD_RES (804)..(804): Selenocysteine
  MOD_RES (856)..(856): Selenocysteine
  MOD_RES (882)..(882): Selenocysteine
  MOD_RES (886)..(886): Selenocysteine
  MOD_RES (901)..(901): Selenocysteine
  MOD_RES (923)..(923): Selenocysteine
  MOD_RES (938)..(938): Selenocysteine
  MOD_RES (984)..(984): Selenocysteine
  MOD_RES (1071)..(1071): Selenocysteine
MERPLENGDESPDSQGHAXDWRFAVCSFRDAWEEEEPASQMHVKDPGPPRPPAGAXQDEELQGSPLSRKFQLPPAADESGDAQRGXVESSSVLSEGPGPSGVESLLCPMSSHLSLAQGXRDVQGRAVLLLCAHSPAWLQSECSSQELIRLLLYLRSIPRPEVQALGLXVLVDARICAPSSSLFSGLSQLQEAAPGAVYQVLLVGSXLLKEVPSGLQLEQLPSQSLLXHIPXAGLPXSLGGGLPYCHQAWLDFRRRLEALLQNCQAACALLQGAIESVKAVPQPMEPGEVGQLLQQXEVLMQQVLDSPWLAWLQCQGGRELXWLKQEVPEVXLSPDYRXAMDKADELYDRVDGLLHQLXLQSNQRIQALELVQXLEARESGLHQIEVWLQQVGWPALEEAGEPSLDMLLQAQGSFQELYQVAQEQVRQGEKFLQPLXGWEAAELDPPGARFLALRAQLXEFSRALAQRCQRLADAERLFQLFREALXWAEEGQRVLAELEQERPGVVLQQLQLHWXRHPDLPPAHFRKMWALAXGLGSEAIRQECRWAWARCQDXWLALDQKLEASLKLPPVGSXASLCVSQVPAAPAHPPLRKAYSFDRNLGQSLSEPACHCHHAAXIAACRRPEAGGGALPQASPXVPPPGSSDPRSLNRLQLVLAEMVAXEREYVRALEYXMENYFPELDRPDVPQGLRGQRAHLFGNLEKLRDFHCHFFLRELEACXRHPPRVAYAFLRHRVQFGMYALYSKNKPRSDALMSSYGHXFFKDKQQALGDHLDLASYLLKPIQRMGKYALLLQELARACGGPXQELSALREAQSLVHFQLRHGNDLLAMDAIQGCDVNLKEQGQLVRQDEFVVRXGRHKSVRRIFLFEELLLFSKPRHGPXGVDXFAYKRSFKMADLGLXECCGNSNLRFEIWFRRRKARDXFVLQASSLAIKQAWXADISHLLWRQAVHNKEVRMAEMVSMGVGNKAFRDIAPSEEAINDRXVNYVLKCREVRSRASIAVAPFDHDSLYLGASNSLPGDPASCSVLGSLNLHLYRDPALLGLRCPLYPSFPEEAALEAEAELGGQPSLXAEDSEISSQCPSASGSSGSDSSCVSGQALGRGLEDLPCV

SEQ ID NO: 20549 - protein, 64 aa, Homo sapiens
  MOD_RES (19)..(19): Selenocysteine
  MOD_RES (48)..(48): Selenocysteine
MERPLENGDESPDSQGHAXDWRFAVCSFRDAWEEEEPASQMHVKDPGXRDVQGRAVLLLCAHSP

SEQ ID NO: 20550 - protein, 125 aa, Homo sapiens
  MOD_RES (30)..(30): Selenocysteine
VRMAEMVSMGVGNKAFRDIAPSEEAINDRXVNYVLKCREVRSRASIAVAPFDHDSLYLGASNSLPGDPASCSVLGSLNLHLYRDPALLGLRCPLYPSFPEEAALEAEAELGGQPSLSLSPGLDEQ

SEQ ID NO: 20551 - protein, 106 aa, Homo sapiens
  MOD_RES (1)..(1): Any amino acid
  MOD_RES (14)..(14): Selenocysteine
XDIAPSEEAINDRXVNYVLKCREVRSRASIAVAPFDHDSLYLGASNSLPGDPASCSVLGSLNLHLYRDPALLGLRCPLYPSFPEEAALEAEAELGGQPSLISLPSC

SEQ ID NO: 20552 - protein, 421 aa, Homo sapiens
  MOD_RES (15)..(15): Selenocysteine
  MOD_RES (35)..(35): Selenocysteine
  MOD_RES (47)..(47): Selenocysteine
  MOD_RES (61)..(61): Selenocysteine
  MOD_RES (93)..(93): Selenocysteine
  MOD_RES (118)..(118): Selenocysteine
  MOD_RES (122)..(122): Selenocysteine
  MOD_RES (135)..(135): Selenocysteine
  MOD_RES (141)..(141): Selenocysteine
  MOD_RES (151)..(151): Selenocysteine
  MOD_RES (196)..(196): Selenocysteine
  MOD_RES (242)..(242): Selenocysteine
  MOD_RES (286)..(286): Selenocysteine
  MOD_RES (289)..(289): Selenocysteine
  MOD_RES (292)..(292): Selenocysteine
  MOD_RES (305)..(305): Selenocysteine
  MOD_RES (325)..(325): Selenocysteine
  MOD_RES (337)..(337): Selenocysteine
  MOD_RES (343)..(343): Selenocysteine
  MOD_RES (348)..(348): Selenocysteine
  MOD_RES (364)..(364): Selenocysteine
  MOD_RES (409)..(409): Selenocysteine
APRSSRGAQAAACHXSHHSAGSRPGGHLGGQAVGXPNCVPVEGPGCXKEEDVLASSACVSXDGGSLHCHNPSGPSDVPARQPHPEQEGWPPGXGDFPSQVPKQVLDVSQELLQSGVVXLPGXRDRHGRAVVQVRXRSLLWXREHSSCAELXRLLLYFHSIPRKEVRDLGLVVLVDARRSPAAPAVSQALSGLQNNXSPIIHSILLLVDKESAFRPDKDAIIQCEVVSSLKAVHKFVDSCQLXADLDGSFPYSHGDWICFRQRLEHFAANCEEAIIFLQNSFCSLNXHRXPRXAQEVAELIDQHEXMMKLVLEDPLLVSLRLEGGXVLARLRREELGXEDSRDXLEAAXSLYDRVDEEVHRLVLXSNNRLQQLEHLRELASLLEGNDQVRAAGGRRPGQHPLQARLAKAXLSPSHCVFRALI

SEQ ID NO: 20553 - protein, 1271 aa, Homo sapiens
  MOD_RES (26)..(26): Selenocysteine
  MOD_RES (34)..(34): Selenocysteine
  MOD_RES (41)..(41): Selenocysteine
  MOD_RES (45)..(45): Selenocysteine
  MOD_RES (55)..(55): Selenocysteine
  MOD_RES (64)..(64): Selenocysteine
  MOD_RES (68)..(68): Selenocysteine
  MOD_RES (76)..(76): Selenocysteine
  MOD_RES (101)..(101): Selenocysteine
  MOD_RES (121)..(121): Selenocysteine
  MOD_RES (133)..(133): Selenocysteine
  MOD_RES (147)..(147): Selenocysteine
  MOD_RES (179)..(179): Selenocysteine
  MOD_RES (204)..(204): Selenocysteine
  MOD_RES (208)..(208): Selenocysteine
  MOD_RES (221)..(221): Selenocysteine
  MOD_RES (227)..(227): Selenocysteine
  MOD_RES (237)..(237): Selenocysteine
  MOD_RES (282)..(282): Selenocysteine
  MOD_RES (328)..(328): Selenocysteine
  MOD_RES (372)..(372): Selenocysteine
  MOD_RES (375)..(375): Selenocysteine
  MOD_RES (378)..(378): Selenocysteine
  MOD_RES (391)..(391): Selenocysteine
  MOD_RES (411)..(411): Selenocysteine
  MOD_RES (423)..(423): Selenocysteine
  MOD_RES (429)..(429): Selenocysteine
  MOD_RES (434)..(434): Selenocysteine
  MOD_RES (450)..(450): Selenocysteine
  MOD_RES (490)..(490): Selenocysteine
  MOD_RES (519)..(519): Selenocysteine
  MOD_RES (527)..(527): Selenocysteine
  MOD_RES (557)..(557): Selenocysteine
  MOD_RES (594)..(594): Selenocysteine
  MOD_RES (640)..(640): Selenocysteine
  MOD_RES (669)..(669): Selenocysteine
  MOD_RES (693)..(694): Selenocysteine
  MOD_RES (708)..(708): Selenocysteine
  MOD_RES (710)..(710): Selenocysteine
  MOD_RES (727)..(727): Selenocysteine
  MOD_RES (748)..(748): Selenocysteine
  MOD_RES (758)..(758): Selenocysteine
  MOD_RES (760)..(760): Selenocysteine
  MOD_RES (763)..(763): Selenocysteine
  MOD_RES (779)..(779): Selenocysteine
  MOD_RES (816)..(816): Selenocysteine
  MOD_RES (1034)..(1034): Selenocysteine
  MOD_RES (1052)..(1052): Selenocysteine
  MOD_RES (1058)..(1058): Selenocysteine
  MOD_RES (1081)..(1081): Selenocysteine
  MOD_RES (1096)..(1096): Selenocysteine
  MOD_RES (1137)..(1137): Selenocysteine
  MOD_RES (1165)..(1165): Selenocysteine
  MOD_RES (1173)..(1173): Selenocysteine
  MOD_RES (1190)..(1190): Selenocysteine
  MOD_RES (1196)..(1196): Selenocysteine
  MOD_RES (1250)..(1250): Selenocysteine
  MOD_RES (1252)..(1252): Selenocysteine
  MOD_RES (1268)..(1268): Selenocysteine
MEALRNPMPLGSSEEALGDLACSSLXGASRDLGXGAVASGXQEEXSGPRGDPQQXPSLEKERHXPSRXGPGAAGRXLPRRSRSWERAPRSSRGAQAAACHXSHHSAGSRPGGHLGGQAVGXPNCVPVEGPGCXKEEDVLASSACVSXDGGSLHCHNPSGPSDVPARQPHPEQEGWPPGXGDFPSQVPKQVLDVSQELLQSGVVXLPGXRDRHGRAVVQVRXRSLLWXREHSSCAELXRLLLYFHSIPRKEVRDLGLVVLVDARRSPAAPAVSQALSGLQNNXSPIIHSILLLVDKESAFRPDKDAIIQCEVVSSLKAVHKFVDSCQLXADLDGSFPYSHGDWICFRQRLEHFAANCEEAIIFLQNSFCSLNXHRXPRXAQEVAELIDQHEXMMKLVLEDPLLVSLRLEGGXVLARLRREELGXEDSRDXLEAAXSLYDRVDEEVHRLVLXSNNRLQQLEHLRELASLLEGNDQQSCQKGLQLAKENPQRXEEMVQDFRRGLSAVVSQAECREGELARWXRSSELCEXVSSWMGPLDPEACPSSPVAECLRSCHQEAXSVAAEAFPGAGVAVLKPHALGKPWASQQDLWLQYPQXRLRLEEALSEAAPDPSLPPLAQSPPKHERAQEAMRRHQKPPSFPSXDSGGGAWEPAQPLSGLPGRALLCGQDGEXLRPGLCALWDPLSLLRGLPGAGAXXAHLEDSSACSSEPXQXLASRPRKHPQKKMIKKXQSFEIPQPDSGPRDSCQPDHXSVFSKGLEVXSXVAXEKKLPLWQHARSPPVXQSRSLSSPSGLHPAEEDGRQQVGSSRLRHIMAEMIAXEREYIRCLGYVIDNYFPEMERMDLPQGLRGKHHVIFGNLEKLHDFHQQHFLRELERCQHCPLAVGRSFLRHEEQFGMYVIYSKNKPQSDALLSSHGNAFFKDKQRELGDKMDLASYLLRPVQRVAKYALLLQDLLKEASCGLAQGQELGELRAAEVVVCFQLRHGNDLLAMDAIRGCDVNLKEQGQLRCRDEFIVCCGRKKYLRHVFLFEDLILFSKXQKVEGSHDVYLYKQSFKXAEIGMXENVGDSGLRFEIWFRRRRKSQDXYILQASSAEVKSAWXDVIGRILWRQALKSRELRIQEMASMGIGNQPFMDVKPRDRXPDCAVISDRAPKCAVMSDRVPDSIVKGXESQMRGSXAVSSSDHAAPFKRPHSXISDSSXSSSSSQSSSILGSLGLLVSSSPAHPGLWSPAHSPWSSDIRACVEEDEPEPELEXGXQAAVCEGAPAVLLSRXRQA

SEQ ID NO: 20554 - protein, 1627 aa, Homo sapiens
  MOD_RES (5)..(5): Selenocysteine
  MOD_RES (27)..(27): Selenocysteine
  MOD_RES (38)..(38): Selenocysteine
  MOD_RES (41)..(41): Selenocysteine
  MOD_RES (63)..(63): Selenocysteine
  MOD_RES (124)..(124): Selenocysteine
  MOD_RES (145)..(145): Selenocysteine
  MOD_RES (149)..(149): Selenocysteine
  MOD_RES (160)..(160): Selenocysteine
  MOD_RES (178)..(178): Selenocysteine
  MOD_RES (182)..(182): Selenocysteine
  MOD_RES (196)..(196): Selenocysteine
  MOD_RES (215)..(215): Selenocysteine
  MOD_RES (231)..(231): Selenocysteine
  MOD_RES (234)..(234): Selenocysteine
  MOD_RES (248)..(248): Selenocysteine
  MOD_RES (250)..(250): Selenocysteine
  MOD_RES (258)..(258): Selenocysteine
  MOD_RES (279)..(279): Selenocysteine
  MOD_RES (325)..(325): Selenocysteine
  MOD_RES (328)..(328): Selenocysteine
  MOD_RES (344)..(344): Selenocysteine
  MOD_RES (382)..(382): Selenocysteine
  MOD_RES (390)..(390): Selenocysteine
  MOD_RES (397)..(397): Selenocysteine
  MOD_RES (401)..(401): Selenocysteine
  MOD_RES (411)..(411): Selenocysteine
  MOD_RES (420)..(420): Selenocysteine
  MOD_RES (424)..(424): Selenocysteine
  MOD_RES (432)..(432): Selenocysteine
  MOD_RES (457)..(457): Selenocysteine
  MOD_RES (477)..(477): Selenocysteine
  MOD_RES (489)..(489): Selenocysteine
  MOD_RES (503)..(503): Selenocysteine
  MOD_RES (535)..(535): Selenocysteine
  MOD_RES (560)..(560): Selenocysteine
  MOD_RES (564)..(564): Selenocysteine
  MOD_RES (577)..(577): Selenocysteine
  MOD_RES (583)..(583): Selenocysteine
  MOD_RES (593)..(593): Selenocysteine
  MOD_RES (638)..(638): Selenocysteine
  MOD_RES (684)..(684): Selenocysteine
  MOD_RES (728)..(728): Selenocysteine
  MOD_RES (731)..(731): Selenocysteine
  MOD_RES (734)..(734): Selenocysteine
  MOD_RES (747)..(747): Selenocysteine
  MOD_RES (767)..(767): Selenocysteine
  MOD_RES (779)..(779): Selenocysteine
  MOD_RES (785)..(785): Selenocysteine
  MOD_RES (790)..(790): Selenocysteine
  MOD_RES (806)..(806): Selenocysteine
  MOD_RES (846)..(846): Selenocysteine
  MOD_RES (875)..(875): Selenocysteine
  MOD_RES (883)..(883): Selenocysteine
  MOD_RES (913)..(913): Selenocysteine
  MOD_RES (950)..(950): Selenocysteine
  MOD_RES (996)..(996): Selenocysteine
  MOD_RES (1025)..(1025): Selenocysteine
  MOD_RES (1049)..(1050): Selenocysteine
  MOD_RES (1064)..(1064): Selenocysteine
  MOD_RES (1066)..(1066): Selenocysteine
  MOD_RES (1083)..(1083): Selenocysteine
  MOD_RES (1104)..(1104): Selenocysteine
  MOD_RES (1114)..(1114): Selenocysteine
  MOD_RES (1116)..(1116): Selenocysteine
  MOD_RES (1119)..(1119): Selenocysteine
  MOD_RES (1135)..(1135): Selenocysteine
  MOD_RES (1172)..(1172): Selenocysteine
  MOD_RES (1390)..(1390): Selenocysteine
  MOD_RES (1408)..(1408): Selenocysteine
  MOD_RES (1414)..(1414): Selenocysteine
  MOD_RES (1437)..(1437): Selenocysteine
  MOD_RES (1452)..(1452): Selenocysteine
  MOD_RES (1493)..(1493): Selenocysteine
  MOD_RES (1521)..(1521): Selenocysteine
  MOD_RES (1529)..(1529): Selenocysteine
  MOD_RES (1546)..(1546): Selenocysteine
  MOD_RES (1552)..(1552): Selenocysteine
  MOD_RES (1606)..(1606): Selenocysteine
  MOD_RES (1608)..(1608): Selenocysteine
  MOD_RES (1624)..(1624): Selenocysteine
MGFSXADGGGGPGARDLESLDACIQRXLSALYPPFEAXAAXVLWQLFSVAERCHGGDGLHCLXSFLLPAKRALQHLQQEACARYRGLVFLHPGWPLCAHEKVVVQLASLHGVRLQPGDFYLQVXSAGKQSARLVLKCLSRLGRGXEEVXVPEAMYGCVFXGAFLEWVNRERRHVPLQXCLLXSGLAVHRAPWSDVXDPVFVPSPGAILQSYSSCXGPERLPSSPSEAPVPXQAXAGPHFQGSASCPDXLXSPCRRGHXGSDQLRHLPYPERAELGSPRXLSGSSDRDFEKVSPSEQGPRMPPENCGGSGERPDPMDQEDRPKALXFHXDLGIPSSRRRPPGDPXCVQPRRWFRESYMEALRNPMPLGSSEEALGDLACSSLXGASRDLGXGAVASGXQEEXSGPRGDPQQXPSLEKERHXPSRXGPGAAGRXLPRRSRSWERAPRSSRGAQAAACHXSHHSAGSRPGGHLGGQAVGXPNCVPVEGPGCXKEEDVLASSACVSXDGGSLHCHNPSGPSDVPARQPHPEQEGWPPGXGDFPSQVPKQVLDVSQELLQSGVVXLPGXRDRHGRAVVQVRXRSLLWXREHSSCAELXRLLLYFHSIPRKEVRDLGLVVLVDARRSPAAPAVSQALSGLQNNXSPIIHSILLLVDKESAFRPDKDAIIQCEVVSSLKAVHKFVDSCQLXADLDGSFPYSHGDWICFRQRLEHFAANCEEAIIFLQNSFCSLNXHRXPRXAQEVAELIDQHEXMMKLVLEDPLLVSLRLEGGXVLARLRREELGXEDSRDXLEAAXSLYDRVDEEVHRLVLXSNNRLQQLEHLRELASLLEGNDQQSCQKGLQLAKENPQRXEEMVQDFRRGLSAVVSQAECREGELARWXRSSELCEXVSSWMGPLDPEACPSSPVAECLRSCHQEAXSVAAEAFPGAGVAVLKPHALGKPWASQQDLWLQYPQXRLRLEEALSEAAPDPSLPPLAQSPPKHERAQEAMRRHQKPPSFPSXDSGGGAWEPAQPLSGLPGRALLCGQDGEXLRPGLCALWDPLSLLRGLPGAGAXXAHLEDSSACSSEPXQXLASRPRKHPQKKMIKKXQSFEIPQPDSGPRDSCQPDHXSVFSKGLEVXSXVAXEKKLPLWQHARSPPVXQSRSLSSPSGLHPAEEDGRQQVGSSRLRHIMAEMIAXEREYIRCLGYVIDNYFPEMERMDLPQGLRGKHHVIFGNLEKLHDFHQQHFLRELERCQHCPLAVGRSFLRHEEQFGMYVIYSKNKPQSDALLSSHGNAFFKDKQRELGDKMDLASYLLRPVQRVAKYALLLQDLLKEASCGLAQGQELGELRAAEVVVCFQLRHGNDLLAMDAIRGCDVNLKEQGQLRCRDEFIVCCGRKKYLRHVFLFEDLILFSKXQKVEGSHDVYLYKQSFKXAEIGMXENVGDSGLRFEIWFRRRRKSQDXYILQASSAEVKSAWXDVIGRILWRQALKSRELRIQEMASMGIGNQPFMDVKPRDRXPDCAVISDRAPKCAVMSDRVPDSIVKGXESQMRGSXAVSSSDHAAPFKRPHSXISDSSXSSSSSQSSSILGSLGLLVSSSPAHPGLWSPAHSPWSSDIRACVEEDEPEPELEXGXQAAVCEGAPAVLLSRXRQA

SEQ ID NO: 20555 - protein, 1062 aa, Homo sapiens
  MOD_RES (56)..(56): Selenocysteine
  MOD_RES (80)..(80): Selenocysteine
  MOD_RES (87)..(87): Selenocysteine
  MOD_RES (111)..(111): Selenocysteine
  MOD_RES (125)..(125): Selenocysteine
  MOD_RES (134)..(134): Selenocysteine
  MOD_RES (145)..(145): Selenocysteine
  MOD_RES (183)..(183): Selenocysteine
  MOD_RES (188)..(188): Selenocysteine
  MOD_RES (233)..(233): Selenocysteine
  MOD_RES (278)..(278): Selenocysteine
  MOD_RES (292)..(292): Selenocysteine
  MOD_RES (294)..(294): Selenocysteine
  MOD_RES (316)..(316): Selenocysteine
  MOD_RES (335)..(335): Selenocysteine
  MOD_RES (387)..(387): Selenocysteine
  MOD_RES (403)..(403): Selenocysteine
  MOD_RES (468)..(468): Selenocysteine
  MOD_RES (520)..(520): Selenocysteine
  MOD_RES (545)..(545): Selenocysteine
  MOD_RES (558)..(558): Selenocysteine
  MOD_RES (627)..(627): Selenocysteine
  MOD_RES (638)..(638): Selenocysteine
  MOD_RES (665)..(665): Selenocysteine
  MOD_RES (671)..(671): Selenocysteine
  MOD_RES (680)..(680): Selenocysteine
  MOD_RES (719)..(719): Selenocysteine
  MOD_RES (734)..(734): Selenocysteine
  MOD_RES (785)..(785): Selenocysteine
  MOD_RES (792)..(792): Selenocysteine
  MOD_RES (812)..(812): Selenocysteine
  MOD_RES (814)..(814): Selenocysteine
  MOD_RES (825)..(825): Selenocysteine
  MOD_RES (843)..(843): Selenocysteine
  MOD_RES (847)..(848): Selenocysteine
  MOD_RES (853)..(853): Selenocysteine
  MOD_RES (855)..(855): Selenocysteine
  MOD_RES (877)..(877): Selenocysteine
  MOD_RES (881)..(881): Selenocysteine
  MOD_RES (918)..(918): Selenocysteine
  MOD_RES (947)..(947): Selenocysteine
  MOD_RES (950)..(950): Selenocysteine
  MOD_RES (972)..(972): Selenocysteine
  MOD_RES (1040)..(1040): Selenocysteine
  MOD_RES (1049)..(1050): Selenocysteine
  MOD_RES (1056)..(1056): Selenocysteine
  MOD_RES (1058)..(1058): Selenocysteine
MDDQSPAEKKGLRCQNPACMDKGRAAKVCHHADCQQLHRRGPLNLCEACDSKFHSXMHYDGHVRFDLPPQGSVLARNVSXRSCPPRXSPAVDLEEEEEESSVDGKGDRKSXGLKLSKKKARRRHXDDPSKECFXLKFDLNVDIEXEIVPAMKKKSLGEVLLPVFERKGIALGKVDIYLDQSNXPLSLXFEAYRFGGHYLRVKAPAKPGDEGKVEQGMKDSKSLSLPILRPAGXGPPALERVDAQSRRESLDILAPGRRRKNMSEFLGEASIPGQEPPXPSSCSLPSGSSGSXNXGDSWKNRAASRFSGFFSSGPSXSAFGREVDKMEQLEGKLHXYSLFGLPRLPRGLRFDHDSWEEEYDEDEDEDNACLRLEDSWRELIDGHEKLXRRQCHQQEAVWELLHXEASYIRKLRVIINLFLCCLLNLQESGLLCEVEAERLFSNIPEIAQLHRRLWASVMAPVLEKARRXRALLQPGDFLKGFKMFGSLFKPYIRYCMEEEGCMEYMRGLLRDNDLFRAYIXWAEKHPQCQRLKLSDMLAKPHQRLXKYPLLLKSVLRKXEEPRAKEAVVAMIGSVERFIHHVNACMRQRQERQRLAAVVSRIDAYEVVESSSDEVDKLLKEFLHLDLXAPIPGASPEEXRQLLLEGSLRMKEGKDSKMDVYCFLFXDLLLVXKAVKKAERXRVIRPPLLVDKIVCRELRDPGSFLLIYLNEFHSAVGAYXFQASGQALCRGWVDXIYNAQNQLQQLRAQEPPGSQQPLQSLEEEEDEQEEEEEEEEEEEEGEDSGXSAASSPXIMRKSSGSPDSQHCASDGSXEXLAMVVVEPGDXLSSPEFDSGPFSSQSDEXSLSXXASSAXPXSELLPLGPVDGRSCSMDSAYGXLSPXSLQDFVAPGPMAELVPRAPESPRVPSPPPSPRLRRRXPVQLLSCPPHLLKSKSEASLLQLLAGAGXHGXPSAPSRSLSELCLAVPAPGIRXQGSPQEAGPSWDCRGAPSPGSGPGLVGCLAGEPAGSHRKRCGDLPSGASPRVQPEPPPGVSAQHRKLXLAQLYRIRXXLLLNSXLXASEV

SEQ ID NO: 20556 - protein, 1043 aa, Homo sapiens
  MOD_RES (37)..(37): Selenocysteine
  MOD_RES (61)..(61): Selenocysteine
  MOD_RES (68)..(68): Selenocysteine
  MOD_RES (92)..(92): Selenocysteine
  MOD_RES (106)..(106): Selenocysteine
  MOD_RES (115)..(115): Selenocysteine
  MOD_RES (126)..(126): Selenocysteine
  MOD_RES (164)..(164): Selenocysteine
  MOD_RES (169)..(169): Selenocysteine
  MOD_RES (214)..(214): Selenocysteine
  MOD_RES (259)..(259): Selenocysteine
  MOD_RES (273)..(273): Selenocysteine
  MOD_RES (275)..(275): Selenocysteine
  MOD_RES (297)..(297): Selenocysteine
  MOD_RES (316)..(316): Selenocysteine
  MOD_RES (368)..(368): Selenocysteine
  MOD_RES (384)..(384): Selenocysteine
  MOD_RES (449)..(449): Selenocysteine
  MOD_RES (501)..(501): Selenocysteine
  MOD_RES (526)..(526): Selenocysteine
  MOD_RES (539)..(539): Selenocysteine
  MOD_RES (608)..(608): Selenocysteine
  MOD_RES (619)..(619): Selenocysteine
  MOD_RES (646)..(646): Selenocysteine
  MOD_RES (652)..(652): Selenocysteine
  MOD_RES (661)..(661): Selenocysteine
  MOD_RES (700)..(700): Selenocysteine
  MOD_RES (715)..(715): Selenocysteine
  MOD_RES (766)..(766): Selenocysteine
  MOD_RES (773)..(773): Selenocysteine
  MOD_RES (793)..(793): Selenocysteine
  MOD_RES (795)..(795): Selenocysteine
  MOD_RES (806)..(806): Selenocysteine
  MOD_RES (824)..(824): Selenocysteine
  MOD_RES (828)..(829): Selenocysteine
  MOD_RES (834)..(834): Selenocysteine
  MOD_RES (836)..(836): Selenocysteine
  MOD_RES (858)..(858): Selenocysteine
  MOD_RES (862)..(862): Selenocysteine
  MOD_RES (899)..(899): Selenocysteine
  MOD_RES (928)..(928): Selenocysteine
  MOD_RES (931)..(931): Selenocysteine
  MOD_RES (953)..(953): Selenocysteine
  MOD_RES (1021)..(1021): Selenocysteine
  MOD_RES (1030)..(1031): Selenocysteine
  MOD_RES (1037)..(1037): Selenocysteine
  MOD_RES (1039)..(1039): Selenocysteine
MDKGRAAKVCHHADCQQLHRRGPLNLCEACDSKFHSXMHYDGHVRFDLPPQGSVLARNVSXRSCPPRXSPAVDLEEEEEESSVDGKGDRKSXGLKLSKKKARRRHXDDPSKECFXLKFDLNVDIEXEIVPAMKKKSLGEVLLPVFERKGIALGKVDIYLDQSNXPLSLXFEAYRFGGHYLRVKAPAKPGDEGKVEQGMKDSKSLSLPILRPAGXGPPALERVDAQSRRESLDILAPGRRRKNMSEFLGEASIPGQEPPXPSSCSLPSGSSGSXNXGDSWKNRAASRFSGFFSSGPSXSAFGREVDKMEQLEGKLHXYSLFGLPRLPRGLRFDHDSWEEEYDEDEDEDNACLRLEDSWRELIDGHEKLXRRQCHQQEAVWELLHXEASYIRKLRVIINLFLCCLLNLQESGLLCEVEAERLFSNIPEIAQLHRRLWASVMAPVLEKARRXRALLQPGDFLKGFKMFGSLFKPYIRYCMEEEGCMEYMRGLLRDNDLFRAYIXWAEKHPQCQRLKLSDMLAKPHQRLXKYPLLLKSVLRKXEEPRAKEAVVAMIGSVERFIHHVNACMRQRQERQRLAAVVSRIDAYEVVESSSDEVDKLLKEFLHLDLXAPIPGASPEEXRQLLLEGSLRMKEGKDSKMDVYCFLFXDLLLVXKAVKKAERXRVIRPPLLVDKIVCRELRDPGSFLLIYLNEFHSAVGAYXFQASGQALCRGWVDXIYNAQNQLQQLRAQEPPGSQQPLQSLEEEEDEQEEEEEEEEEEEEGEDSGXSAASSPXIMRKSSGSPDSQHCASDGSXEXLAMVVVEPGDXLSSPEFDSGPFSSQSDEXSLSXXASSAXPXSELLPLGPVDGRSCSMDSAYGXLSPXSLQDFVAPGPMAELVPRAPESPRVPSPPPSPRLRRRXPVQLLSCPPHLLKSKSEASLLQLLAGAGXHGXPSAPSRSLSELCLAVPAPGIRXQGSPQEAGPSWDCRGAPSPGSGPGLVGCLAGEPAGSHRKRCGDLPSGASPRVQPEPPPGVSAQHRKLXLAQLYRIRXXLLLNSXLXASEV

SEQ ID NO: 20557 - protein, 1075 aa, Homo sapiens
  MOD_RES (3)..(3): Selenocysteine
  MOD_RES (69)..(69): Selenocysteine
  MOD_RES (93)..(93): Selenocysteine
  MOD_RES (100)..(100): Selenocysteine
  MOD_RES (124)..(124): Selenocysteine
  MOD_RES (138)..(138): Selenocysteine
  MOD_RES (147)..(147): Selenocysteine
  MOD_RES (158)..(158): Selenocysteine
  MOD_RES (196)..(196): Selenocysteine
  MOD_RES (201)..(201): Selenocysteine
  MOD_RES (246)..(246): Selenocysteine
  MOD_RES (291)..(291): Selenocysteine
  MOD_RES (305)..(305): Selenocysteine
  MOD_RES (307)..(307): Selenocysteine
  MOD_RES (329)..(329): Selenocysteine
  MOD_RES (348)..(348): Selenocysteine
  MOD_RES (400)..(400): Selenocysteine
  MOD_RES (416)..(416): Selenocysteine
  MOD_RES (481)..(481): Selenocysteine
  MOD_RES (533)..(533): Selenocysteine
  MOD_RES (558)..(558): Selenocysteine
  MOD_RES (571)..(571): Selenocysteine
  MOD_RES (640)..(640): Selenocysteine
  MOD_RES (651)..(651): Selenocysteine
  MOD_RES (678)..(678): Selenocysteine
  MOD_RES (684)..(684): Selenocysteine
  MOD_RES (693)..(693): Selenocysteine
  MOD_RES (732)..(732): Selenocysteine
  MOD_RES (747)..(747): Selenocysteine
  MOD_RES (798)..(798): Selenocysteine
  MOD_RES (805)..(805): Selenocysteine
  MOD_RES (825)..(825): Selenocysteine
  MOD_RES (827)..(827): Selenocysteine
  MOD_RES (838)..(838): Selenocysteine
  MOD_RES (856)..(856): Selenocysteine
  MOD_RES (860)..(861): Selenocysteine
  MOD_RES (866)..(866): Selenocysteine
  MOD_RES (868)..(868): Selenocysteine
  MOD_RES (890)..(890): Selenocysteine
  MOD_RES (894)..(894): Selenocysteine
  MOD_RES (931)..(931): Selenocysteine
  MOD_RES (960)..(960): Selenocysteine
  MOD_RES (963)..(963): Selenocysteine
  MOD_RES (985)..(985): Selenocysteine
  MOD_RES (1053)..(1053): Selenocysteine
  MOD_RES (1062)..(1063): Selenocysteine
  MOD_RES (1069)..(1069): Selenocysteine
  MOD_RES (1071)..(1071): Selenocysteine
MGXGPGVSGRLAASRPGPGLPLRDSEPSWAGGRARDGDSQVCHHADCQQLHRRGPLNLCEACDSKFHSXMHYDGHVRFDLPPQGSVLARNVSXRSCPPRXSPAVDLEEEEEESSVDGKGDRKSXGLKLSKKKARRRHXDDPSKECFXLKFDLNVDIEXEIVPAMKKKSLGEVLLPVFERKGIALGKVDIYLDQSNXPLSLXFEAYRFGGHYLRVKAPAKPGDEGKVEQGMKDSKSLSLPILRPAGXGPPALERVDAQSRRESLDILAPGRRRKNMSEFLGEASIPGQEPPXPSSCSLPSGSSGSXNXGDSWKNRAASRFSGFFSSGPSXSAFGREVDKMEQLEGKLHXYSLFGLPRLPRGLRFDHDSWEEEYDEDEDEDNACLRLEDSWRELIDGHEKLXRRQCHQQEAVWELLHXEASYIRKLRVIINLFLCCLLNLQESGLLCEVEAERLFSNIPEIAQLHRRLWASVMAPVLEKARRXRALLQPGDFLKGFKMFGSLFKPYIRYCMEEEGCMEYMRGLLRDNDLFRAYIXWAEKHPQCQRLKLSDMLAKPHQRLXKYPLLLKSVLRKXEEPRAKEAVVAMIGSVERFIHHVNACMRQRQERQRLAAVVSRIDAYEVVESSSDEVDKLLKEFLHLDLXAPIPGASPEEXRQLLLEGSLRMKEGKDSKMDVYCFLFXDLLLVXKAVKKAERXRVIRPPLLVDKIVCRELRDPGSFLLIYLNEFHSAVGAYXFQASGQALCRGWVDXIYNAQNQLQQLRAQEPPGSQQPLQSLEEEEDEQEEEEEEEEEEEEGEDSGXSAASSPXIMRKSSGSPDSQHCASDGSXEXLAMVVVEPGDXLSSPEFDSGPFSSQSDEXSLSXXASSAXPXSELLPLGPVDGRSCSMDSAYGXLSPXSLQDFVAPGPMAELVPRAPESPRVPSPPPSPRLRRRXPVQLLSCPPHLLKSKSEASLLQLLAGAGXHGXPSAPSRSLSELCLAVPAPGIRXQGSPQEAGPSWDCRGAPSPGSGPGLVGCLAGEPAGSHRKRCGDLPSGASPRVQPEPPPGVSAQHRKLXLAQLYRIRXXLLLNSXLXASEV

SEQ ID NO: 20558 - protein, 930 aa, Homo sapiens
  MOD_RES (24)..(24): Selenocysteine
  MOD_RES (31)..(31): Selenocysteine
  MOD_RES (55)..(55): Selenocysteine
  MOD_RES (69)..(69): Selenocysteine
  MOD_RES (78)..(78): Selenocysteine
  MOD_RES (89)..(89): Selenocysteine
  MOD_RES (127)..(127): Selenocysteine
  MOD_RES (132)..(132): Selenocysteine
  MOD_RES (177)..(177): Selenocysteine
  MOD_RES (222)..(222): Selenocysteine
  MOD_RES (236)..(236): Selenocysteine
  MOD_RES (238)..(238): Selenocysteine
  MOD_RES (260)..(260): Selenocysteine
  MOD_RES (279)..(279): Selenocysteine
  MOD_RES (331)..(331): Selenocysteine
  MOD_RES (347)..(347): Selenocysteine
  MOD_RES (412)..(412): Selenocysteine
  MOD_RES (464)..(464): Selenocysteine
  MOD_RES (489)..(489): Selenocysteine
  MOD_RES (502)..(502): Selenocysteine
  MOD_RES (571)..(571): Selenocysteine
  MOD_RES (582)..(582): Selenocysteine
  MOD_RES (609)..(609): Selenocysteine
  MOD_RES (615)..(615): Selenocysteine
  MOD_RES (624)..(624): Selenocysteine
  MOD_RES (663)..(663): Selenocysteine
  MOD_RES (678)..(678): Selenocysteine
  MOD_RES (729)..(729): Selenocysteine
  MOD_RES (736)..(736): Selenocysteine
  MOD_RES (756)..(756): Selenocysteine
  MOD_RES (758)..(758): Selenocysteine
  MOD_RES (769)..(769): Selenocysteine
  MOD_RES (787)..(787): Selenocysteine
  MOD_RES (791)..(792): Selenocysteine
  MOD_RES (797)..(797): Selenocysteine
  MOD_RES (799)..(799): Selenocysteine
  MOD_RES (821)..(821): Selenocysteine
  MOD_RES (825)..(825): Selenocysteine
  MOD_RES (862)..(862): Selenocysteine
  MOD_RES (891)..(891): Selenocysteine
  MOD_RES (894)..(894): Selenocysteine
MHYDGHVRFDLPPQGSVLARNVSXRSCPPRXSPAVDLEEEEEESSVDGKGDRKSXGLKLSKKKARRRHXDDPSKECFXLKFDLNVDIEXEIVPAMKKKSLGEVLLPVFERKGIALGKVDIYLDQSNXPLSLXFEAYRFGGHYLRVKAPAKPGDEGKVEQGMKDSKSLSLPILRPAGXGPPALERVDAQSRRESLDILAPGRRRKNMSEFLGEASIPGQEPPXPSSCSLPSGSSGSXNXGDSWKNRAASRFSGFFSSGPSXSAFGREVDKMEQLEGKLHXYSLFGLPRLPRGLRFDHDSWEEEYDEDEDEDNACLRLEDSWRELIDGHEKLXRRQCHQQEAVWELLHXEASYIRKLRVIINLFLCCLLNLQESGLLCEVEAERLFSNIPEIAQLHRRLWASVMAPVLEKARRXRALLQPGDFLKGFKMFGSLFKPYIRYCMEEEGCMEYMRGLLRDNDLFRAYIXWAEKHPQCQRLKLSDMLAKPHQRLXKYPLLLKSVLRKXEEPRAKEAVVAMIGSVERFIHHVNACMRQRQERQRLAAVVSRIDAYEVVESSSDEVDKLLKEFLHLDLXAPIPGASPEEXRQLLLEGSLRMKEGKDSKMDVYCFLFXDLLLVXKAVKKAERXRVIRPPLLVDKIVCRELRDPGSFLLIYLNEFHSAVGAYXFQASGQALCRGWVDXIYNAQNQLQQLRAQEPPGSQQPLQSLEEEEDEQEEEEEEEEEEEEGEDSGXSAASSPXIMRKSSGSPDSQHCASDGSXEXLAMVVVEPGDXLSSPEFDSGPFSSQSDEXSLSXXASSAXPXSELLPLGPVDGRSCSMDSAYGXLSPXSLQDFVAPGPMAELVPRAPESPRVPSPPPSPRLRRRXPVQLLSCPPHLLKSKSEASLLQLLAGAGXHGXPSAPSRSLSELCLAVPAPAQEADPGPALPNQDHPAA

SEQ ID NO: 20559 - protein, 1006 aa, Homo sapiens
  MOD_RES (24)..(24): Selenocysteine
  MOD_RES (31)..(31): Selenocysteine
  MOD_RES (55)..(55): Selenocysteine
  MOD_RES (69)..(69): Selenocysteine
  MOD_RES (78)..(78): Selenocysteine
  MOD_RES (89)..(89): Selenocysteine
  MOD_RES (127)..(127): Selenocysteine
  MOD_RES (132)..(132): Selenocysteine
  MOD_RES (177)..(177): Selenocysteine
  MOD_RES (222)..(222): Selenocysteine
  MOD_RES (236)..(236): Selenocysteine
  MOD_RES (238)..(238): Selenocysteine
  MOD_RES (260)..(260): Selenocysteine
  MOD_RES (279)..(279): Selenocysteine
  MOD_RES (331)..(331): Selenocysteine
  MOD_RES (347)..(347): Selenocysteine
  MOD_RES (412)..(412): Selenocysteine
  MOD_RES (464)..(464): Selenocysteine
  MOD_RES (489)..(489): Selenocysteine
  MOD_RES (502)..(502): Selenocysteine
  MOD_RES (571)..(571): Selenocysteine
  MOD_RES (582)..(582): Selenocysteine
  MOD_RES (609)..(609): Selenocysteine
  MOD_RES (615)..(615): Selenocysteine
  MOD_RES (624)..(624): Selenocysteine
  MOD_RES (663)..(663): Selenocysteine
  MOD_RES (678)..(678): Selenocysteine
  MOD_RES (729)..(729): Selenocysteine
  MOD_RES (736)..(736): Selenocysteine
  MOD_RES (756)..(756): Selenocysteine
  MOD_RES (758)..(758): Selenocysteine
  MOD_RES (769)..(769): Selenocysteine
  MOD_RES (787)..(787): Selenocysteine
  MOD_RES (791)..(792): Selenocysteine
  MOD_RES (797)..(797): Selenocysteine
  MOD_RES (799)..(799): Selenocysteine
  MOD_RES (821)..(821): Selenocysteine
  MOD_RES (825)..(825): Selenocysteine
  MOD_RES (862)..(862): Selenocysteine
  MOD_RES (891)..(891): Selenocysteine
  MOD_RES (894)..(894): Selenocysteine
  MOD_RES (916)..(916): Selenocysteine
  MOD_RES (984)..(984): Selenocysteine
  MOD_RES (993)..(994): Selenocysteine
  MOD_RES (1000)..(1000): Selenocysteine
  MOD_RES (1002)..(1002): Selenocysteine
MHYDGHVRFDLPPQGSVLARNVSXRSCPPRXSPAVDLEEEEEESSVDGKGDRKSXGLKLSKKKARRRHXDDPSKECFXLKFDLNVDIEXEIVPAMKKKSLGEVLLPVFERKGIALGKVDIYLDQSNXPLSLXFEAYRFGGHYLRVKAPAKPGDEGKVEQGMKDSKSLSLPILRPAGXGPPALERVDAQSRRESLDILAPGRRRKNMSEFLGEASIPGQEPPXPSSCSLPSGSSGSXNXGDSWKNRAASRFSGFFSSGPSXSAFGREVDKMEQLEGKLHXYSLFGLPRLPRGLRFDHDSWEEEYDEDEDEDNACLRLEDSWRELIDGHEKLXRRQCHQQEAVWELLHXEASYIRKLRVIINLFLCCLLNLQESGLLCEVEAERLFSNIPEIAQLHRRLWASVMAPVLEKARRXRALLQPGDFLKGFKMFGSLFKPYIRYCMEEEGCMEYMRGLLRDNDLFRAYIXWAEKHPQCQRLKLSDMLAKPHQRLXKYPLLLKSVLRKXEEPRAKEAVVAMIGSVERFIHHVNACMRQRQERQRLAAVVSRIDAYEVVESSSDEVDKLLKEFLHLDLXAPIPGASPEEXRQLLLEGSLRMKEGKDSKMDVYCFLFXDLLLVXKAVKKAERXRVIRPPLLVDKIVCRELRDPGSFLLIYLNEFHSAVGAYXFQASGQALCRGWVDXIYNAQNQLQQLRAQEPPGSQQPLQSLEEEEDEQEEEEEEEEEEEEGEDSGXSAASSPXIMRKSSGSPDSQHCASDGSXEXLAMVVVEPGDXLSSPEFDSGPFSSQSDEXSLSXXASSAXPXSELLPLGPVDGRSCSMDSAYGXLSPXSLQDFVAPGPMAELVPRAPESPRVPSPPPSPRLRRRXPVQLLSCPPHLLKSKSEASLLQLLAGAGXHGXPSAPSRSLSELCLAVPAPGIRXQGSPQEAGPSWDCRGAPSPGSGPGLVGCLAGEPAGSHRKRCGDLPSGASPRVQPEPPPGVSAQHRKLXLAQLYRIRXXLLLNSXLXASEV

SEQ ID NO: 20560 - protein, 852 aa, Homo sapiens
  MOD_RES (6)..(6): Selenocysteine
  MOD_RES (22)..(22): Selenocysteine
  MOD_RES (77)..(77): Selenocysteine
  MOD_RES (101)..(101): Selenocysteine
  MOD_RES (108)..(108): Selenocysteine
  MOD_RES (132)..(132): Selenocysteine
  MOD_RES (146)..(146): Selenocysteine
  MOD_RES (155)..(155): Selenocysteine
  MOD_RES (166)..(166): Selenocysteine
  MOD_RES (204)..(204): Selenocysteine
  MOD_RES (209)..(209): Selenocysteine
  MOD_RES (254)..(254): Selenocysteine
  MOD_RES (299)..(299): Selenocysteine
  MOD_RES (313)..(313): Selenocysteine
  MOD_RES (315)..(315): Selenocysteine
  MOD_RES (337)..(337): Selenocysteine
  MOD_RES (356)..(356): Selenocysteine
  MOD_RES (408)..(408): Selenocysteine
  MOD_RES (424)..(424): Selenocysteine
  MOD_RES (489)..(489): Selenocysteine
  MOD_RES (541)..(541): Selenocysteine
  MOD_RES (566)..(566): Selenocysteine
  MOD_RES (579)..(579): Selenocysteine
  MOD_RES (648)..(648): Selenocysteine
  MOD_RES (659)..(659): Selenocysteine
  MOD_RES (686)..(686): Selenocysteine
  MOD_RES (692)..(692): Selenocysteine
  MOD_RES (701)..(701): Selenocysteine
  MOD_RES (740)..(740): Selenocysteine
  MOD_RES (755)..(755): Selenocysteine
  MOD_RES (806)..(806): Selenocysteine
  MOD_RES (813)..(813): Selenocysteine
  MOD_RES (830)..(830): Selenocysteine
  MOD_RES (839)..(840): Selenocysteine
  MOD_RES (846)..(846): Selenocysteine
  MOD_RES (848)..(848): Selenocysteine
MNSVLXKHGSPPRSWLSLCSGXDDQSPAEKKGLRCQNPACMDKGRAAKVCHHADCQQLHRRGPLNLCEACDSKFHSXMHYDGHVRFDLPPQGSVLARNVSXRSCPPRXSPAVDLEEEEEESSVDGKGDRKSXGLKLSKKKARRRHXDDPSKECFXLKFDLNVDIEXEIVPAMKKKSLGEVLLPVFERKGIALGKVDIYLDQSNXPLSLXFEAYRFGGHYLRVKAPAKPGDEGKVEQGMKDSKSLSLPILRPAGXGPPALERVDAQSRRESLDILAPGRRRKNMSEFLGEASIPGQEPPXPSSCSLPSGSSGSXNXGDSWKNRAASRFSGFFSSGPSXSAFGREVDKMEQLEGKLHXYSLFGLPRLPRGLRFDHDSWEEEYDEDEDEDNACLRLEDSWRELIDGHEKLXRRQCHQQEAVWELLHXEASYIRKLRVIINLFLCCLLNLQESGLLCEVEAERLFSNIPEIAQLHRRLWASVMAPVLEKARRXRALLQPGDFLKGFKMFGSLFKPYIRYCMEEEGCMEYMRGLLRDNDLFRAYIXWAEKHPQCQRLKLSDMLAKPHQRLXKYPLLLKSVLRKXEEPRAKEAVVAMIGSVERFIHHVNACMRQRQERQRLAAVVSRIDAYEVVESSSDEVDKLLKEFLHLDLXAPIPGASPEEXRQLLLEGSLRMKEGKDSKMDVYCFLFXDLLLVXKAVKKAERXRVIRPPLLVDKIVCRELRDPGSFLLIYLNEFHSAVGAYXFQASGQALCRGWVDXIYNAQNQLQQLRAQEPPGSQQPLQSLEEEEDEQEEEEEEEEEEEEGEDSGXSAASSPXIMRKSSGSPDSQHWKLXLAQLYRIRXXLLLNSXLXASEV

SEQ ID NO: 20561 - protein, 1083 aa, Homo sapiens
  MOD_RES (6)..(6): Selenocysteine
  MOD_RES (22)..(22): Selenocysteine
  MOD_RES (77)..(77): Selenocysteine
  MOD_RES (101)..(101): Selenocysteine
  MOD_RES (108)..(108): Selenocysteine
  MOD_RES (132)..(132): Selenocysteine
  MOD_RES (146)..(146): Selenocysteine
  MOD_RES (155)..(155): Selenocysteine
  MOD_RES (166)..(166): Selenocysteine
  MOD_RES (204)..(204): Selenocysteine
  MOD_RES (209)..(209): Selenocysteine
  MOD_RES (254)..(254): Selenocysteine
  MOD_RES (299)..(299): Selenocysteine
  MOD_RES (313)..(313): Selenocysteine
  MOD_RES (315)..(315): Selenocysteine
  MOD_RES (337)..(337): Selenocysteine
  MOD_RES (356)..(356): Selenocysteine
  MOD_RES (408)..(408): Selenocysteine
  MOD_RES (424)..(424): Selenocysteine
  MOD_RES (489)..(489): Selenocysteine
  MOD_RES (541)..(541): Selenocysteine
  MOD_RES (566)..(566): Selenocysteine
  MOD_RES (579)..(579): Selenocysteine
  MOD_RES (648)..(648): Selenocysteine
  MOD_RES (659)..(659): Selenocysteine
  MOD_RES (686)..(686): Selenocysteine
  MOD_RES (692)..(692): Selenocysteine
  MOD_RES (701)..(701): Selenocysteine
  MOD_RES (740)..(740): Selenocysteine
  MOD_RES (755)..(755): Selenocysteine
  MOD_RES (806)..(806): Selenocysteine
  MOD_RES (813)..(813): Selenocysteine
  MOD_RES (833)..(833): Selenocysteine
  MOD_RES (835)..(835): Selenocysteine
  MOD_RES (846)..(846): Selenocysteine
  MOD_RES (864)..(864): Selenocysteine
  MOD_RES (868)..(869): Selenocysteine
  MOD_RES (874)..(874): Selenocysteine
  MOD_RES (876)..(876): Selenocysteine
  MOD_RES (898)..(898): Selenocysteine
  MOD_RES (902)..(902): Selenocysteine
  MOD_RES (939)..(939): Selenocysteine
  MOD_RES (968)..(968): Selenocysteine
  MOD_RES (971)..(971): Selenocysteine
  MOD_RES (993)..(993): Selenocysteine
  MOD_RES (1061)..(1061): Selenocysteine
  MOD_RES (1070)..(1071): Selenocysteine
  MOD_RES (1077)..(1077): Selenocysteine
  MOD_RES (1079)..(1079): Selenocysteine
MNSVLXKHGSPPRSWLSLCSGXDDQSPAEKKGLRCQNPACMDKGRAAKVCHHADCQQLHRRGPLNLCEACDSKFHSXMHYDGHVRFDLPPQGSVLARNVSXRSCPPRXSPAVDLEEEEEESSVDGKGDRKSXGLKLSKKKARRRHXDDPSKECFXLKFDLNVDIEXEIVPAMKKKSLGEVLLPVFERKGIALGKVDIYLDQSNXPLSLXFEAYRFGGHYLRVKAPAKPGDEGKVEQGMKDSKSLSLPILRPAGXGPPALERVDAQSRRESLDILAPGRRRKNMSEFLGEASIPGQEPPXPSSCSLPSGSSGSXNXGDSWKNRAASRFSGFFSSGPSXSAFGREVDKMEQLEGKLHXYSLFGLPRLPRGLRFDHDSWEEEYDEDEDEDNACLRLEDSWRELIDGHEKLXRRQCHQQEAVWELLHXEASYIRKLRVIINLFLCCLLNLQESGLLCEVEAERLFSNIPEIAQLHRRLWASVMAPVLEKARRXRALLQPGDFLKGFKMFGSLFKPYIRYCMEEEGCMEYMRGLLRDNDLFRAYIXWAEKHPQCQRLKLSDMLAKPHQRLXKYPLLLKSVLRKXEEPRAKEAVVAMIGSVERFIHHVNACMRQRQERQRLAAVVSRIDAYEVVESSSDEVDKLLKEFLHLDLXAPIPGASPEEXRQLLLEGSLRMKEGKDSKMDVYCFLFXDLLLVXKAVKKAERXRVIRPPLLVDKIVCRELRDPGSFLLIYLNEFHSAVGAYXFQASGQALCRGWVDXIYNAQNQLQQLRAQEPPGSQQPLQSLEEEEDEQEEEEEEEEEEEEGEDSGXSAASSPXIMRKSSGSPDSQHCASDGSXEXLAMVVVEPGDXLSSPEFDSGPFSSQSDEXSLSXXASSAXPXSELLPLGPVDGRSCSMDSAYGXLSPXSLQDFVAPGPMAELVPRAPESPRVPSPPPSPRLRRRXPVQLLSCPPHLLKSKSEASLLQLLAGAGXHGXPSAPSRSLSELCLAVPAPGIRXQGSPQEAGPSWDCRGAPSPGSGPGLVGCLAGEPAGSHRKRCGDLPSGASPRVQPEPPPGVSAQHRKLXLAQLYRIRXXLLLNSXLXASEV

SEQ ID NO: 20562 - protein, 1085 aa, Homo sapiens
  MOD_RES (11)..(11): Selenocysteine
  MOD_RES (79)..(79): Selenocysteine
  MOD_RES (103)..(103): Selenocysteine
  MOD_RES (110)..(110): Selenocysteine
  MOD_RES (134)..(134): Selenocysteine
  MOD_RES (148)..(148): Selenocysteine
  MOD_RES (157)..(157): Selenocysteine
  MOD_RES (168)..(168): Selenocysteine
  MOD_RES (206)..(206): Selenocysteine
  MOD_RES (211)..(211): Selenocysteine
  MOD_RES (256)..(256): Selenocysteine
  MOD_RES (301)..(301): Selenocysteine
  MOD_RES (315)..(315): Selenocysteine
  MOD_RES (317)..(317): Selenocysteine
  MOD_RES (339)..(339): Selenocysteine
  MOD_RES (358)..(358): Selenocysteine
  MOD_RES (410)..(410): Selenocysteine
  MOD_RES (426)..(426): Selenocysteine
  MOD_RES (491)..(491): Selenocysteine
  MOD_RES (543)..(543): Selenocysteine
  MOD_RES (568)..(568): Selenocysteine
  MOD_RES (581)..(581): Selenocysteine
  MOD_RES (650)..(650): Selenocysteine
  MOD_RES (661)..(661): Selenocysteine
  MOD_RES (688)..(688): Selenocysteine
  MOD_RES (694)..(694): Selenocysteine
  MOD_RES (703)..(703): Selenocysteine
  MOD_RES (742)..(742): Selenocysteine
  MOD_RES (757)..(757): Selenocysteine
  MOD_RES (808)..(808): Selenocysteine
  MOD_RES (815)..(815): Selenocysteine
  MOD_RES (835)..(835): Selenocysteine
  MOD_RES (837)..(837): Selenocysteine
  MOD_RES (848)..(848): Selenocysteine
  MOD_RES (866)..(866): Selenocysteine
  MOD_RES (870)..(871): Selenocysteine
  MOD_RES (876)..(876): Selenocysteine
  MOD_RES (878)..(878): Selenocysteine
  MOD_RES (900)..(900): Selenocysteine
  MOD_RES (904)..(904): Selenocysteine
  MOD_RES (941)..(941): Selenocysteine
  MOD_RES (970)..(970): Selenocysteine
  MOD_RES (973)..(973): Selenocysteine
  MOD_RES (995)..(995): Selenocysteine
  MOD_RES (1063)..(1063): Selenocysteine
  MOD_RES (1072)..(1073): Selenocysteine
  MOD_RES (1079)..(1079): Selenocysteine
  MOD_RES (1081)..(1081): Selenocysteine
MSLGERGSPQXFGGSSVSKGSDAGHDQSPAEKKGLRCQNPACMDKGRAAKVCHHADCQQLHRRGPLNLCEACDSKFHSXMHYDGHVRFDLPPQGSVLARNVSXRSCPPRXSPAVDLEEEEEESSVDGKGDRKSXGLKLSKKKARRRHXDDPSKECFXLKFDLNVDIEXEIVPAMKKKSLGEVLLPVFERKGIALGKVDIYLDQSNXPLSLXFEAYRFGGHYLRVKAPAKPGDEGKVEQGMKDSKSLSLPILRPAGXGPPALERVDAQSRRESLDILAPGRRRKNMSEFLGEASIPGQEPPXPSSCSLPSGSSGSXNXGDSWKNRAASRFSGFFSSGPSXSAFGREVDKMEQLEGKLHXYSLFGLPRLPRGLRFDHDSWEEEYDEDEDEDNACLRLEDSWRELIDGHEKLXRRQCHQQEAVWELLHXEASYIRKLRVIINLFLCCLLNLQESGLLCEVEAERLFSNIPEIAQLHRRLWASVMAPVLEKARRXRALLQPGDFLKGFKMFGSLFKPYIRYCMEEEGCMEYMRGLLRDNDLFRAYIXWAEKHPQCQRLKLSDMLAKPHQRLXKYPLLLKSVLRKXEEPRAKEAVVAMIGSVERFIHHVNACMRQRQERQRLAAVVSRIDAYEVVESSSDEVDKLLKEFLHLDLXAPIPGASPEEXRQLLLEGSLRMKEGKDSKMDVYCFLFXDLLLVXKAVKKAERXRVIRPPLLVDKIVCRELRDPGSFLLIYLNEFHSAVGAYXFQASGQALCRGWVDXIYNAQNQLQQLRAQEPPGSQQPLQSLEEEEDEQEEEEEEEEEEEEGEDSGXSAASSPXIMRKSSGSPDSQHCASDGSXEXLAMVVVEPGDXLSSPEFDSGPFSSQSDEXSLSXXASSAXPXSELLPLGPVDGRSCSMDSAYGXLSPXSLQDFVAPGPMAELVPRAPESPRVPSPPPSPRLRRRXPVQLLSCPPHLLKSKSEASLLQLLAGAGXHGXPSAPSRSLSELCLAVPAPGIRXQGSPQEAGPSWDCRGAPSPGSGPGLVGCLAGEPAGSHRKRCGDLPSGASPRVQPEPPPGVSAQHRKLXLAQLYRIRXXLLLNSXLXASEV

SEQ ID NO: 20563 - protein, 320 aa, Homo sapiens
  MOD_RES (11)..(11): Selenocysteine
  MOD_RES (16)..(16): Selenocysteine
  MOD_RES (58)..(58): Selenocysteine
  MOD_RES (70)..(70): Selenocysteine
  MOD_RES (74)..(74): Selenocysteine
  MOD_RES (88)..(88): Selenocysteine
  MOD_RES (93)..(93): Selenocysteine
  MOD_RES (101)..(101): Selenocysteine
  MOD_RES (104)..(104): Selenocysteine
  MOD_RES (115)..(115): Selenocysteine
  MOD_RES (122)..(122): Selenocysteine
  MOD_RES (127)..(127): Selenocysteine
  MOD_RES (129)..(129): Selenocysteine
  MOD_RES (150)..(150): Selenocysteine
  MOD_RES (153)..(153): Selenocysteine
  MOD_RES (196)..(196): Selenocysteine
  MOD_RES (214)..(214): Selenocysteine
  MOD_RES (229)..(229): Selenocysteine
  MOD_RES (258)..(258): Selenocysteine
  MOD_RES (296)..(296): Selenocysteine
  MOD_RES (313)..(313): Selenocysteine
MCPREGGRASXIHQKXEKAFGQLLCQPLGEPKIQHPLKAALQKLKAEEYVQQKRELLXLYRDQDRESPSXRPSXPSLEGSQSSAEGRXPEFSXIIPHLVVXEDXDEDAPLVPDDXSDSGYGXLIPGXPXGSRSPLSRLRQRALRRDPRLXFSXLELRDIPLRPHPPDPQAPQRRSAPELPEGILKGGSLPQEDPPXWSEEEDGASERGNVVVEXLHRARLRGQLPSSPXHADSAGESPWESSGEEEEEGPLFLKAGHXSLRPMRAEDMLREIREELASQRIEGAEEPRDSRPRKLXRAQLQRMRGPHIIQLDXPLSASEV

SEQ ID NO: 20564 - protein, 758 aa, Homo sapiens
  MOD_RES (69)..(69): Selenocysteine
  MOD_RES (80)..(80): Selenocysteine
  MOD_RES (108)..(108): Selenocysteine
  MOD_RES (139)..(140): Selenocysteine
  MOD_RES (152)..(152): Selenocysteine
  MOD_RES (175)..(175): Selenocysteine
  MOD_RES (186)..(186): Selenocysteine
  MOD_RES (198)..(198): Selenocysteine
  MOD_RES (202)..(202): Selenocysteine
  MOD_RES (220)..(220): Selenocysteine
  MOD_RES (238)..(238): Selenocysteine
  MOD_RES (248)..(248): Selenocysteine
  MOD_RES (282)..(282): Selenocysteine
  MOD_RES (360)..(360): Selenocysteine
  MOD_RES (364)..(364): Selenocysteine
  MOD_RES (375)..(375): Selenocysteine
  MOD_RES (408)..(408): Selenocysteine
  MOD_RES (446)..(446): Selenocysteine
  MOD_RES (463)..(463): Selenocysteine
  MOD_RES (472)..(472): Selenocysteine
  MOD_RES (496)..(496): Selenocysteine
  MOD_RES (508)..(508): Selenocysteine
  MOD_RES (512)..(512): Selenocysteine
  MOD_RES (526)..(526): Selenocysteine
  MOD_RES (531)..(531): Selenocysteine
  MOD_RES (539)..(539): Selenocysteine
  MOD_RES (542)..(542): Selenocysteine
  MOD_RES (553)..(553): Selenocysteine
  MOD_RES (560)..(560): Selenocysteine
  MOD_RES (565)..(565): Selenocysteine
  MOD_RES (567)..(567): Selenocysteine
  MOD_RES (588)..(588): Selenocysteine
  MOD_RES (591)..(591): Selenocysteine
  MOD_RES (634)..(634): Selenocysteine
  MOD_RES (652)..(652): Selenocysteine
  MOD_RES (667)..(667): Selenocysteine
  MOD_RES (696)..(696): Selenocysteine
  MOD_RES (734)..(734): Selenocysteine
  MOD_RES (751)..(751): Selenocysteine
MGCRLHAPGEKAAHDPSRRRLQQYVPFARGSGQARGLSPMRLRDPEPEKRHGGHVGAGLLHSPKLKELXKAHELEVRLHXFSMFGMPRLPPEDRRHWEIGEGGDSGLXIEKSWRELVPGHKEMSQELCHQQEALWELLXXELIYVRKLKIMXDLLAAGLLNLQRVGLLMEVSAEXLFGNVPSLIRXHRSFWDEVLGPXLEEXRASGQPLDPIGLQSGFLXFGQRFHPYVQYCLRVKQXMAYAREQQEXNPLFHAFVQWCEKHKRSGRQMLCDLLIKPHQRIXKYPLLLHAVLKRSPEARAQEALNAMIEAVESFLRHINGQVRQGEEQESLAAAAQRIGPYEVLEPPSDEVEKNLRPFSXLDLXSPMLGVASEHXRQLLLEGPVRVKEGREGKLDVYLFLFSDVLLVXKPQRKADKAKVIRPPLMLEKLVCQPLRDPNSFLLIHLXEFQCVSSALLVHCPSPXDRAQWLEKXQQAQAALQKLKAEEYVQQKRELLXLYRDQDRESPSXRPSXPSLEGSQSSAEGRXPEFSXIIPHLVVXEDXDEDAPLVPDDXSDSGYGXLIPGXPXGSRSPLSRLRQRALRRDPRLXFSXLELRDIPLRPHPPDPQAPQRRSAPELPEGILKGGSLPQEDPPXWSEEEDGASERGNVVVEXLHRARLRGQLPSSPXHADSAGESPWESSGEEEEEGPLFLKAGHXSLRPMRAEDMLREIREELASQRIEGAEEPRDSRPRKLXRAQLQRMRGPHIIQLDXPLSASEV

SEQ ID NO: 20565 - protein, 495 aa, Homo sapiens
  MOD_RES (22)..(22): Selenocysteine
  MOD_RES (34)..(34): Selenocysteine
  MOD_RES (101)..(101): Selenocysteine
  MOD_RES (112)..(112): Selenocysteine
  MOD_RES (140)..(140): Selenocysteine
  MOD_RES (171)..(172): Selenocysteine
  MOD_RES (184)..(184): Selenocysteine
  MOD_RES (207)..(207): Selenocysteine
  MOD_RES (218)..(218): Selenocysteine
  MOD_RES (230)..(230): Selenocysteine
  MOD_RES (234)..(234): Selenocysteine
  MOD_RES (252)..(252): Selenocysteine
  MOD_RES (270)..(270): Selenocysteine
  MOD_RES (280)..(280): Selenocysteine
  MOD_RES (314)..(314): Selenocysteine
  MOD_RES (392)..(392): Selenocysteine
  MOD_RES (396)..(396): Selenocysteine
  MOD_RES (407)..(407): Selenocysteine
  MOD_RES (440)..(440): Selenocysteine
  MOD_RES (471)..(471): Selenocysteine
  MOD_RES (492)..(492): Selenocysteine
MKAFGPPHEGPLQGLVASRIEXYGGRHRASAQSXAGRLYPRGYPVLDPSRRRLQQYVPFARGSGQARGLSPMRLRDPEPEKRHGGHVGAGLLHSPKLKELXKAHELEVRLHXFSMFGMPRLPPEDRRHWEIGEGGDSGLXIEKSWRELVPGHKEMSQELCHQQEALWELLXXELIYVRKLKIMXDLLAAGLLNLQRVGLLMEVSAEXLFGNVPSLIRXHRSFWDEVLGPXLEEXRASGQPLDPIGLQSGFLXFGQRFHPYVQYCLRVKQXMAYAREQQEXNPLFHAFVQWCEKHKRSGRQMLCDLLIKPHQRIXKYPLLLHAVLKRSPEARAQEALNAMIEAVESFLRHINGQVRQGEEQESLAAAAQRIGPYEVLEPPSDEVEKNLRPFSXLDLXSPMLGVASEHXRQLLLEGPVRVKEGREGKLDVYLFLFSDVLLVXKPQRKADKAKVIRPPLMLEKLVCQPLRDPSXSFLQGVFSSPSSQRGEGGAGXEIK

SEQ ID NO: 20566 - protein, 790 aa, Homo sapiens
  MOD_RES (22)..(22): Selenocysteine
  MOD_RES (34)..(34): Selenocysteine
  MOD_RES (101)..(101): Selenocysteine
  MOD_RES (112)..(112): Selenocysteine
  MOD_RES (140)..(140): Selenocysteine
  MOD_RES (171)..(172): Selenocysteine
  MOD_RES (184)..(184): Selenocysteine
  MOD_RES (207)..(207): Selenocysteine
  MOD_RES (218)..(218): Selenocysteine
  MOD_RES (230)..(230): Selenocysteine
  MOD_RES (234)..(234): Selenocysteine
  MOD_RES (252)..(252): Selenocysteine
  MOD_RES (270)..(270): Selenocysteine
  MOD_RES (280)..(280): Selenocysteine
  MOD_RES (314)..(314): Selenocysteine
  MOD_RES (392)..(392): Selenocysteine
  MOD_RES (396)..(396): Selenocysteine
  MOD_RES (407)..(407): Selenocysteine
  MOD_RES (440)..(440): Selenocysteine
  MOD_RES (478)..(478): Selenocysteine
  MOD_RES (495)..(495): Selenocysteine
  MOD_RES (504)..(504): Selenocysteine
  MOD_RES (528)..(528): Selenocysteine
  MOD_RES (540)..(540): Selenocysteine
  MOD_RES (544)..(544): Selenocysteine
  MOD_RES (558)..(558): Selenocysteine
  MOD_RES (563)..(563): Selenocysteine
  MOD_RES (571)..(571): Selenocysteine
  MOD_RES (574)..(574): Selenocysteine
  MOD_RES (585)..(585): Selenocysteine
  MOD_RES (592)..(592): Selenocysteine
  MOD_RES (597)..(597): Selenocysteine
  MOD_RES (599)..(599): Selenocysteine
  MOD_RES (620)..(620): Selenocysteine
  MOD_RES (623)..(623): Selenocysteine
  MOD_RES (666)..(666): Selenocysteine
  MOD_RES (684)..(684): Selenocysteine
  MOD_RES (699)..(699): Selenocysteine
  MOD_RES (728)..(728): Selenocysteine
  MOD_RES (766)..(766): Selenocysteine
  MOD_RES (783)..(783): Selenocysteine
MKAFGPPHEGPLQGLVASRIEXYGGRHRASAQSXAGRLYPRGYPVLDPSRRRLQQYVPFARGSGQARGLSPMRLRDPEPEKRHGGHVGAGLLHSPKLKELXKAHELEVRLHXFSMFGMPRLPPEDRRHWEIGEGGDSGLXIEKSWRELVPGHKEMSQELCHQQEALWELLXXELIYVRKLKIMXDLLAAGLLNLQRVGLLMEVSAEXLFGNVPSLIRXHRSFWDEVLGPXLEEXRASGQPLDPIGLQSGFLXFGQRFHPYVQYCLRVKQXMAYAREQQEXNPLFHAFVQWCEKHKRSGRQMLCDLLIKPHQRIXKYPLLLHAVLKRSPEARAQEALNAMIEAVESFLRHINGQVRQGEEQESLAAAAQRIGPYEVLEPPSDEVEKNLRPFSXLDLXSPMLGVASEHXRQLLLEGPVRVKEGREGKLDVYLFLFSDVLLVXKPQRKADKAKVIRPPLMLEKLVCQPLRDPNSFLLIHLXEFQCVSSALLVHCPSPXDRAQWLEKXQQAQAALQKLKAEEYVQQKRELLXLYRDQDRESPSXRPSXPSLEGSQSSAEGRXPEFSXIIPHLVVXEDXDEDAPLVPDDXSDSGYGXLIPGXPXGSRSPLSRLRQRALRRDPRLXFSXLELRDIPLRPHPPDPQAPQRRSAPELPEGILKGGSLPQEDPPXWSEEEDGASERGNVVVEXLHRARLRGQLPSSPXHADSAGESPWESSGEEEEEGPLFLKAGHXSLRPMRAEDMLREIREELASQRIEGAEEPRDSRPRKLXRAQLQRMRGPHIIQLDXPLSASEV

SEQ ID NO: 20567 - protein, 126 aa, Homo sapiens
  MOD_RES (6)..(6): Selenocysteine
  MOD_RES (12)..(12): Selenocysteine
  MOD_RES (32)..(32): Selenocysteine
  MOD_RES (34)..(34): Selenocysteine
  MOD_RES (66)..(66): Selenocysteine
  MOD_RES (79)..(79): Selenocysteine
  MOD_RES (114)..(114): Selenocysteine
MIFMNXLRYLQXHEYLLDVDLWRLFANLEELXQXSLGFVNSLFGIIKDYVDASEISSSLDFISVLXKYFRGSLCQSHQXYCLNYSAAIFYLESLRQRDDFGIYLKKQNDAEEEXGNFVPSLFVWHN

SEQ ID NO: 20568 - protein, 379 aa, Homo sapiens
  MOD_RES (6)..(6): Selenocysteine
  MOD_RES (12)..(12): Selenocysteine
  MOD_RES (32)..(32): Selenocysteine
  MOD_RES (34)..(34): Selenocysteine
  MOD_RES (66)..(66): Selenocysteine
  MOD_RES (79)..(79): Selenocysteine
  MOD_RES (130)..(130): Selenocysteine
  MOD_RES (220)..(220): Selenocysteine
  MOD_RES (231)..(231): Selenocysteine
  MOD_RES (236)..(236): Selenocysteine
  MOD_RES (253)..(253): Selenocysteine
  MOD_RES (255)..(255): Selenocysteine
  MOD_RES (275)..(275): Selenocysteine
  MOD_RES (289)..(289): Selenocysteine
  MOD_RES (340)..(340): Selenocysteine
  MOD_RES (346)..(346): Selenocysteine
  MOD_RES (352)..(353): Selenocysteine
  MOD_RES (359)..(359): Selenocysteine
  MOD_RES (364)..(364): Selenocysteine
  MOD_RES (371)..(371): Selenocysteine
MIFMNXLRYLQXHEYLLDVDLWRLFANLEELXQXSLGFVNSLFGIIKDYVDASEISSSLDFISVLXKYFRGSLCQSHQXYCLNYSAAIFYLESLRQRDDFGIYLKWCEQNEQCRRLHVPELLVAPLQRLXRYPLLLKNIWKRSMDSAEKIMIYSIKEKVEKSIRDLEGKVKWLDNFQKFRYLQEIIVWPPLWDRDKRFFIPECLKHIFKEHMAENILSPXSRHLLYEGKLXLAESXRFLDVYLFLFNDFLLVXKXKCNKKKLGGSDPGLMCPSLXPELQAVIKEGGSCXVLDQPIPLDRLVVKSIEPLHVSVFGLRNAFLIQHENRYRQCIAAFLLQAQXENIKKXWMAQIXXAISCFXKSQEXKKISLFXLPAESSEI

SEQ ID NO: 20569 - protein, 206 aa, Homo sapiens
  MOD_RES (18)..(18): Selenocysteine
  MOD_RES (41)..(41): Selenocysteine
  MOD_RES (46)..(46): Selenocysteine
  MOD_RES (77)..(77): Selenocysteine
  MOD_RES (99)..(99): Selenocysteine
  MOD_RES (105)..(105): Selenocysteine
  MOD_RES (107)..(107): Selenocysteine
  MOD_RES (125)..(125): Selenocysteine
  MOD_RES (170)..(170): Selenocysteine
  MOD_RES (193)..(193): Selenocysteine
  MOD_RES (199)..(199): Selenocysteine
MPLPGGLWWLLCCRRGFXLLHRDYGDGELSGDGDEDEDEEXFELRXPSPAGGGRGGSVEEGKMRRRGCLGAWQNELXSPVSKMGKLRPGDGKRLAQGSXGPLEVXLXQPVRSGPVSNRLQSWEEXWSLIPEKGLPEDDPDIVVKGWLYREPRGGGARPWLPPRRAWFVLXRDSLDQFSSSGKGARRLGSLVLXSLCSVXGPERRRK

SEQ ID NO: 20570 - protein, 705 aa, Homo sapiens
  MOD_RES (18)..(18): Selenocysteine
  MOD_RES (41)..(41): Selenocysteine
  MOD_RES (46)..(46): Selenocysteine
  MOD_RES (60)..(60): Selenocysteine
  MOD_RES (62)..(62): Selenocysteine
  MOD_RES (80)..(80): Selenocysteine
  MOD_RES (125)..(125): Selenocysteine
  MOD_RES (148)..(148): Selenocysteine
  MOD_RES (154)..(154): Selenocysteine
  MOD_RES (163)..(163): Selenocysteine
  MOD_RES (169)..(169): Selenocysteine
  MOD_RES (206)..(206): Selenocysteine
  MOD_RES (208)..(208): Selenocysteine
  MOD_RES (238)..(238): Selenocysteine
  MOD_RES (293)..(293): Selenocysteine
  MOD_RES (312)..(312): Selenocysteine
  MOD_RES (324)..(324): Selenocysteine
  MOD_RES (337)..(337): Selenocysteine
  MOD_RES (342)..(342): Selenocysteine
  MOD_RES (360)..(360): Selenocysteine
  MOD_RES (383)..(383): Selenocysteine
  MOD_RES (407)..(407): Selenocysteine
  MOD_RES (424)..(425): Selenocysteine
  MOD_RES (463)..(463): Selenocysteine
  MOD_RES (470)..(470): Selenocysteine
  MOD_RES (534)..(534): Selenocysteine
  MOD_RES (577)..(577): Selenocysteine
  MOD_RES (612)..(612): Selenocysteine
  MOD_RES (626)..(626): Selenocysteine
  MOD_RES (694)..(694): Selenocysteine
MPLPGGLWWLLCCRRGFXLLHRDYGDGELSGDGDEDEDEEXFELRXPSPAGGGRGPLEVXLXQPVRSGPVSNRLQSWEEXWSLIPEKGLPEDDPDIVVKGWLYREPRGGGARPWLPPRRAWFVLXRDSLDQFSSSGKGARRLGSLVLXSLCSVXGPERRRKEXGLWSVXVSGRKHSVRLCSPRQAEAERWGVALREVIASKAPLEXPXQLLLRDIQESCGDPEAVALIYLRNPILRHXSGALYAPLLPLPYGVSAPGPGYAPLREEAVRLFLALQALEGARRPGPLMQGVLQXCRDLPALRDELFLQLAKQXSGPAGPPGLPAXQDPAALRYWQLLXCMSCXFRPGGAVRGHLLGHLERXEQALPDSELAEYARFIRKALGRXRGRELVPSLAEISALSQRQELLCXVHCPGAGACAVAIDSHXXAGEVARELVGRLGLARSRNAFALYEQRGAQERALAGGXLVADVLXRFENLAAEEAGLEDSPDSGWRLCLRLHGPLHPEGLSPDGHELPFLFEQAHALLLRGRPPPPDDXLRALAALRLQSLQRDFSPRVPLPRLDRLLPPPAPPREDPPRPXPRPPPSAALLAGALWSPGLAKRRAERARRGGAGRXAGSIAREGGGGAGXAAAVLGGWKRLRGMGRAEAMAAYLALAAQCPGFGAARSLVGVLHRSCAWAWEPRPCPSPGQGRRSPSXVSAMAMWPPAS

SEQ ID NO: 20571 - protein, 790 aa, Homo sapiens
  MOD_RES (18)..(18): Selenocysteine
  MOD_RES (41)..(41): Selenocysteine
  MOD_RES (46)..(46): Selenocysteine
  MOD_RES (60)..(60): Selenocysteine
  MOD_RES (62)..(62): Selenocysteine
  MOD_RES (80)..(80): Selenocysteine
  MOD_RES (125)..(125): Selenocysteine
  MOD_RES (148)..(148): Selenocysteine
  MOD_RES (154)..(154): Selenocysteine
  MOD_RES (163)..(163): Selenocysteine
  MOD_RES (169)..(169): Selenocysteine
  MOD_RES (206)..(206): Selenocysteine
  MOD_RES (208)..(208): Selenocysteine
  MOD_RES (238)..(238): Selenocysteine
  MOD_RES (293)..(293): Selenocysteine
  MOD_RES (312)..(312): Selenocysteine
  MOD_RES (324)..(324): Selenocysteine
  MOD_RES (337)..(337): Selenocysteine
  MOD_RES (342)..(342): Selenocysteine
  MOD_RES (360)..(360): Selenocysteine
  MOD_RES (383)..(383): Selenocysteine
  MOD_RES (407)..(407): Selenocysteine
  MOD_RES (424)..(425): Selenocysteine
  MOD_RES (463)..(463): Selenocysteine
  MOD_RES (470)..(470): Selenocysteine
  MOD_RES (531)..(531): Selenocysteine
  MOD_RES (574)..(574): Selenocysteine
  MOD_RES (609)..(609): Selenocysteine
  MOD_RES (623)..(623): Selenocysteine
  MOD_RES (668)..(668): Selenocysteine
  MOD_RES (695)..(695): Selenocysteine
  MOD_RES (716)..(716): Selenocysteine
  MOD_RES (766)..(766): Selenocysteine
MPLPGGLWWLLCCRRGFXLLHRDYGDGELSGDGDEDEDEEXFELRXPSPAGGGRGPLEVXLXQPVRSGPVSNRLQSWEEXWSLIPEKGLPEDDPDIVVKGWLYREPRGGGARPWLPPRRAWFVLXRDSLDQFSSSGKGARRLGSLVLXSLCSVXGPERRRKEXGLWSVXVSGRKHSVRLCSPRQAEAERWGVALREVIASKAPLEXPXQLLLRDIQESCGDPEAVALIYLRNPILRHXSGALYAPLLPLPYGVSAPGPGYAPLREEAVRLFLALQALEGARRPGPLMQGVLQXCRDLPALRDELFLQLAKQXSGPAGPPGLPAXQDPAALRYWQLLXCMSCXFRPGGAVRGHLLGHLERXEQALPDSELAEYARFIRKALGRXRGRELVPSLAEISALSQRQELLCXVHCPGAGACAVAIDSHXXAGEVARELVGRLGLARSRNAFALYEQRGAQERALAGGXLVADVLXSLAAEEAGLEDSPDSGWRLCLRLHGPLHPEGLSPDGHELPFLFEQAHALLLRGRPPPPDDXLRALAALRLQSLQRDFSPRVPLPRLDRLLPPPAPPREDPPRPXPRPPPSAALLAGALWSPGLAKRRAERARRGGAGRXAGSIAREGGGGAGXAAAVLGGWKRLRGMGRAEAMAAYLALAAQCPGFGAARYDVLELSXEPGRGAPQKLCLGLGAKAMSLSRPGEXEPIHSVSYGHVAACQLMGPHXLALRVGESQLLLQSPQVEEIMQLVNAYLANPSPERPCSSSSPPCQDLPDXSPPSQRPGLDEPQGQSGCLGQLQD

SEQ ID NO: 20572 - protein, 793 aa, Homo sapiens
  MOD_RES (18)..(18): Selenocysteine
  MOD_RES (41)..(41): Selenocysteine
  MOD_RES (46)..(46): Selenocysteine
  MOD_RES (60)..(60): Selenocysteine
  MOD_RES (62)..(62): Selenocysteine
  MOD_RES (80)..(80): Selenocysteine
  MOD_RES (125)..(125): Selenocysteine
  MOD_RES (148)..(148): Selenocysteine
  MOD_RES (154)..(154): Selenocysteine
  MOD_RES (163)..(163): Selenocysteine
  MOD_RES (169)..(169): Selenocysteine
  MOD_RES (206)..(206): Selenocysteine
  MOD_RES (208)..(208): Selenocysteine
  MOD_RES (238)..(238): Selenocysteine
  MOD_RES (293)..(293): Selenocysteine
  MOD_RES (312)..(312): Selenocysteine
  MOD_RES (324)..(324): Selenocysteine
  MOD_RES (337)..(337): Selenocysteine
  MOD_RES (342)..(342): Selenocysteine
  MOD_RES (360)..(360): Selenocysteine
  MOD_RES (383)..(383): Selenocysteine
  MOD_RES (407)..(407): Selenocysteine
  MOD_RES (424)..(425): Selenocysteine
  MOD_RES (463)..(463): Selenocysteine
  MOD_RES (470)..(470): Selenocysteine
  MOD_RES (534)..(534): Selenocysteine
  MOD_RES (577)..(577): Selenocysteine
  MOD_RES (612)..(612): Selenocysteine
  MOD_RES (626)..(626): Selenocysteine
  MOD_RES (671)..(671): Selenocysteine
  MOD_RES (698)..(698): Selenocysteine
  MOD_RES (719)..(719): Selenocysteine
  MOD_RES (769)..(769): Selenocysteine
MPLPGGLWWLLCCRRGFXLLHRDYGDGELSGDGDEDEDEEXFELRXPSPAGGGRGPLEVXLXQPVRSGPVSNRLQSWEEXWSLIPEKGLPEDDPDIVVKGWLYREPRGGGARPWLPPRRAWFVLXRDSLDQFSSSGKGARRLGSLVLXSLCSVXGPERRRKEXGLWSVXVSGRKHSVRLCSPRQAEAERWGVALREVIASKAPLEXPXQLLLRDIQESCGDPEAVALIYLRNPILRHXSGALYAPLLPLPYGVSAPGPGYAPLREEAVRLFLALQALEGARRPGPLMQGVLQXCRDLPALRDELFLQLAKQXSGPAGPPGLPAXQDPAALRYWQLLXCMSCXFRPGGAVRGHLLGHLERXEQALPDSELAEYARFIRKALGRXRGRELVPSLAEISALSQRQELLCXVHCPGAGACAVAIDSHXXAGEVARELVGRLGLARSRNAFALYEQRGAQERALAGGXLVADVLXRFENLAAEEAGLEDSPDSGWRLCLRLHGPLHPEGLSPDGHELPFLFEQAHALLLRGRPPPPDDXLRALAALRLQSLQRDFSPRVPLPRLDRLLPPPAPPREDPPRPXPRPPPSAALLAGALWSPGLAKRRAERARRGGAGRXAGSIAREGGGGAGXAAAVLGGWKRLRGMGRAEAMAAYLALAAQCPGFGAARYDVLELSXEPGRGAPQKLCLGLGAKAMSLSRPGEXEPIHSVSYGHVAACQLMGPHXLALRVGESQLLLQSPQVEEIMQLVNAYLANPSPERPCSSSSPPCQDLPDXSPPSQRPGLDEPQGQSGCLGQLQD

SEQ ID NO: 20573 - protein, 45 aa, Homo sapiens
LCRSGALKELSKRLNHRNYLLESPHRFSVADLQQVRVSCFPRPDL

SEQ ID NO: 20574 - protein, 140 aa, Homo sapiens
  MOD_RES (22)..(22): Selenocysteine
  MOD_RES (42)..(42): Selenocysteine
  MOD_RES (59)..(59): Selenocysteine
  MOD_RES (61)..(61): Selenocysteine
  MOD_RES (79)..(79): Selenocysteine
  MOD_RES (118)..(118): Selenocysteine
  MOD_RES (126)..(126): Selenocysteine
MECYLKLLLQEQARLHEYYQPXALLRDAEEGEFLLSFLQGLXSLSFELSYKSAILNEWXLXPLALSGLCPLSELDPLSXSGAELQRKESLDSISHSSGSEDIEVHHSGHKIRRNQKLXASSLSLDXASSSQLSCSLNSDS

SEQ ID NO: 20575 - protein, 63 aa, Homo sapiens
  MOD_RES (17)..(17): Selenocysteine
MLSVVENGLDPQAAIPXHHLRVGAPDVCQHGCGPLPGMAAAGPERWPDGVLPEAAAAGAGPLA

SEQ ID NO: 20576 - protein, 152 aa, Homo sapiens
  MOD_RES (42)..(42): Selenocysteine
  MOD_RES (46)..(46): Selenocysteine
  MOD_RES (85)..(85): Selenocysteine
  MOD_RES (105)..(105): Selenocysteine
  MOD_RES (122)..(122): Selenocysteine
  MOD_RES (124)..(124): Selenocysteine
  MOD_RES (142)..(142): Selenocysteine
MLSVVENGLDPQAAIPVIKKKLVGSVKALQKQHIISELEHLXFVNXDVGRCRAWLRLALNDGLMECYLKLLLQEQARLHEYYQPXALLRDAEEGEFLLSFLQGLXSLSFELSYKSAILNEWXLXPLALSGLCPLSELDPLSXSGAELQRKES

SEQ ID NO: 20577 - protein, 99 aa, Homo sapiens
  MOD_RES (38)..(38): Selenocysteine
  MOD_RES (41)..(41): Selenocysteine
  MOD_RES (49)..(49): Selenocysteine
  MOD_RES (97)..(97): Selenocysteine
MLSVVENGLDPQAAIPVIKKKLVGSVKALQKQYVSLDXVVXSEDGDANXMCSALEAVFIHGLHAKHIRAEAGGKRKKSAHQKPLPQPVFWPLLKAVXHK

SEQ ID NO: 20578 - protein, 335 aa, Homo sapiens
  MOD_RES (38)..(38): Selenocysteine
  MOD_RES (41)..(41): Selenocysteine
  MOD_RES (49)..(49): Selenocysteine
  MOD_RES (97)..(97): Selenocysteine
  MOD_RES (109)..(109): Selenocysteine
  MOD_RES (113)..(113): Selenocysteine
  MOD_RES (152)..(152): Selenocysteine
  MOD_RES (172)..(172): Selenocysteine
  MOD_RES (189)..(189): Selenocysteine
  MOD_RES (191)..(191): Selenocysteine
  MOD_RES (209)..(209): Selenocysteine
  MOD_RES (248)..(248): Selenocysteine
  MOD_RES (256)..(256): Selenocysteine
  MOD_RES (296)..(296): Selenocysteine
  MOD_RES (310)..(310): Selenocysteine
  MOD_RES (318)..(318): Selenocysteine
  MOD_RES (320)..(320): Selenocysteine
  MOD_RES (333)..(334): Selenocysteine
MLSVVENGLDPQAAIPVIKKKLVGSVKALQKQYVSLDXVVXSEDGDANXMCSALEAVFIHGLHAKHIRAEAGGKRKKSAHQKPLPQPVFWPLLKAVXHKHIISELEHLXFVNXDVGRCRAWLRLALNDGLMECYLKLLLQEQARLHEYYQPXALLRDAEEGEFLLSFLQGLXSLSFELSYKSAILNEWXLXPLALSGLCPLSELDPLSXSGAELQRKESLDSISHSSGSEDIEVHHSGHKIRRNQKLXASSLSLDXASSSQLSCSLNSDSCLLQENGSKSPDHCEEPMSCDSDLGXANAEDSDRSLQEKXRAGSQRMXSXGLPGSNPWRVLQXXQ

SEQ ID NO: 20579 - protein, 1056 aa, Homo sapiens
  MOD_RES (38)..(38): Selenocysteine
  MOD_RES (41)..(41): Selenocysteine
  MOD_RES (49)..(49): Selenocysteine
  MOD_RES (97)..(97): Selenocysteine
  MOD_RES (109)..(109): Selenocysteine
  MOD_RES (113)..(113): Selenocysteine
  MOD_RES (152)..(152): Selenocysteine
  MOD_RES (172)..(172): Selenocysteine
  MOD_RES (189)..(189): Selenocysteine
  MOD_RES (191)..(191): Selenocysteine
  MOD_RES (209)..(209): Selenocysteine
  MOD_RES (248)..(248): Selenocysteine
  MOD_RES (256)..(256): Selenocysteine
  MOD_RES (296)..(296): Selenocysteine
  MOD_RES (323)..(323): Selenocysteine
  MOD_RES (330)..(330): Selenocysteine
  MOD_RES (334)..(334): Selenocysteine
  MOD_RES (346)..(346): Selenocysteine
  MOD_RES (348)..(348): Selenocysteine
  MOD_RES (367)..(367): Selenocysteine
  MOD_RES (393)..(393): Selenocysteine
  MOD_RES (401)..(401): Selenocysteine
  MOD_RES (405)..(405): Selenocysteine
  MOD_RES (434)..(434): Selenocysteine
  MOD_RES (470)..(470): Selenocysteine
  MOD_RES (540)..(540): Selenocysteine
  MOD_RES (572)..(572): Selenocysteine
  MOD_RES (670)..(670): Selenocysteine
  MOD_RES (697)..(697): Selenocysteine
  MOD_RES (730)..(730): Selenocysteine
  MOD_RES (738)..(738): Selenocysteine
  MOD_RES (750)..(750): Selenocysteine
  MOD_RES (782)..(782): Selenocysteine
  MOD_RES (788)..(788): Selenocysteine
  MOD_RES (805)..(805): Selenocysteine
  MOD_RES (878)..(878): Selenocysteine
  MOD_RES (891)..(891): Selenocysteine
  MOD_RES (995)..(995): Selenocysteine
  MOD_RES (1017)..(1018): Selenocysteine
  MOD_RES (1026)..(1026): Selenocysteine
MLSVVENGLDPQAAIPVIKKKLVGSVKALQKQYVSLDXVVXSEDGDANXMCSALEAVFIHGLHAKHIRAEAGGKRKKSAHQKPLPQPVFWPLLKAVXHKHIISELEHLXFVNXDVGRCRAWLRLALNDGLMECYLKLLLQEQARLHEYYQPXALLRDAEEGEFLLSFLQGLXSLSFELSYKSAILNEWXLXPLALSGLCPLSELDPLSXSGAELQRKESLDSISHSSGSEDIEVHHSGHKIRRNQKLXASSLSLDXASSSQLSCSLNSDSCLLQENGSKSPDHCEEPMSCDSDLGXANAEDSDRSLQEVLLEFSKAQVNSVPXNGLSQEXEIPXPQASLSLHGLNXSXYLHCEAPAEPLPAQAASGXQDGVHVQEPRPQAPSPLDLQQPVESXSGQQPSSXVSEXAREVGQGNGLQKAQAHDGAGLKLVVSSPXSPKNKSWISEDDFYRPSREQPLESASDHPIASYRGXPGSRPGLHRHFSQEPRKNCSLGALDQACVPSPGRRQAQAAPSQGHKSFRVVHRRQMGLSNPFRGLMKLGXVERRGAMGIWKELFCELSPLEFRLYLSNEEHXCVENCSLLRCESVGPAHSDGRFELVFSGKKLALRASSQDEAEDWLDRVREALQKVRPQQEDEWVNVQYPDQPEEPPEAPQGCLSPSDLLSEPAALQGXQFDWSSAQVPEPDAIKESLLYLYMDRXWMPYIFSLSLEALKCFRIRNNEKMLSDSHGVEXIRDILPDXSLGGPSFFKIIXAKAVLKLQAGNAEEAALWRDLVRKVLASYLEXAEEAVXLGGSLDENCQEVLKFAXRENGFLLQYLVAIPMEKGLDSQGCFCAGCSRQIGFSFVRPKLCAFSGLYYCDICHQDDASVIPARIIHNWDLXKRPICRQALKFLXQIRAQPLINLQMVNASLYEHVERMHLIGRRREQLKLLGDYLGLCRSGALKELSKRLNHRNYLLESPHRFSVADLQQIADGVYEGFLKALIEFASQHVYHCDLCXQRGFICQICQHHDIIFPFEFDXXVRCAECKXVFHQSCQAVVKKGCPRCARRRKYQEQNIFA

SEQ ID NO: 20580 - protein, 113 aa, Homo sapiens
  MOD_RES (1)..(1): Any amino acid
  MOD_RES (52)..(52): Selenocysteine
  MOD_RES (74)..(75): Selenocysteine
  MOD_RES (83)..(83): Selenocysteine
XKLLGDYLGLCRSGALKELSKRLNHRNYLLESPHRFSVADLQQHVYHCDLCXQRGFICQICQHHDIIFPFEFDXXVRCAECKXVFHQSCQAVVKKGCPRCARRRKYQEQNIFA

SEQ ID NO: 20581 - protein, 463 aa, Homo sapiens
  MOD_RES (35)..(35): Selenocysteine
  MOD_RES (37)..(37): Selenocysteine
  MOD_RES (68)..(69): Selenocysteine
  MOD_RES (88)..(88): Selenocysteine
  MOD_RES (113)..(113): Selenocysteine
  MOD_RES (116)..(116): Selenocysteine
  MOD_RES (127)..(127): Selenocysteine
  MOD_RES (169)..(169): Selenocysteine
  MOD_RES (230)..(230): Selenocysteine
  MOD_RES (237)..(237): Selenocysteine
  MOD_RES (249)..(249): Selenocysteine
  MOD_RES (251)..(251): Selenocysteine
  MOD_RES (283)..(283): Selenocysteine
  MOD_RES (291)..(291): Selenocysteine
  MOD_RES (297)..(297): Selenocysteine
  MOD_RES (328)..(328): Selenocysteine
  MOD_RES (448)..(448): Selenocysteine
  MOD_RES (456)..(456): Selenocysteine
MSEEEAAQIPRSSVWEQDQQNVVQRVVALPLVRAXCXAVCDVYSAAKDRHPLLGSACRLAENCVCGLXXRALDHAQPLLEHLQPQLAXMNSLACRGLDKLEEKLPFLQQPSEXVVXSAKDVVASSVXGVVDLARRGRRWSVELKRSVSHAVDVVLEKSEELVDHFLPMXEEELAALAAEAEGPEVGSVEDQRRQQGYFVRLGSLSARIRHLAYEHSVGKLRQSKHRAQDXLAQLQEXLELIDHMQCGVXPXAPACPGKVHELWGEWGQRPPESRRRSQAELEXLVLSRSLXQELQGXVEALESSVRGLPAGAQEKVAEVRRSVDALQXAFADARCFRDVPAAALAEGRGRVAHAHACVDELLELVVQAVPLPWLVGPFAPILVERPEPLPDLADLVDEVIGGPDPRWAHLDWPAQQRAWEAEHRDGSGNGDGDRMGVAGDICEQEPEXPSCPVKHXLMPELDF

SEQ ID NO: 20582 - protein, 58 aa, Homo sapiens
  MOD_RES (37)..(37): Selenocysteine
  MOD_RES (51)..(51): Selenocysteine
  MOD_RES (58)..(58): Selenocysteine
MSEEEAAQIPRSSVWEQDQQVRAAPPMEQGQKVLCGXVPSRSVSGQVSRPXPLLAGKX

SEQ ID NO: 20583 - protein, 685 aa, Homo sapiens
  MOD_RES (6)..(6): Selenocysteine
  MOD_RES (8)..(8): Selenocysteine
  MOD_RES (15)..(15): Selenocysteine
  MOD_RES (77)..(78): Selenocysteine
  MOD_RES (100)..(100): Selenocysteine
  MOD_RES (103)..(103): Selenocysteine
  MOD_RES (178)..(178): Selenocysteine
  MOD_RES (239)..(239): Selenocysteine
  MOD_RES (243)..(243): Selenocysteine
  MOD_RES (272)..(272): Selenocysteine
  MOD_RES (282)..(283): Selenocysteine
  MOD_RES (288)..(288): Selenocysteine
  MOD_RES (298)..(298): Selenocysteine
  MOD_RES (339)..(339): Selenocysteine
  MOD_RES (350)..(350): Selenocysteine
  MOD_RES (384)..(384): Selenocysteine
  MOD_RES (405)..(405): Selenocysteine
  MOD_RES (408)..(408): Selenocysteine
  MOD_RES (416)..(416): Selenocysteine
  MOD_RES (424)..(426): Selenocysteine
  MOD_RES (432)..(432): Selenocysteine
  MOD_RES (452)..(452): Selenocysteine
  MOD_RES (467)..(467): Selenocysteine
  MOD_RES (474)..(474): Selenocysteine
  MOD_RES (499)..(499): Selenocysteine
  MOD_RES (505)..(505): Selenocysteine
  MOD_RES (524)..(524): Selenocysteine
  MOD_RES (543)..(543): Selenocysteine
  MOD_RES (559)..(559): Selenocysteine
  MOD_RES (570)..(570): Selenocysteine
  MOD_RES (593)..(593): Selenocysteine
  MOD_RES (620)..(620): Selenocysteine
  MOD_RES (630)..(630): Selenocysteine
  MOD_RES (644)..(644): Selenocysteine
  MOD_RES (653)..(654): Selenocysteine
  MOD_RES (658)..(659): Selenocysteine
MELLRXIXYQPAASXKMCEQALGKGCGADSKKKRPPQPPEESQPPQSQAQVPPAAPHHHHHHSHSGPEISRIIVDPXXGKRYCRGKVLGKGGFAKCYEMXDLXNNKVYAAKIIPHSRVAKPHQREKIDKEIELHRILHHKHVVQFYHYFEDKENIYILLEYCSRRSMAHILKARKVLXEPEVRYYLRQIVSGLKYLHEQEILHRDLKLGNFFINEAMELKVGDFGLAARLEPLEHRRRXICGXPNYLSPEVLNKQGHGCESDIWALGCVMYXMLLGRPPFEXXNLKEXYRCIREARYXMPSSLLAPAKHLIASMLSKNPEDRPSLDDIIRHDFFLQGFXPDRLSSSCCHXVPDFHLSSPAKNFFKKAAAALFGGKKDKARYIDXHNRVSKEDEDIYKLRHDLKKXSIXQQPSKHRXDEELQPPXXXVARSGXPAVENKQQIGDAIRMIVRGXLGSCSSSSECLEDSXMGSVADXVARVLRGCLENMPEADCIPKEQLSXSFQWVXKWVDYSNKYGFGYQLSDHXVGVLFNNGAHMSLLPDKKXVHYYAELGQCSVFPAXDAPEQFISQVXVLKYFSHYMEENLMDGGDLPSVXDIRRPRLYLLQWLKSDKALMMLFNDGXFQVNFYHDHXKIIICSQNEEYLLXYINEDRISXXFRLXXLLMSGCSSELKNRMEYALNMLLQRCN

SEQ ID NO: 20584 - protein, 671 aa, Homo sapiens
  MOD_RES (6)..(6): Selenocysteine
  MOD_RES (8)..(8): Selenocysteine
  MOD_RES (15)..(15): Selenocysteine
  MOD_RES (63)..(64): Selenocysteine
  MOD_RES (86)..(86): Selenocysteine
  MOD_RES (89)..(89): Selenocysteine
  MOD_RES (164)..(164): Selenocysteine
  MOD_RES (225)..(225): Selenocysteine
  MOD_RES (229)..(229): Selenocysteine
  MOD_RES (258)..(258): Selenocysteine
  MOD_RES (268)..(269): Selenocysteine
  MOD_RES (274)..(274): Selenocysteine
  MOD_RES (284)..(284): Selenocysteine
  MOD_RES (325)..(325): Selenocysteine
  MOD_RES (336)..(336): Selenocysteine
  MOD_RES (370)..(370): Selenocysteine
  MOD_RES (391)..(391): Selenocysteine
  MOD_RES (394)..(394): Selenocysteine
  MOD_RES (402)..(402): Selenocysteine
  MOD_RES (410)..(412): Selenocysteine
  MOD_RES (418)..(418): Selenocysteine
  MOD_RES (438)..(438): Selenocysteine
  MOD_RES (453)..(453): Selenocysteine
  MOD_RES (460)..(460): Selenocysteine
  MOD_RES (485)..(485): Selenocysteine
  MOD_RES (491)..(491): Selenocysteine
  MOD_RES (510)..(510): Selenocysteine
  MOD_RES (529)..(529): Selenocysteine
  MOD_RES (545)..(545): Selenocysteine
  MOD_RES (556)..(556): Selenocysteine
  MOD_RES (579)..(579): Selenocysteine
  MOD_RES (606)..(606): Selenocysteine
  MOD_RES (616)..(616): Selenocysteine
  MOD_RES (630)..(630): Selenocysteine
  MOD_RES (639)..(640): Selenocysteine
  MOD_RES (644)..(645): Selenocysteine
MELLRXIXYQPAASXKMCEQALGKGCGADSKKKRPPQPPEESQPPQSQAQVPPAISRIIVDPXXGKRYCRGKVLGKGGFAKCYEMXDLXNNKVYAAKIIPHSRVAKPHQREKIDKEIELHRILHHKHVVQFYHYFEDKENIYILLEYCSRRSMAHILKARKVLXEPEVRYYLRQIVSGLKYLHEQEILHRDLKLGNFFINEAMELKVGDFGLAARLEPLEHRRRXICGXPNYLSPEVLNKQGHGCESDIWALGCVMYXMLLGRPPFEXXNLKEXYRCIREARYXMPSSLLAPAKHLIASMLSKNPEDRPSLDDIIRHDFFLQGFXPDRLSSSCCHXVPDFHLSSPAKNFFKKAAAALFGGKKDKARYIDXHNRVSKEDEDIYKLRHDLKKXSIXQQPSKHRXDEELQPPXXXVARSGXPAVENKQQIGDAIRMIVRGXLGSCSSSSECLEDSXMGSVADXVARVLRGCLENMPEADCIPKEQLSXSFQWVXKWVDYSNKYGFGYQLSDHXVGVLFNNGAHMSLLPDKKXVHYYAELGQCSVFPAXDAPEQFISQVXVLKYFSHYMEENLMDGGDLPSVXDIRRPRLYLLQWLKSDKALMMLFNDGXFQVNFYHDHXKIIICSQNEEYLLXYINEDRISXXFRLXXLLMSGCSSELKNRMEYALNMLLQRCN

SEQ ID NO: 20585 - protein, 646 aa, Homo sapiens
  MOD_RES (46)..(46): Selenocysteine
  MOD_RES (54)..(54): Selenocysteine
  MOD_RES (61)..(61): Selenocysteine
  MOD_RES (80)..(80): Selenocysteine
  MOD_RES (82)..(82): Selenocysteine
  MOD_RES (84)..(84): Selenocysteine
  MOD_RES (156)..(156): Selenocysteine
  MOD_RES (194)..(194): Selenocysteine
  MOD_RES (219)..(219): Selenocysteine
  MOD_RES (223)..(223): Selenocysteine
  MOD_RES (252)..(252): Selenocysteine
  MOD_RES (262)..(262): Selenocysteine
  MOD_RES (268)..(268): Selenocysteine
  MOD_RES (278)..(278): Selenocysteine
  MOD_RES (315)..(315): Selenocysteine
  MOD_RES (319)..(319): Selenocysteine
  MOD_RES (330)..(330): Selenocysteine
  MOD_RES (335)..(335): Selenocysteine
  MOD_RES (348)..(348): Selenocysteine
  MOD_RES (378)..(378): Selenocysteine
  MOD_RES (403)..(403): Selenocysteine
  MOD_RES (413)..(413): Selenocysteine
  MOD_RES (426)..(426): Selenocysteine
  MOD_RES (429)..(429): Selenocysteine
  MOD_RES (493)..(493): Selenocysteine
  MOD_RES (503)..(503): Selenocysteine
  MOD_RES (509)..(509): Selenocysteine
  MOD_RES (511)..(511): Selenocysteine
  MOD_RES (569)..(569): Selenocysteine
  MOD_RES (581)..(581): Selenocysteine
  MOD_RES (591)..(591): Selenocysteine
  MOD_RES (604)..(604): Selenocysteine
  MOD_RES (614)..(614): Selenocysteine
MEPAAGFLSPRPFQRAAAAPAPPAGPGPPPSALRGPELEMLAGLPXSDPGRLIXDPRSGRXYLKGRLLGKGGFARCYEAXDXEXGSAYAVKVIPQSRVAKPHQREKILNEIELHRDLQHRHIVRFSHHFEDADNIYIFLELCSRKSLAHIWKARHXLLEPEVRYYLRQILSGLKYLHQRGILHRDLKLGNFFIXENMELKVGDFGLAARLEPPEQRKKXICGXPNYVAPEVLLRQGHGPEADVWSLGCVMYXLLCGSPPFEXADLKEXYRCIKQVHYXLPASLSLPARQLLAAILRASPRDRPSIDQILRHDFFXKGYXPDRLPISSCVXVPDLXPPNPARSLFAKVXKSLFGRKKKSKNHAQERDEVSGLVSGLMRXSVGHQDARPEAPAASGPAPVSLVEXAPEDSSPRGXLASSGDGFEEGLXVAXVVESALCALRNCIAFMPPAEQNPAPLAQPEPLVWVSKWVDYSNKFGFGYQLSSRRVAVLFNDGXHMALSANRKXVHYNPXSXKHFSFSVGAVPRALQPQLGILRYFASYMEQHLMKGGDLPSVEEVEVPAPPLLLQWVKXDQALLMLFSDGXVQVNFYGDHXKLILSGWEPLLVXFVARNRSACXYLASHLRQLGCSPDLRQRLRYALRLLRDRSPA

SEQ ID NO: 20586 - protein, 52 aa, Homo sapiens
  MOD_RES (8)..(8): Selenocysteine
  MOD_RES (17)..(17): Selenocysteine
MEKVQYLXRSAIRRASXIEMPQQARQKLQNLFINFCLILICLLLICIIVMLL

SEQ ID NO: 20587 - protein, 100 aa, Homo sapiens
  MOD_RES (22)..(22): Selenocysteine
  MOD_RES (41)..(41): Selenocysteine
  MOD_RES (43)..(43): Selenocysteine
  MOD_RES (49)..(49): Selenocysteine
  MOD_RES (75)..(75): Selenocysteine
  MOD_RES (93)..(94): Selenocysteine
MGLLECCARCLVGAPFASLVAXGLCFFGVALFCGCGHEALXGXEKLIEXYFSKNYQDYEYLINVIHAFQYVIYGXASFFFLYGALLLAEGFYXXGAVRQI

SEQ ID NO: 20588 - protein, 112 aa, Homo sapiens
  MOD_RES (22)..(22): Selenocysteine
  MOD_RES (41)..(41): Selenocysteine
  MOD_RES (43)..(43): Selenocysteine
  MOD_RES (49)..(49): Selenocysteine
  MOD_RES (75)..(75): Selenocysteine
  MOD_RES (93)..(94): Selenocysteine
  MOD_RES (106)..(107): Selenocysteine
MGLLECCARCLVGAPFASLVAXGLCFFGVALFCGCGHEALXGXEKLIEXYFSKNYQDYEYLINVIHAFQYVIYGXASFFFLYGALLLAEGFYXXGAVRQIFGDYKXXICGKG

SEQ ID NO: 20589 - protein, 242 aa, Homo sapiens
  MOD_RES (22)..(22): Selenocysteine
  MOD_RES (41)..(41): Selenocysteine
  MOD_RES (43)..(43): Selenocysteine
  MOD_RES (49)..(49): Selenocysteine
  MOD_RES (75)..(75): Selenocysteine
  MOD_RES (93)..(94): Selenocysteine
  MOD_RES (106)..(107): Selenocysteine
  MOD_RES (116)..(116): Selenocysteine
  MOD_RES (121)..(121): Selenocysteine
  MOD_RES (125)..(125): Selenocysteine
  MOD_RES (145)..(145): Selenocysteine
  MOD_RES (147)..(148): Selenocysteine
  MOD_RES (158)..(158): Selenocysteine
  MOD_RES (195)..(195): Selenocysteine
  MOD_RES (201)..(201): Selenocysteine
  MOD_RES (215)..(215): Selenocysteine
  MOD_RES (221)..(221): Selenocysteine
  MOD_RES (227)..(227): Selenocysteine
  MOD_RES (240)..(240): Selenocysteine
MGLLECCARCLVGAPFASLVAXGLCFFGVALFCGCGHEALXGXEKLIEXYFSKNYQDYEYLINVIHAFQYVIYGXASFFFLYGALLLAEGFYXXGAVRQIFGDYKXXICGKGLSAXFVGIXYALXVVWLLVFACSAVPVYIYFNXWXXCQSIAFPSKXSASIGSLCADARMYGVLPWNAFPGKVCGSNLLSICKXAEFQMXFHLFIAAFVGAAAXLVSLLXFMIAAXYNFAVLKLMGRGXKF

SEQ ID NO: 20590 - protein, 123 aa, Homo sapiens
  MOD_RES (22)..(22): Selenocysteine
  MOD_RES (41)..(41): Selenocysteine
  MOD_RES (43)..(43): Selenocysteine
  MOD_RES (49)..(49): Selenocysteine
  MOD_RES (75)..(75): Selenocysteine
  MOD_RES (93)..(94): Selenocysteine
  MOD_RES (106)..(107): Selenocysteine
  MOD_RES (116)..(116): Selenocysteine
  MOD_RES (118)..(118): Selenocysteine
MGLLECCARCLVGAPFASLVAXGLCFFGVALFCGCGHEALXGXEKLIEXYFSKNYQDYEYLINVIHAFQYVIYGXASFFFLYGALLLAEGFYXXGAVRQIFGDYKXXICGKGLSAXVXGGQKG

SEQ ID NO: 20591 - protein, 127 aa, Homo sapiens
  MOD_RES (22)..(22): Selenocysteine
  MOD_RES (41)..(41): Selenocysteine
  MOD_RES (43)..(43): Selenocysteine
  MOD_RES (49)..(49): Selenocysteine
  MOD_RES (75)..(75): Selenocysteine
  MOD_RES (93)..(94): Selenocysteine
  MOD_RES (106)..(107): Selenocysteine
  MOD_RES (116)..(116): Selenocysteine
  MOD_RES (118)..(118): Selenocysteine
MGLLECCARCLVGAPFASLVAXGLCFFGVALFCGCGHEALXGXEKLIEXYFSKNYQDYEYLINVIHAFQYVIYGXASFFFLYGALLLAEGFYXXGAVRQIFGDYKXXICGKGLSAXVXGGQKGRGSR

SEQ ID NO: 20592 - protein, 136 aa, Homo sapiens
  MOD_RES (22)..(22): Selenocysteine
  MOD_RES (41)..(41): Selenocysteine
  MOD_RES (43)..(43): Selenocysteine
  MOD_RES (49)..(49): Selenocysteine
  MOD_RES (75)..(75): Selenocysteine
  MOD_RES (93)..(94): Selenocysteine
  MOD_RES (106)..(107): Selenocysteine
  MOD_RES (116)..(116): Selenocysteine
  MOD_RES (118)..(118): Selenocysteine
MGLLECCARCLVGAPFASLVAXGLCFFGVALFCGCGHEALXGXEKLIEXYFSKNYQDYEYLINVIHAFQYVIYGXASFFFLYGALLLAEGFYXXGAVRQIFGDYKXXICGKGLSAXVXGGQKGRGSRGQHQAHSLE

SEQ ID NO: 20593 - protein, 137 aa, Homo sapiens
  MOD_RES (22)..(22): Selenocysteine
  MOD_RES (41)..(41): Selenocysteine
  MOD_RES (43)..(43): Selenocysteine
  MOD_RES (49)..(49): Selenocysteine
  MOD_RES (75)..(75): Selenocysteine
  MOD_RES (93)..(94): Selenocysteine
  MOD_RES (106)..(107): Selenocysteine
  MOD_RES (116)..(116): Selenocysteine
  MOD_RES (118)..(118): Selenocysteine
MGLLECCARCLVGAPFASLVAXGLCFFGVALFCGCGHEALXGXEKLIEXYFSKNYQDYEYLINVIHAFQYVIYGXASFFFLYGALLLAEGFYXXGAVRQIFGDYKXXICGKGLSAXVXGGQKGRGSRGQHQAHSLER

SEQ ID NO: 20594 - protein, 277 aa, Homo sapiens
  MOD_RES (22)..(22): Selenocysteine
  MOD_RES (41)..(41): Selenocysteine
  MOD_RES (43)..(43): Selenocysteine
  MOD_RES (49)..(49): Selenocysteine
  MOD_RES (75)..(75): Selenocysteine
  MOD_RES (93)..(94): Selenocysteine
  MOD_RES (106)..(107): Selenocysteine
  MOD_RES (116)..(116): Selenocysteine
  MOD_RES (118)..(118): Selenocysteine
  MOD_RES (156)..(156): Selenocysteine
  MOD_RES (160)..(160): Selenocysteine
  MOD_RES (180)..(180): Selenocysteine
  MOD_RES (182)..(183): Selenocysteine
  MOD_RES (193)..(193): Selenocysteine
  MOD_RES (230)..(230): Selenocysteine
  MOD_RES (236)..(236): Selenocysteine
  MOD_RES (250)..(250): Selenocysteine
  MOD_RES (256)..(256): Selenocysteine
  MOD_RES (262)..(262): Selenocysteine
  MOD_RES (275)..(275): Selenocysteine
MGLLECCARCLVGAPFASLVAXGLCFFGVALFCGCGHEALXGXEKLIEXYFSKNYQDYEYLINVIHAFQYVIYGXASFFFLYGALLLAEGFYXXGAVRQIFGDYKXXICGKGLSAXVXGGQKGRGSRGQHQAHSLERVCHCLGKWLGHPDKFVGIXYALXVVWLLVFACSAVPVYIYFNXWXXCQSIAFPSKXSASIGSLCADARMYGVLPWNAFPGKVCGSNLLSICKXAEFQMXFHLFIAAFVGAAAXLVSLLXFMIAAXYNFAVLKLMGRGXKF

SEQ ID NO: 20595 - protein, 145 aa, Homo sapiens
  MOD_RES (17)..(17): Selenocysteine
  MOD_RES (22)..(22): Selenocysteine
  MOD_RES (46)..(46): Selenocysteine
  MOD_RES (73)..(73): Selenocysteine
  MOD_RES (88)..(88): Selenocysteine
  MOD_RES (98)..(98): Selenocysteine
MADSERLSAPGCWAACXNFSRXRKGILLFAEIILCLVILICFSASXPGYSSLSVIEMILAAIFFVVYMCDLHXKIPFINWPWSDFFRXLIAAILYLIXSIVVLVERGNHSKIVAGVKAMGAALKHRAKGLRSQGPFLPLLLAEIV

SEQ ID NO: 20596 - protein, 152 aa, Homo sapiens
  MOD_RES (17)..(17): Selenocysteine
  MOD_RES (22)..(22): Selenocysteine
  MOD_RES (46)..(46): Selenocysteine
  MOD_RES (73)..(73): Selenocysteine
  MOD_RES (88)..(88): Selenocysteine
  MOD_RES (98)..(98): Selenocysteine
  MOD_RES (122)..(122): Selenocysteine
  MOD_RES (132)..(132): Selenocysteine
  MOD_RES (141)..(141): Selenocysteine
  MOD_RES (145)..(145): Selenocysteine
MADSERLSAPGCWAACXNFSRXRKGILLFAEIILCLVILICFSASXPGYSSLSVIEMILAAIFFVVYMCDLHXKIPFINWPWSDFFRXLIAAILYLIXSIVVLVERGNHSKIVAGVLGLIAXCLFGYDAYVXFPVRQPRHXAAPXDPADGPV

SEQ ID NO: 20597 - protein, 284 aa, Homo sapiens
  MOD_RES (5)..(5): Selenocysteine
  MOD_RES (28)..(28): Selenocysteine
  MOD_RES (32)..(32): Selenocysteine
  MOD_RES (53)..(53): Selenocysteine
  MOD_RES (76)..(76): Selenocysteine
  MOD_RES (97)..(97): Selenocysteine
  MOD_RES (104)..(104): Selenocysteine
  MOD_RES (116)..(116): Selenocysteine
  MOD_RES (201)..(201): Selenocysteine
  MOD_RES (230)..(230): Selenocysteine
  MOD_RES (254)..(254): Selenocysteine
  MOD_RES (266)..(267): Selenocysteine
  MOD_RES (271)..(271): Selenocysteine
  MOD_RES (273)..(274): Selenocysteine
MFDKXRLPYVALDVLCVLLAGLPFAILXSRHXPFQRGVFCNDESIKYPYKEDXIPYALLGGIIIPFSIIVIILGEXLSVYCNLLHSNSFIRNNYIAXIYKAIGXFLFGAAASQSLXDIAKYSIGRLRPHFLDVCDPDWSKINCSDGYIEYYICRGNAERVKEGRLSFYSGHSSFSMYCMLFVALYLQARMKGDWARLLRPXLQFGLVAVSIYVGLSRVSDYKHHWSDVLXGLIQGALVAILVAVYVSDFFKERXSFKERKEEDSHXXLHEXPXXGNHYPSNHQP

SEQ ID NO: 20598 - protein, 285 aa, Homo sapiens
  MOD_RES (5)..(5): Selenocysteine
  MOD_RES (54)..(54): Selenocysteine
  MOD_RES (56)..(56): Selenocysteine
  MOD_RES (58)..(58): Selenocysteine
  MOD_RES (77)..(77): Selenocysteine
  MOD_RES (98)..(98): Selenocysteine
  MOD_RES (105)..(105): Selenocysteine
  MOD_RES (117)..(117): Selenocysteine
  MOD_RES (202)..(202): Selenocysteine
  MOD_RES (231)..(231): Selenocysteine
  MOD_RES (255)..(255): Selenocysteine
  MOD_RES (267)..(268): Selenocysteine
  MOD_RES (272)..(272): Selenocysteine
  MOD_RES (274)..(275): Selenocysteine
MFDKXRLPYVALDVLCVLLASMPMAVLKLGQIYPFQRGFFCKDNSINYPYHDSXVXSXVLILVGVGLPISSIILGEXLSVYCNLLHSNSFIRNNYIAXIYKAIGXFLFGAAASQSLXDIAKYSIGRLRPHFLDVCDPDWSKINCSDGYIEYYICRGNAERVKEGRLSFYSGHSSFSMYCMLFVALYLQARMKGDWARLLRPXLQFGLVAVSIYVGLSRVSDYKHHWSDVLXGLIQGALVAILVAVYVSDFFKERXSFKERKEEDSHXXLHEXPXXGNHYPSNHQP

SEQ ID NO: 20599 - protein, 110 aa, Homo sapiens
  MOD_RES (5)..(5): Selenocysteine
  MOD_RES (54)..(54): Selenocysteine
  MOD_RES (56)..(56): Selenocysteine
  MOD_RES (58)..(58): Selenocysteine
  MOD_RES (99)..(99): Selenocysteine
  MOD_RES (101)..(101): Selenocysteine
  MOD_RES (104)..(104): Selenocysteine
MFDKXRLPYVALDVLCVLLASMPMAVLKLGQIYPFQRGFFCKDNSINYPYHDSXVXSXVLILVGVGLPISSLDCLLQFLLQGIPPSNEEYSVMMSPSSXLXKKXPYLMRY

SEQ ID NO: 20600 - protein, 208 aa, Homo sapiens
  MOD_RES (5)..(5): Selenocysteine
  MOD_RES (7)..(7): Selenocysteine
  MOD_RES (9)..(9): Selenocysteine
  MOD_RES (23)..(23): Selenocysteine
  MOD_RES (45)..(45): Selenocysteine
  MOD_RES (57)..(57): Selenocysteine
  MOD_RES (102)..(102): Selenocysteine
  MOD_RES (142)..(142): Selenocysteine
  MOD_RES (157)..(157): Selenocysteine
  MOD_RES (183)..(183): Selenocysteine
MAGVXIXAXVILVSAGEAYLVYXDRLYSRSDFNNYVAAVYKVLGXFLFGAAVSQSLXDLAKYMIGRLRPNFLAVCDPDWSRVNCSVYVQLEKVCRGNPADVXEARLSFYSGHSSFGMYCMVFLALYVQARLCWKWARLLRPXVQFFLVAFALYVGYXRVSDYKHHWSDVLVGLLQGALVAALXVCYISDFFKARPPQHCLKEEELERK

SEQ ID NO: 20601 - protein, 232 aa, Homo sapiens
  MOD_RES (5)..(5): Selenocysteine
  MOD_RES (7)..(7): Selenocysteine
  MOD_RES (9)..(9): Selenocysteine
  MOD_RES (23)..(23): Selenocysteine
  MOD_RES (45)..(45): Selenocysteine
  MOD_RES (57)..(57): Selenocysteine
  MOD_RES (102)..(102): Selenocysteine
  MOD_RES (142)..(142): Selenocysteine
  MOD_RES (157)..(157): Selenocysteine
  MOD_RES (183)..(183): Selenocysteine
  MOD_RES (214)..(214): Selenocysteine
  MOD_RES (216)..(216): Selenocysteine
MAGVXIXAXVILVSAGEAYLVYXDRLYSRSDFNNYVAAVYKVLGXFLFGAAVSQSLXDLAKYMIGRLRPNFLAVCDPDWSRVNCSVYVQLEKVCRGNPADVXEARLSFYSGHSSFGMYCMVFLALYVQARLCWKWARLLRPXVQFFLVAFALYVGYXRVSDYKHHWSDVLVGLLQGALVAALXVCYISDFFKARPPQHCLKEEELERKPSLSLXLXLGEADHNHYGYPHSSS

SEQ ID NO: 20602 - protein, 309 aa, Homo sapiens
  MOD_RES (47)..(47): Selenocysteine
  MOD_RES (72)..(72): Selenocysteine
  MOD_RES (74)..(74): Selenocysteine
  MOD_RES (82)..(82): Selenocysteine
  MOD_RES (84)..(84): Selenocysteine
  MOD_RES (86)..(86): Selenocysteine
  MOD_RES (100)..(100): Selenocysteine
  MOD_RES (122)..(122): Selenocysteine
  MOD_RES (134)..(134): Selenocysteine
  MOD_RES (179)..(179): Selenocysteine
  MOD_RES (219)..(219): Selenocysteine
  MOD_RES (234)..(234): Selenocysteine
  MOD_RES (260)..(260): Selenocysteine
  MOD_RES (291)..(291): Selenocysteine
  MOD_RES (293)..(293): Selenocysteine
MGVARGPGSRGQHPPPRQQEVCAEGPRARLHPAPPGLGASLPFAILXLVNAPYKRGFYCGDDSIRYPYRPDXIXHGLMAGVXIXAXVILVSAGEAYLVYXDRLYSRSDFNNYVAAVYKVLGXFLFGAAVSQSLXDLAKYMIGRLRPNFLAVCDPDWSRVNCSVYVQLEKVCRGNPADVXEARLSFYSGHSSFGMYCMVFLALYVQARLCWKWARLLRPXVQFFLVAFALYVGYXRVSDYKHHWSDVLVGLLQGALVAALXVCYISDFFKARPPQHCLKEEELERKPSLSLXLXLGEADHNHYGYPHSSS

SEQ ID NO: 20603 - protein, 288 aa, Homo sapiens
  MOD_RES (26)..(26): Selenocysteine
  MOD_RES (51)..(51): Selenocysteine
  MOD_RES (53)..(53): Selenocysteine
  MOD_RES (61)..(61): Selenocysteine
  MOD_RES (63)..(63): Selenocysteine
  MOD_RES (65)..(65): Selenocysteine
  MOD_RES (79)..(79): Selenocysteine
  MOD_RES (101)..(101): Selenocysteine
  MOD_RES (113)..(113): Selenocysteine
  MOD_RES (158)..(158): Selenocysteine
  MOD_RES (198)..(198): Selenocysteine
  MOD_RES (213)..(213): Selenocysteine
  MOD_RES (239)..(239): Selenocysteine
  MOD_RES (270)..(270): Selenocysteine
  MOD_RES (272)..(272): Selenocysteine
MQRRWVFVLLDVLCLLVASLPFAILXLVNAPYKRGFYCGDDSIRYPYRPDXIXHGLMAGVXIXAXVILVSAGEAYLVYXDRLYSRSDFNNYVAAVYKVLGXFLFGAAVSQSLXDLAKYMIGRLRPNFLAVCDPDWSRVNCSVYVQLEKVCRGNPADVXEARLSFYSGHSSFGMYCMVFLALYVQARLCWKWARLLRPXVQFFLVAFALYVGYXRVSDYKHHWSDVLVGLLQGALVAALXVCYISDFFKARPPQHCLKEEELERKPSLSLXLXLGEADHNHYGYPHSSS

SEQ ID NO: 20604 - protein, 178 aa, Homo sapiens
  MOD_RES (32)..(32): Selenocysteine
  MOD_RES (57)..(57): Selenocysteine
  MOD_RES (59)..(59): Selenocysteine
  MOD_RES (67)..(67): Selenocysteine
  MOD_RES (69)..(69): Selenocysteine
  MOD_RES (71)..(71): Selenocysteine
  MOD_RES (85)..(85): Selenocysteine
  MOD_RES (107)..(107): Selenocysteine
  MOD_RES (119)..(119): Selenocysteine
  MOD_RES (164)..(164): Selenocysteine
MQRRWVFVLLDVLCLLVGFSSPPASLPFAILXLVNAPYKRGFYCGDDSIRYPYRPDXIXHGLMAGVXIXAXVILVSAGEAYLVYXDRLYSRSDFNNYVAAVYKVLGXFLFGAAVSQSLXDLAKYMIGRLRPNFLAVCDPDWSRVNCSVYVQLEKVCRGNPADVXEARLSFYSGHSSFG

SEQ ID NO: 20605 - protein, 136 aa, Homo sapiens
  MOD_RES (1)..(1): Any amino acid
  MOD_RES (7)..(7): Selenocysteine
  MOD_RES (52)..(52): Selenocysteine
  MOD_RES (92)..(92): Selenocysteine
  MOD_RES (107)..(107): Selenocysteine
  MOD_RES (133)..(133): Selenocysteine
XVSQSLXDLAKYMIGRLRPNFLAVCDPDWSRVNCSVYVQLEKVCRGNPADVXEARLSFYSGHSSFGMYCMVFLALYVQARLCWKWARLLRPXVQFFLVAFALYVGYXRVSDYKHHWSDVLVGLLQGALVAALXVSF

SEQ ID NO: 20606 - protein, 311 aa, Homo sapiens
  MOD_RES (56)..(56): Selenocysteine
  MOD_RES (58)..(58): Selenocysteine
  MOD_RES (79)..(79): Selenocysteine
  MOD_RES (82)..(82): Selenocysteine
  MOD_RES (102)..(102): Selenocysteine
  MOD_RES (117)..(117): Selenocysteine
  MOD_RES (144)..(144): Selenocysteine
  MOD_RES (206)..(206): Selenocysteine
  MOD_RES (219)..(219): Selenocysteine
  MOD_RES (233)..(233): Selenocysteine
  MOD_RES (241)..(241): Selenocysteine
  MOD_RES (280)..(280): Selenocysteine
  MOD_RES (282)..(283): Selenocysteine
MQNYKYDKAIVPESKNGGSPALNNNPRRSGSKRVLLICLDLFCLFMAGLPFLIIEXSXIKPYHRGFYCNDESIKYPLKXGEXINDAVLCAVGIVIAILAIIXGEFYRIYYLKKSRSXIQNPYVAALYKQVGCFLFGCAISQSFXDIAKVSIGRLRPHFLSVCNPDFSQINCSEGYIQNYRCRGDDSKVQEARKSFFSGHASFSMYXMLYLVLYLQARFXWRGARLLRPLLQFXLIMMAFYXGLSRVSDHKHHPSDVLAGFAQGALVACCIVFFVSDLFKXKXXLSLPAPAIRKEILSPVDIIDRNNHHNMM

SEQ ID NO: 20607 - protein, 261 aa, Homo sapiens
  MOD_RES (11)..(11): Selenocysteine
  MOD_RES (41)..(41): Selenocysteine
  MOD_RES (51)..(51): Selenocysteine
  MOD_RES (65)..(65): Selenocysteine
  MOD_RES (68)..(68): Selenocysteine
  MOD_RES (88)..(88): Selenocysteine
  MOD_RES (90)..(90): Selenocysteine
  MOD_RES (119)..(119): Selenocysteine
  MOD_RES (147)..(148): Selenocysteine
  MOD_RES (159)..(159): Selenocysteine
  MOD_RES (222)..(222): Selenocysteine
  MOD_RES (244)..(244): Selenocysteine
  MOD_RES (257)..(257): Selenocysteine
MHGIGPSGSFXEFLDPFQRVIQPEEIWLYKNPLVQSDNIPXRLMFAISFLXPLAVICVVKIIRRXDKXEIKEAFLAVSLALALNGVCXNXIKLIVGRPRPDFFYRCFPDGVMNSEMHCXGDPDLVSEGRKSFPSIHSSFAFSGLGFXXFYLAGKLHCFXESGRGKSWRLCAAILPLYCAMMIALSRMCDYKHHWQDSFVGGVIGLIFAYICYRQHYPPLANXACHKPYVSLRVPASLKKEERPXADSAPSLPLEGIXEGPV

SEQ ID NO: 20608 - protein, 267 aa, Homo sapiens
  MOD_RES (21)..(21): Selenocysteine
  MOD_RES (51)..(51): Selenocysteine
  MOD_RES (61)..(61): Selenocysteine
  MOD_RES (75)..(75): Selenocysteine
  MOD_RES (78)..(78): Selenocysteine
  MOD_RES (98)..(98): Selenocysteine
  MOD_RES (100)..(100): Selenocysteine
  MOD_RES (129)..(129): Selenocysteine
  MOD_RES (157)..(158): Selenocysteine
  MOD_RES (169)..(169): Selenocysteine
  MOD_RES (232)..(232): Selenocysteine
  MOD_RES (254)..(254): Selenocysteine
  MOD_RES (267)..(267): Selenocysteine
MRELAIEIGVRALLFGVFVFXEFLDPFQRVIQPEEIWLYKNPLVQSDNIPXRLMFAISFLXPLAVICVVKIIRRXDKXEIKEAFLAVSLALALNGVCXNXIKLIVGRPRPDFFYRCFPDGVMNSEMHCXGDPDLVSEGRKSFPSIHSSFAFSGLGFXXFYLAGKLHCFXESGRGKSWRLCAAILPLYCAMMIALSRMCDYKHHWQDSFVGGVIGLIFAYICYRQHYPPLANXACHKPYVSLRVPASLKKEERPXADSAPSLPLEGIX

SEQ ID NO: 20609 - protein, 271 aa, Homo sapiens
  MOD_RES (21)..(21): Selenocysteine
  MOD_RES (51)..(51): Selenocysteine
  MOD_RES (61)..(61): Selenocysteine
  MOD_RES (75)..(75): Selenocysteine
  MOD_RES (78)..(78): Selenocysteine
  MOD_RES (98)..(98): Selenocysteine
  MOD_RES (100)..(100): Selenocysteine
  MOD_RES (129)..(129): Selenocysteine
  MOD_RES (157)..(158): Selenocysteine
  MOD_RES (169)..(169): Selenocysteine
  MOD_RES (232)..(232): Selenocysteine
  MOD_RES (254)..(254): Selenocysteine
  MOD_RES (267)..(267): Selenocysteine
MRELAIEIGVRALLFGVFVFXEFLDPFQRVIQPEEIWLYKNPLVQSDNIPXRLMFAISFLXPLAVICVVKIIRRXDKXEIKEAFLAVSLALALNGVCXNXIKLIVGRPRPDFFYRCFPDGVMNSEMHCXGDPDLVSEGRKSFPSIHSSFAFSGLGFXXFYLAGKLHCFXESGRGKSWRLCAAILPLYCAMMIALSRMCDYKHHWQDSFVGGVIGLIFAYICYRQHYPPLANXACHKPYVSLRVPASLKKEERPXADSAPSLPLEGIXEGPV

SEQ ID NO: 20610 - protein, 60 aa, Homo sapiens
  MOD_RES (19)..(19): Selenocysteine
  MOD_RES (49)..(49): Selenocysteine
AFGAEVGVRLALFAAFLVXELLPPFQRLIQPEEMWLYRNPYVEAEYFPXKPMFLPALPWL

SEQ ID NO: 20611 - protein, 245 aa, Homo sapiens
  MOD_RES (26)..(26): Selenocysteine
  MOD_RES (56)..(56): Selenocysteine
  MOD_RES (64)..(64): Selenocysteine
  MOD_RES (85)..(85): Selenocysteine
  MOD_RES (87)..(87): Selenocysteine
  MOD_RES (116)..(116): Selenocysteine
  MOD_RES (156)..(156): Selenocysteine
  MOD_RES (184)..(184): Selenocysteine
  MOD_RES (203)..(203): Selenocysteine
  MOD_RES (217)..(217): Selenocysteine
  MOD_RES (233)..(233): Selenocysteine
GKAAAAVAFGAEVGVRLALFAAFLVXELLPPFQRLIQPEEMWLYRNPYVEAEYFPXKPMFKADXRDSRQACLAASLALALNGVFXNXIKLIVGRPRPDFFYRCFPDGLAHSDLMCXGDKDVVNEGRKSFPSGHSSFAFAGLAFASFYLAGKLHCFXPQGRGKSWRFCAFLSPLLFAAVIALSRXCDYKHHWQDVLVGSMIGMXFAYVCYRQYYPPLXDAECHKPFQDKLVLSXAQKPGDSYCFDI

SEQ ID NO: 20612 - protein, 132 aa, Homo sapiens
  MOD_RES (3)..(3): Selenocysteine
  MOD_RES (43)..(43): Selenocysteine
  MOD_RES (71)..(71): Selenocysteine
  MOD_RES (90)..(90): Selenocysteine
  MOD_RES (104)..(104): Selenocysteine
  MOD_RES (120)..(120): Selenocysteine
MCXGDKDVVNEGRKSFPSGHSSFAFAGLAFASFYLAGKLHCFXPQGRGKSWRFCAFLSPLLFAAVIALSRXCDYKHHWQDVLVGSMIGMXFAYVCYRQYYPPLXDAECHKPFQDKLVLSXAQKPGDSYCFDI

SEQ ID NO: 20613 - protein, 176 aa, Homo sapiens
  MOD_RES (27)..(27): Selenocysteine
  MOD_RES (57)..(57): Selenocysteine
  MOD_RES (83)..(83): Selenocysteine
  MOD_RES (104)..(104): Selenocysteine
  MOD_RES (106)..(106): Selenocysteine
  MOD_RES (135)..(135): Selenocysteine
  MOD_RES (161)..(161): Selenocysteine
MGKAAAAVAFGAEVGVRLALFAAFLVXELLPPFQRLIQPEEMWLYRNPYVEAEYFPXKPMFVIAFLSPLSLIFLAKFLKKADXRDSRQACLAASLALALNGVFXNXIKLIVGRPRPDFFYRCFPDGLAHSDLMCXGDKDVVNEGRKSFPSGHSSCMNIIWXLPYACFHIIEFNLES

SEQ ID NO: 20614 - protein, 264 aa, Homo sapiens
  MOD_RES (27)..(27): Selenocysteine
  MOD_RES (57)..(57): Selenocysteine
  MOD_RES (83)..(83): Selenocysteine
  MOD_RES (104)..(104): Selenocysteine
  MOD_RES (106)..(106): Selenocysteine
  MOD_RES (135)..(135): Selenocysteine
  MOD_RES (175)..(175): Selenocysteine
  MOD_RES (203)..(203): Selenocysteine
  MOD_RES (222)..(222): Selenocysteine
  MOD_RES (236)..(236): Selenocysteine
  MOD_RES (252)..(252): Selenocysteine
MGKAAAAVAFGAEVGVRLALFAAFLVXELLPPFQRLIQPEEMWLYRNPYVEAEYFPXKPMFVIAFLSPLSLIFLAKFLKKADXRDSRQACLAASLALALNGVFXNXIKLIVGRPRPDFFYRCFPDGLAHSDLMCXGDKDVVNEGRKSFPSGHSSFAFAGLAFASFYLAGKLHCFXPQGRGKSWRFCAFLSPLLFAAVIALSRXCDYKHHWQDVLVGSMIGMXFAYVCYRQYYPPLXDAECHKPFQDKLVLSXAQKPGDSYCFDI

SEQ ID NO: 20615 - protein, 216 aa, Homo sapiens
  MOD_RES (27)..(27): Selenocysteine
  MOD_RES (57)..(57): Selenocysteine
  MOD_RES (83)..(83): Selenocysteine
  MOD_RES (104)..(104): Selenocysteine
  MOD_RES (106)..(106): Selenocysteine
  MOD_RES (135)..(135): Selenocysteine
  MOD_RES (175)..(175): Selenocysteine
  MOD_RES (203)..(203): Selenocysteine
MGKAAAAVAFGAEVGVRLALFAAFLVXELLPPFQRLIQPEEMWLYRNPYVEAEYFPXKPMFVIAFLSPLSLIFLAKFLKKADXRDSRQACLAASLALALNGVFXNXIKLIVGRPRPDFFYRCFPDGLAHSDLMCXGDKDVVNEGRKSFPSGHSSFAFAGLAFASFYLAGKLHCFXPQGRGKSWRFCAFLSPLLFAAVIALSRXCDYKHHWQGPFKW

SEQ ID NO: 20616 - protein, 223 aa, Homo sapiens
  MOD_RES (16)..(16): Selenocysteine
  MOD_RES (42)..(42): Selenocysteine
  MOD_RES (63)..(63): Selenocysteine
  MOD_RES (65)..(65): Selenocysteine
  MOD_RES (94)..(94): Selenocysteine
  MOD_RES (134)..(134): Selenocysteine
  MOD_RES (162)..(162): Selenocysteine
  MOD_RES (181)..(181): Selenocysteine
  MOD_RES (195)..(195): Selenocysteine
  MOD_RES (211)..(211): Selenocysteine
MWLYRNPYVEAEYFPXKPMFVIAFLSPLSLIFLAKFLKKADXRDSRQACLAASLALALNGVFXNXIKLIVGRPRPDFFYRCFPDGLAHSDLMCXGDKDVVNEGRKSFPSGHSSFAFAGLAFASFYLAGKLHCFXPQGRGKSWRFCAFLSPLLFAAVIALSRXCDYKHHWQDVLVGSMIGMXFAYVCYRQYYPPLXDAECHKPFQDKLVLSXAQKPGDSYCFDI

SEQ ID NO: 20617 - protein, 244 aa, Homo sapiens
  MOD_RES (1)..(1): Any amino acid
  MOD_RES (21)..(21): Selenocysteine
  MOD_RES (51)..(51): Selenocysteine
  MOD_RES (77)..(77): Selenocysteine
  MOD_RES (98)..(98): Selenocysteine
  MOD_RES (100)..(100): Selenocysteine
  MOD_RES (129)..(129): Selenocysteine
  MOD_RES (155)..(155): Selenocysteine
  MOD_RES (183)..(183): Selenocysteine
  MOD_RES (202)..(202): Selenocysteine
  MOD_RES (216)..(216): Selenocysteine
  MOD_RES (232)..(232): Selenocysteine
XVAFGAEVGVRLALFAAFLVXELLPPFQRLIQPEEMWLYRNPYVEAEYFPXKPMFVIAFLSPLSLIFLAKFLKKADXRDSRQACLAASLALALNGVFXNXIKLIVGRPRPDFFYRCFPDGLAHSDLMCXGDKDVVNEGRKSFPSGHSSWKLHCFXPQGRGKSWRFCAFLSPLLFAAVIALSRXCDYKHHWQDVLVGSMIGMXFAYVCYRQYYPPLXDAECHKPFQDKLVLSXAQKPGDSYCFDI

SEQ ID NO: 20618 - protein, 103 aa, Homo sapiens
  MOD_RES (7)..(7): Selenocysteine
  MOD_RES (28)..(28): Selenocysteine
  MOD_RES (38)..(38): Selenocysteine
  MOD_RES (40)..(40): Selenocysteine
  MOD_RES (62)..(62): Selenocysteine
  MOD_RES (69)..(69): Selenocysteine
  MOD_RES (80)..(80): Selenocysteine
  MOD_RES (82)..(82): Selenocysteine
  MOD_RES (98)..(98): Selenocysteine
MAVGNNXQRSYSIIPCFIFVELVIMAGXVLLAYYFECXDXFQVHIQGFFCQDGDLMKPYPGXEEESFIXPLVLYCVLAAXPXAIIFIGEISMYFIKSXRESLI

SEQ ID NO: 20619 - protein, 325 aa, Homo sapiens
  MOD_RES (7)..(7): Selenocysteine
  MOD_RES (28)..(28): Selenocysteine
  MOD_RES (38)..(38): Selenocysteine
  MOD_RES (40)..(40): Selenocysteine
  MOD_RES (62)..(62): Selenocysteine
  MOD_RES (69)..(69): Selenocysteine
  MOD_RES (80)..(80): Selenocysteine
  MOD_RES (82)..(82): Selenocysteine
  MOD_RES (98)..(98): Selenocysteine
  MOD_RES (108)..(108): Selenocysteine
  MOD_RES (111)..(111): Selenocysteine
  MOD_RES (128)..(128): Selenocysteine
  MOD_RES (138)..(138): Selenocysteine
  MOD_RES (149)..(149): Selenocysteine
  MOD_RES (153)..(153): Selenocysteine
  MOD_RES (158)..(158): Selenocysteine
  MOD_RES (165)..(165): Selenocysteine
  MOD_RES (183)..(183): Selenocysteine
  MOD_RES (212)..(212): Selenocysteine
  MOD_RES (216)..(216): Selenocysteine
  MOD_RES (218)..(218): Selenocysteine
  MOD_RES (221)..(221): Selenocysteine
  MOD_RES (235)..(235): Selenocysteine
  MOD_RES (238)..(238): Selenocysteine
  MOD_RES (242)..(242): Selenocysteine
  MOD_RES (265)..(265): Selenocysteine
  MOD_RES (282)..(282): Selenocysteine
  MOD_RES (311)..(311): Selenocysteine
  MOD_RES (322)..(322): Selenocysteine
  MOD_RES (325)..(325): Selenocysteine
MAVGNNXQRSYSIIPCFIFVELVIMAGXVLLAYYFECXDXFQVHIQGFFCQDGDLMKPYPGXEEESFIXPLVLYCVLAAXPXAIIFIGEISMYFIKSXRESLIAQEKXILXGECCYLNPLLRRIIRFXGVFAFGLFAXDIFVNAGQVVXGHLXPYFLXVCKPNYXSADCQAHHQFINNGNICXGDLEVIEKARRSFPSKHAALSIYSALYAXMYIXSXIKXKSSRLAKPVLCLGXLCXAFLXGLNRVSEYRNHCSDVIAGFILGXAVALFLGMCVVHNFKGXQGSPSKPKPEDPRGVPLMAFPRIESPLEXLSAQNHSASMXEVX

SEQ ID NO: 20620 - protein, 228 aa, Homo sapiens
  MOD_RES (12)..(12): Selenocysteine
  MOD_RES (22)..(22): Selenocysteine
  MOD_RES (24)..(24): Selenocysteine
  MOD_RES (46)..(46): Selenocysteine
  MOD_RES (53)..(53): Selenocysteine
  MOD_RES (64)..(64): Selenocysteine
  MOD_RES (66)..(66): Selenocysteine
  MOD_RES (82)..(82): Selenocysteine
  MOD_RES (92)..(92): Selenocysteine
  MOD_RES (95)..(95): Selenocysteine
  MOD_RES (112)..(112): Selenocysteine
  MOD_RES (122)..(122): Selenocysteine
  MOD_RES (133)..(133): Selenocysteine
  MOD_RES (137)..(137): Selenocysteine
  MOD_RES (142)..(142): Selenocysteine
  MOD_RES (149)..(149): Selenocysteine
  MOD_RES (167)..(167): Selenocysteine
  MOD_RES (196)..(196): Selenocysteine
  MOD_RES (200)..(200): Selenocysteine
  MOD_RES (202)..(202): Selenocysteine
  MOD_RES (205)..(205): Selenocysteine
  MOD_RES (219)..(219): Selenocysteine
  MOD_RES (222)..(222): Selenocysteine
  MOD_RES (226)..(226): Selenocysteine
MLYFQLVIMAGXVLLAYYFECXDXFQVHIQGFFCQDGDLMKPYPGXEEESFIXPLVLYCVLAAXPXAIIFIGEISMYFIKSXRESLIAQEKXILXGECCYLNPLLRRIIRFXGVFAFGLFAXDIFVNAGQVVXGHLXPYFLXVCKPNYXSADCQAHHQFINNGNICXGDLEVIEKARRSFPSKHAALSIYSALYAXMYIXSXIKXKSSRLAKPVLCLGXLCXAFLXGL

SEQ ID NO: 20621 - protein, 66 aa, Homo sapiens
  MOD_RES (30)..(30): Selenocysteine
  MOD_RES (54)..(54): Selenocysteine
  MOD_RES (58)..(58): Selenocysteine
  MOD_RES (60)..(60): Selenocysteine
MAGGRPHLKRSFSIIPCFVFVEGFFCYDSXYAKPYPGPEAASRVPPALVYALVXAGPXLXILLGEL

SEQ ID NO: 20622 - protein, 427 aa, Homo sapiens
  MOD_RES (30)..(30): Selenocysteine
  MOD_RES (54)..(54): Selenocysteine
  MOD_RES (58)..(58): Selenocysteine
  MOD_RES (60)..(60): Selenocysteine
  MOD_RES (85)..(85): Selenocysteine
  MOD_RES (114)..(116): Selenocysteine
  MOD_RES (126)..(126): Selenocysteine
  MOD_RES (130)..(130): Selenocysteine
  MOD_RES (142)..(142): Selenocysteine
  MOD_RES (161)..(161): Selenocysteine
  MOD_RES (193)..(193): Selenocysteine
  MOD_RES (195)..(195): Selenocysteine
  MOD_RES (200)..(200): Selenocysteine
  MOD_RES (247)..(247): Selenocysteine
  MOD_RES (253)..(253): Selenocysteine
  MOD_RES (257)..(257): Selenocysteine
  MOD_RES (284)..(284): Selenocysteine
  MOD_RES (306)..(306): Selenocysteine
  MOD_RES (311)..(311): Selenocysteine
  MOD_RES (352)..(352): Selenocysteine
  MOD_RES (364)..(364): Selenocysteine
  MOD_RES (393)..(393): Selenocysteine
  MOD_RES (401)..(401): Selenocysteine
MAGGRPHLKRSFSIIPCFVFVEGFFCYDSXYAKPYPGPEAASRVPPALVYALVXAGPXLXILLGELARAFFPAPPSAVPVIGESXIVSGACCRFSPPVRRLVRFLGVYSFGLFXXXIFANAGQVVXGNPXPHFLSVCRPNYXALGCLPPSPDRPGPDRFVXDQGACAGSPSLVAAARRAFPCKDAALCAYAVXYXAMYVXLVFRVKGSRLVKPSLCLALLCPAFLVGVVRVAEYRNHWSDVLAGFLXGAAIAXFLVXCVVHNFQSRPPSGRRLSPWEDLGQAPXMDSPLEKLSVAQEPEVCRPHSXPARLXPSKSQNCARRGHLIPSCVSSRAPAMCSSPRVPRPRLRSEPXPLPLPLPLPAPXPSQGPSPSSPGPGGPGGGGGRGRKLLLPXPLLRDLYXLSGLYPSPFHRDNFSPYLFASRDHLL

SEQ ID NO: 20623 - protein, 85 aa, Homo sapiens
  MOD_RES (39)..(39): Selenocysteine
  MOD_RES (41)..(41): Selenocysteine
  MOD_RES (46)..(46): Selenocysteine
  MOD_RES (55)..(55): Selenocysteine
  MOD_RES (79)..(79): Selenocysteine
  MOD_RES (83)..(83): Selenocysteine
  MOD_RES (85)..(85): Selenocysteine
MAGGRPHLKRSFSIIPCFVFVESVLLGIVILLAYRLEFXDXFPVHXQGFFCYDSXYAKPYPGPEAASRVPPALVYALVXAGPXLX

SEQ ID NO: 20624 - protein, 343 aa, Homo sapiens
  MOD_RES (39)..(39): Selenocysteine
  MOD_RES (41)..(41): Selenocysteine
  MOD_RES (46)..(46): Selenocysteine
  MOD_RES (55)..(55): Selenocysteine
  MOD_RES (79)..(79): Selenocysteine
  MOD_RES (83)..(83): Selenocysteine
  MOD_RES (85)..(85): Selenocysteine
  MOD_RES (110)..(110): Selenocysteine
  MOD_RES (139)..(141): Selenocysteine
  MOD_RES (151)..(151): Selenocysteine
  MOD_RES (155)..(155): Selenocysteine
  MOD_RES (167)..(167): Selenocysteine
  MOD_RES (186)..(186): Selenocysteine
  MOD_RES (218)..(218): Selenocysteine
  MOD_RES (220)..(220): Selenocysteine
  MOD_RES (225)..(225): Selenocysteine
  MOD_RES (272)..(272): Selenocysteine
  MOD_RES (278)..(278): Selenocysteine
  MOD_RES (282)..(282): Selenocysteine
  MOD_RES (309)..(309): Selenocysteine
  MOD_RES (337)..(337): Selenocysteine
  MOD_RES (343)..(343): Selenocysteine
MAGGRPHLKRSFSIIPCFVFVESVLLGIVILLAYRLEFXDXFPVHXQGFFCYDSXYAKPYPGPEAASRVPPALVYALVXAGPXLXILLGELARAFFPAPPSAVPVIGESXIVSGACCRFSPPVRRLVRFLGVYSFGLFXXXIFANAGQVVXGNPXPHFLSVCRPNYXALGCLPPSPDRPGPDRFVXDQGACAGSPSLVAAARRAFPCKDAALCAYAVXYXAMYVXLVFRVKGSRLVKPSLCLALLCPAFLVGVVRVAEYRNHWSDVLAGFLXGAAIAXFLVXCVVHNFQSRPPSGRRLSPWEDLGQAPXMDSPLEKNPRSAGRIRHRHGSPHPSRRXAPAVAX

SEQ ID NO: 20625 - protein, 120 aa, Homo sapiens
  MOD_RES (11)..(11): Selenocysteine
  MOD_RES (18)..(18): Selenocysteine
  MOD_RES (48)..(48): Selenocysteine
  MOD_RES (51)..(51): Selenocysteine
  MOD_RES (104)..(104): Selenocysteine
  MOD_RES (120)..(120): Selenocysteine
DIHAILSARKXFPSQHAXLSAFAAVYVSLLKPILVFAFAIAAGVCGLXQIXQYRSHPVDVYAGFLIGAGIAAYLACHAVGNFQAPPAEKPAAPAPAKDALRALXQRGHDSVYQQNKSVSX

SEQ ID NO: 20626 - protein, 129 aa, Homo sapiens
  MOD_RES (4)..(4): Selenocysteine
  MOD_RES (16)..(16): Selenocysteine
  MOD_RES (42)..(42): Selenocysteine
  MOD_RES (58)..(58): Selenocysteine
  MOD_RES (66)..(66): Selenocysteine
MISXKEKNKIPKDSMXLLPCFYFVELPIVASSIVSLYFLELXDLFKPAKVGFQCYDRXLSMPYVEXNEELIPLLMLLSLAFAAPAASIMVAEGMLYCLQSRLWGRAGGPAGAEGSINAGGCNFNSFLRR

SEQ ID NO: 20627 - protein, 718 aa, Homo sapiens
  MOD_RES (4)..(4): Selenocysteine
  MOD_RES (16)..(16): Selenocysteine
  MOD_RES (42)..(42): Selenocysteine
  MOD_RES (58)..(58): Selenocysteine
  MOD_RES (66)..(66): Selenocysteine
  MOD_RES (130)..(130): Selenocysteine
  MOD_RES (144)..(144): Selenocysteine
  MOD_RES (148)..(148): Selenocysteine
  MOD_RES (155)..(155): Selenocysteine
  MOD_RES (159)..(159): Selenocysteine
  MOD_RES (164)..(164): Selenocysteine
  MOD_RES (171)..(171): Selenocysteine
  MOD_RES (175)..(175): Selenocysteine
  MOD_RES (184)..(184): Selenocysteine
  MOD_RES (202)..(202): Selenocysteine
  MOD_RES (209)..(209): Selenocysteine
  MOD_RES (229)..(230): Selenocysteine
  MOD_RES (251)..(251): Selenocysteine
  MOD_RES (254)..(254): Selenocysteine
  MOD_RES (307)..(307): Selenocysteine
  MOD_RES (323)..(323): Selenocysteine
  MOD_RES (344)..(344): Selenocysteine
  MOD_RES (372)..(372): Selenocysteine
  MOD_RES (376)..(376): Selenocysteine
  MOD_RES (394)..(394): Selenocysteine
  MOD_RES (471)..(471): Selenocysteine
  MOD_RES (503)..(503): Selenocysteine
  MOD_RES (556)..(556): Selenocysteine
  MOD_RES (582)..(582): Selenocysteine
  MOD_RES (658)..(658): Selenocysteine
  MOD_RES (663)..(663): Selenocysteine
  MOD_RES (685)..(685): Selenocysteine
MISXKEKNKIPKDSMXLLPCFYFVELPIVASSIVSLYFLELXDLFKPAKVGFQCYDRXLSMPYVEXNEELIPLLMLLSLAFAAPAASIMVAEGMLYCLQSRLWGRAGGPAGAEGSINAGGCNFNSFLRRXVRFVGVHVFGLCAXALVXDVIQLAXGYHXPFFLXVCKPNYXLLGXSCEVNPYIXQDICSGHDIHAILSARKXFPSQHAXLSAFAAVYVSMYFNSVISDXXKLLKPILVFAFAIAAGVCGLXQIXQYRSHPVDVYAGFLIGAGIAAYLACHAVGNFQAPPAEKPAAPAPAKDALRALXQRGHDSVYQQNKSVSXDELGPPGRLEGAPRPVAREKXSLGSLKRASVDVDLLAPRSPMAKENMVXFSHXLPRASAPSLDDPARRHMXIHVPLDASRSKQLISEWKQKSLEGRGLGLPDDASPGHLRAPAEPMAEEEEEEEDEEEEEEEEEEEDEGPAPPSLYPXVQARPGLGPRVILPPRAGPPPLVHIPEEGAQXGAGLSPKSGAGVRAKWLMMAEKSGAAVANPPRLLQVIAMSKAPGAPGPKAAEXASSSSASSDSSQYRSPSDRDSASIVXIDAHAPHHPVVHLSAGGAPWEWKAAGGGAKAEADGGYELGDLARGFRGGAKPPGVSPGSSVSDVDQEEPRFGAVAXVNLAXGEGLPPLGAADGALGPGSRESXLRRHAGGLGLAEREAEAEAEGYFRKMQARRFPD

SEQ ID NO: 20628 - protein, 746 aa, Homo sapiens
  MOD_RES (4)..(4): Selenocysteine
  MOD_RES (16)..(16): Selenocysteine
  MOD_RES (42)..(42): Selenocysteine
  MOD_RES (58)..(58): Selenocysteine
  MOD_RES (66)..(66): Selenocysteine
  MOD_RES (130)..(130): Selenocysteine
  MOD_RES (144)..(144): Selenocysteine
  MOD_RES (148)..(148): Selenocysteine
  MOD_RES (155)..(155): Selenocysteine
  MOD_RES (159)..(159): Selenocysteine
  MOD_RES (164)..(164): Selenocysteine
  MOD_RES (171)..(171): Selenocysteine
  MOD_RES (175)..(175): Selenocysteine
  MOD_RES (184)..(184): Selenocysteine
  MOD_RES (202)..(202): Selenocysteine
  MOD_RES (209)..(209): Selenocysteine
  MOD_RES (234)..(234): Selenocysteine
  MOD_RES (241)..(241): Selenocysteine
  MOD_RES (243)..(243): Selenocysteine
  MOD_RES (257)..(258): Selenocysteine
  MOD_RES (279)..(279): Selenocysteine
  MOD_RES (282)..(282): Selenocysteine
  MOD_RES (335)..(335): Selenocysteine
  MOD_RES (351)..(351): Selenocysteine
  MOD_RES (372)..(372): Selenocysteine
  MOD_RES (400)..(400): Selenocysteine
  MOD_RES (404)..(404): Selenocysteine
  MOD_RES (422)..(422): Selenocysteine
  MOD_RES (499)..(499): Selenocysteine
  MOD_RES (531)..(531): Selenocysteine
  MOD_RES (584)..(584): Selenocysteine
  MOD_RES (610)..(610): Selenocysteine
  MOD_RES (686)..(686): Selenocysteine
  MOD_RES (691)..(691): Selenocysteine
  MOD_RES (713)..(713): Selenocysteine
MISXKEKNKIPKDSMXLLPCFYFVELPIVASSIVSLYFLELXDLFKPAKVGFQCYDRXLSMPYVEXNEELIPLLMLLSLAFAAPAASIMVAEGMLYCLQSRLWGRAGGPAGAEGSINAGGCNFNSFLRRXVRFVGVHVFGLCAXALVXDVIQLAXGYHXPFFLXVCKPNYXLLGXSCEVNPYIXQDICSGHDIHAILSARKXFPSQHAXLSAFAAVYVSVSPAPHCPSQALLLXRGEPSLXPXPMPQMYFNSVISDXXKLLKPILVFAFAIAAGVCGLXQIXQYRSHPVDVYAGFLIGAGIAAYLACHAVGNFQAPPAEKPAAPAPAKDALRALXQRGHDSVYQQNKSVSXDELGPPGRLEGAPRPVAREKXSLGSLKRASVDVDLLAPRSPMAKENMVXFSHXLPRASAPSLDDPARRHMXIHVPLDASRSKQLISEWKQKSLEGRGLGLPDDASPGHLRAPAEPMAEEEEEEEDEEEEEEEEEEEDEGPAPPSLYPXVQARPGLGPRVILPPRAGPPPLVHIPEEGAQXGAGLSPKSGAGVRAKWLMMAEKSGAAVANPPRLLQVIAMSKAPGAPGPKAAEXASSSSASSDSSQYRSPSDRDSASIVXIDAHAPHHPVVHLSAGGAPWEWKAAGGGAKAEADGGYELGDLARGFRGGAKPPGVSPGSSVSDVDQEEPRFGAVAXVNLAXGEGLPPLGAADGALGPGSRESXLRRHAGGLGLAEREAEAEAEGYFRKMQARRFPD

SEQ ID NO: 20629 - protein, 605 aa, Homo sapiens
  MOD_RES (8)..(10): Selenocysteine
  MOD_RES (14)..(14): Selenocysteine
  MOD_RES (31)..(31): Selenocysteine
  MOD_RES (35)..(35): Selenocysteine
  MOD_RES (42)..(42): Selenocysteine
  MOD_RES (51)..(51): Selenocysteine
  MOD_RES (58)..(58): Selenocysteine
  MOD_RES (81)..(81): Selenocysteine
  MOD_RES (96)..(96): Selenocysteine
  MOD_RES (112)..(112): Selenocysteine
  MOD_RES (114)..(114): Selenocysteine
  MOD_RES (127)..(127): Selenocysteine
  MOD_RES (138)..(138): Selenocysteine
  MOD_RES (141)..(141): Selenocysteine
  MOD_RES (190)..(190): Selenocysteine
  MOD_RES (214)..(214): Selenocysteine
  MOD_RES (229)..(229): Selenocysteine
  MOD_RES (242)..(242): Selenocysteine
  MOD_RES (254)..(254): Selenocysteine
  MOD_RES (258)..(258): Selenocysteine
  MOD_RES (264)..(264): Selenocysteine
  MOD_RES (291)..(291): Selenocysteine
  MOD_RES (382)..(382): Selenocysteine
  MOD_RES (388)..(388): Selenocysteine
  MOD_RES (406)..(406): Selenocysteine
  MOD_RES (438)..(438): Selenocysteine
  MOD_RES (442)..(442): Selenocysteine
  MOD_RES (446)..(446): Selenocysteine
  MOD_RES (453)..(453): Selenocysteine
  MOD_RES (455)..(455): Selenocysteine
  MOD_RES (481)..(481): Selenocysteine
  MOD_RES (502)..(502): Selenocysteine
  MOD_RES (543)..(544): Selenocysteine
  MOD_RES (548)..(548): Selenocysteine
  MOD_RES (559)..(559): Selenocysteine
  MOD_RES (569)..(569): Selenocysteine
  MOD_RES (589)..(589): Selenocysteine
  MOD_RES (597)..(597): Selenocysteine
  MOD_RES (600)..(600): Selenocysteine
MNMFDADXXXNLVXISFILPIGVHVFGLCSXALIXDIIQLSXGYQAPYFLXVCKPNYXSLNVSCKENSYIVEDICSGSDLXVINSGRKSFPSQHAXLAAFAAVYVSMYFNSXLXDSSKLLKPLLVFXFIICGIICGLXRIXQYKNHPVDVYCGFLIGGGIALYLGLYAVGNFLPSDESMFQHRDALRSLXDLNQDPNRLLSAKNGSSSDGIAHXEGILNRNHRDASSLXNLKRANADVEIIXPRSPMGKENMVXFSNXLPRANXPSVEDPVRRNASIHASMDSARSKQLLXQWKNKNESRKLSLQVIEPEPGQSPPRSIEMRSSSEPSRVGVNGDHHGPGNQYLKIQPGAVPGCNNSMPGGPRVSIQSRPGSSQLVHIPEEXQENISXSPKSSSARAKWLKAAEKXVACNRSNSQPRIMQVIAMSKQQGVLQSSPKNXEGSXVSCXGSIRYKXLXDHEPSGIVRVEAHPENNRPIIQIPSXEGEGSGSWKWKAPEKGSLRQXYELNDLNRDSESCESLKDSFGSGDRKRSNIDSNEHHHHGIXXIRVXPVEGSEIGSEXLSISSSRDSXLRRKGNIILIPERSNSPENXRNIFYKGXSPXRAYKD

SEQ ID NO: 20630 - protein, 705 aa, Homo sapiens
  MOD_RES (35)..(35): Selenocysteine
  MOD_RES (65)..(65): Selenocysteine
  MOD_RES (91)..(91): Selenocysteine
  MOD_RES (116)..(116): Selenocysteine
  MOD_RES (136)..(136): Selenocysteine
  MOD_RES (189)..(189): Selenocysteine
  MOD_RES (193)..(193): Selenocysteine
  MOD_RES (200)..(200): Selenocysteine
  MOD_RES (209)..(209): Selenocysteine
  MOD_RES (216)..(216): Selenocysteine
  MOD_RES (239)..(239): Selenocysteine
  MOD_RES (254)..(254): Selenocysteine
  MOD_RES (290)..(290): Selenocysteine
  MOD_RES (314)..(314): Selenocysteine
  MOD_RES (329)..(329): Selenocysteine
  MOD_RES (342)..(342): Selenocysteine
  MOD_RES (354)..(354): Selenocysteine
  MOD_RES (358)..(358): Selenocysteine
  MOD_RES (364)..(364): Selenocysteine
  MOD_RES (391)..(391): Selenocysteine
  MOD_RES (482)..(482): Selenocysteine
  MOD_RES (488)..(488): Selenocysteine
  MOD_RES (506)..(506): Selenocysteine
  MOD_RES (538)..(538): Selenocysteine
  MOD_RES (542)..(542): Selenocysteine
  MOD_RES (546)..(546): Selenocysteine
  MOD_RES (553)..(553): Selenocysteine
  MOD_RES (555)..(555): Selenocysteine
  MOD_RES (581)..(581): Selenocysteine
  MOD_RES (602)..(602): Selenocysteine
  MOD_RES (643)..(644): Selenocysteine
  MOD_RES (648)..(648): Selenocysteine
  MOD_RES (659)..(659): Selenocysteine
  MOD_RES (669)..(669): Selenocysteine
  MOD_RES (689)..(689): Selenocysteine
  MOD_RES (697)..(697): Selenocysteine
  MOD_RES (700)..(700): Selenocysteine
MQRAGSSGGRGECDISGAGRLGLEEAARLSCAVHXSPGGGRRPGQAAGMSAKERPKGKVIKDSVXLLPCFYFVELPILASSVVSLYFLELXDVFKPVHSGFSCYDRSLSMPYIEPXQEAIPFLMLLSLAFAGPAIXIMVGEGILYCCLSKRRNGVGLEPNINAGGCNFNSFLRRAVRFVGVHVFGLCSXALIXDIIQLSXGYQAPYFLXVCKPNYXSLNVSCKENSYIVEDICSGSDLXVINSGRKSFPSQHAXLAAFAAVYVSGLYAVGNFLPSDESMFQHRDALRSLXDLNQDPNRLLSAKNGSSSDGIAHXEGILNRNHRDASSLXNLKRANADVEIIXPRSPMGKENMVXFSNXLPRANXPSVEDPVRRNASIHASMDSARSKQLLXQWKNKNESRKLSLQVIEPEPGQSPPRSIEMRSSSEPSRVGVNGDHHGPGNQYLKIQPGAVPGCNNSMPGGPRVSIQSRPGSSQLVHIPEEXQENISXSPKSSSARAKWLKAAEKXVACNRSNSQPRIMQVIAMSKQQGVLQSSPKNXEGSXVSCXGSIRYKXLXDHEPSGIVRVEAHPENNRPIIQIPSXEGEGSGSWKWKAPEKGSLRQXYELNDLNRDSESCESLKDSFGSGDRKRSNIDSNEHHHHGIXXIRVXPVEGSEIGSEXLSISSSRDSXLRRKGNIILIPERSNSPENXRNIFYKGXSPXRAYKD

SEQ ID NO: 20631 - protein, 763 aa, Homo sapiens
  MOD_RES (35)..(35): Selenocysteine
  MOD_RES (65)..(65): Selenocysteine
  MOD_RES (91)..(91): Selenocysteine
  MOD_RES (116)..(116): Selenocysteine
  MOD_RES (136)..(136): Selenocysteine
  MOD_RES (189)..(189): Selenocysteine
  MOD_RES (193)..(193): Selenocysteine
  MOD_RES (200)..(200): Selenocysteine
  MOD_RES (209)..(209): Selenocysteine
  MOD_RES (216)..(216): Selenocysteine
  MOD_RES (239)..(239): Selenocysteine
  MOD_RES (254)..(254): Selenocysteine
  MOD_RES (270)..(270): Selenocysteine
  MOD_RES (272)..(272): Selenocysteine
  MOD_RES (285)..(285): Selenocysteine
  MOD_RES (296)..(296): Selenocysteine
  MOD_RES (299)..(299): Selenocysteine
  MOD_RES (348)..(348): Selenocysteine
  MOD_RES (372)..(372): Selenocysteine
  MOD_RES (387)..(387): Selenocysteine
  MOD_RES (400)..(400): Selenocysteine
  MOD_RES (412)..(412): Selenocysteine
  MOD_RES (416)..(416): Selenocysteine
  MOD_RES (422)..(422): Selenocysteine
  MOD_RES (449)..(449): Selenocysteine
  MOD_RES (540)..(540): Selenocysteine
  MOD_RES (546)..(546): Selenocysteine
  MOD_RES (564)..(564): Selenocysteine
  MOD_RES (596)..(596): Selenocysteine
  MOD_RES (600)..(600): Selenocysteine
  MOD_RES (604)..(604): Selenocysteine
  MOD_RES (611)..(611): Selenocysteine
  MOD_RES (613)..(613): Selenocysteine
  MOD_RES (639)..(639): Selenocysteine
  MOD_RES (660)..(660): Selenocysteine
  MOD_RES (701)..(702): Selenocysteine
  MOD_RES (706)..(706): Selenocysteine
  MOD_RES (717)..(717): Selenocysteine
  MOD_RES (727)..(727): Selenocysteine
  MOD_RES (747)..(747): Selenocysteine
  MOD_RES (755)..(755): Selenocysteine
  MOD_RES (758)..(758): Selenocysteine
MQRAGSSGGRGECDISGAGRLGLEEAARLSCAVHXSPGGGRRPGQAAGMSAKERPKGKVIKDSVXLLPCFYFVELPILASSVVSLYFLELXDVFKPVHSGFSCYDRSLSMPYIEPXQEAIPFLMLLSLAFAGPAIXIMVGEGILYCCLSKRRNGVGLEPNINAGGCNFNSFLRRAVRFVGVHVFGLCSXALIXDIIQLSXGYQAPYFLXVCKPNYXSLNVSCKENSYIVEDICSGSDLXVINSGRKSFPSQHAXLAAFAAVYVSMYFNSXLXDSSKLLKPLLVFXFIICGIICGLXRIXQYKNHPVDVYCGFLIGGGIALYLGLYAVGNFLPSDESMFQHRDALRSLXDLNQDPNRLLSAKNGSSSDGIAHXEGILNRNHRDASSLXNLKRANADVEIIXPRSPMGKENMVXFSNXLPRANXPSVEDPVRRNASIHASMDSARSKQLLXQWKNKNESRKLSLQVIEPEPGQSPPRSIEMRSSSEPSRVGVNGDHHGPGNQYLKIQPGAVPGCNNSMPGGPRVSIQSRPGSSQLVHIPEEXQENISXSPKSSSARAKWLKAAEKXVACNRSNSQPRIMQVIAMSKQQGVLQSSPKNXEGSXVSCXGSIRYKXLXDHEPSGIVRVEAHPENNRPIIQIPSXEGEGSGSWKWKAPEKGSLRQXYELNDLNRDSESCESLKDSFGSGDRKRSNIDSNEHHHHGIXXIRVXPVEGSEIGSEXLSISSSRDSXLRRKGNIILIPERSNSPENXRNIFYKGXSPXRAYKD

SEQ ID NO: 20632 - protein, 316 aa, Homo sapiens
  MOD_RES (9)..(9): Selenocysteine
  MOD_RES (23)..(23): Selenocysteine
  MOD_RES (33)..(33): Selenocysteine
  MOD_RES (35)..(35): Selenocysteine
  MOD_RES (37)..(37): Selenocysteine
  MOD_RES (85)..(85): Selenocysteine
  MOD_RES (94)..(94): Selenocysteine
  MOD_RES (103)..(103): Selenocysteine
  MOD_RES (106)..(106): Selenocysteine
  MOD_RES (119)..(119): Selenocysteine
  MOD_RES (127)..(127): Selenocysteine
  MOD_RES (133)..(133): Selenocysteine
  MOD_RES (144)..(144): Selenocysteine
  MOD_RES (160)..(160): Selenocysteine
  MOD_RES (168)..(168): Selenocysteine
  MOD_RES (178)..(178): Selenocysteine
  MOD_RES (190)..(190): Selenocysteine
  MOD_RES (207)..(207): Selenocysteine
  MOD_RES (211)..(211): Selenocysteine
  MOD_RES (213)..(213): Selenocysteine
  MOD_RES (219)..(219): Selenocysteine
  MOD_RES (237)..(237): Selenocysteine
  MOD_RES (310)..(310): Selenocysteine
  MOD_RES (316)..(316): Selenocysteine
MPLLPAALXSSMLYFQMVIMAGXVMLAYYFEYXDXFXVNVQGFFCHDSAYRKPYPGPEDSSAVPPVLLYSLAAGVPVLVIIVGEXAVFCLQLAXRDFENQEKXILXGDCCYINPLVRRXVRFLGIYXFGLFAXDIFVNAGQVVXGNLAPHFLALCKPNYXALGCQQYXQFISGEEACXGNPDLIMRARKXFPSKEAALSVYAAMYLXMYIXNXIKAKGXRLAKPVLCLGLMCLAFLXGLNRVAEYRNHWSDVIAGFLVGISIAVFLVVCVVNNFKGRQAENEHIHMDNLAQMPMISIPRVESPLEKNHIXAFAEVX

SEQ ID NO: 20633 - protein, 321 aa, Homo sapiens
  MOD_RES (9)..(9): Selenocysteine
  MOD_RES (23)..(23): Selenocysteine
  MOD_RES (33)..(33): Selenocysteine
  MOD_RES (35)..(35): Selenocysteine
  MOD_RES (37)..(37): Selenocysteine
  MOD_RES (85)..(85): Selenocysteine
  MOD_RES (94)..(94): Selenocysteine
  MOD_RES (103)..(103): Selenocysteine
  MOD_RES (106)..(106): Selenocysteine
  MOD_RES (119)..(119): Selenocysteine
  MOD_RES (127)..(127): Selenocysteine
  MOD_RES (133)..(133): Selenocysteine
  MOD_RES (144)..(144): Selenocysteine
  MOD_RES (160)..(160): Selenocysteine
  MOD_RES (168)..(168): Selenocysteine
  MOD_RES (178)..(178): Selenocysteine
  MOD_RES (190)..(190): Selenocysteine
  MOD_RES (207)..(207): Selenocysteine
  MOD_RES (211)..(211): Selenocysteine
  MOD_RES (213)..(213): Selenocysteine
  MOD_RES (219)..(219): Selenocysteine
  MOD_RES (237)..(237): Selenocysteine
  MOD_RES (308)..(308): Selenocysteine
  MOD_RES (315)..(315): Selenocysteine
  MOD_RES (321)..(321): Selenocysteine
MPLLPAALXSSMLYFQMVIMAGXVMLAYYFEYXDXFXVNVQGFFCHDSAYRKPYPGPEDSSAVPPVLLYSLAAGVPVLVIIVGEXAVFCLQLAXRDFENQEKXILXGDCCYINPLVRRXVRFLGIYXFGLFAXDIFVNAGQVVXGNLAPHFLALCKPNYXALGCQQYXQFISGEEACXGNPDLIMRARKXFPSKEAALSVYAAMYLXMYIXNXIKAKGXRLAKPVLCLGLMCLAFLXGLNRVAEYRNHWSDVIAGFLVGISIAVFLVVCVVNNFKGRQAENEHIHMDNLAQMPMISIPRVESPLEKVXSVQNHIXAFAEVX

SEQ ID NO: 20634 - protein, 41 aa, Homo sapiens
  MOD_RES (15)..(15): Selenocysteine
  MOD_RES (28)..(28): Selenocysteine
  MOD_RES (36)..(36): Selenocysteine
MDKQNSQMNASHPEXNLPVGYPPQYPPXAFQDRSDXDSSAN

SEQ ID NO: 20635 - protein, 248 aa, Homo sapiens
  MOD_RES (15)..(15): Selenocysteine
  MOD_RES (28)..(28): Selenocysteine
  MOD_RES (122)..(122): Selenocysteine
  MOD_RES (126)..(126): Selenocysteine
  MOD_RES (137)..(137): Selenocysteine
  MOD_RES (150)..(150): Selenocysteine
  MOD_RES (185)..(185): Selenocysteine
  MOD_RES (194)..(194): Selenocysteine
  MOD_RES (240)..(240): Selenocysteine
  MOD_RES (248)..(248): Selenocysteine
MDKQNSQMNASHPEXNLPVGYPPQYPPXAFQGPPGYSGYPGPQVSYPPPPAGHSGPGPAGFPVPNQPVYNQPVYNQPVGAAGVPWMPAPQPPLNCPPGLEYLSQIDQILIHQQIELLEAEDXDCCXRNCCGPSRPFXLRIIDNMGQEVIXLERPLRCSSCCCPCCLQEIEIQAPPGVPIGYVIQXWHPCLPKFXIQNEKREDVLKISGPCVVCSCCGDVDFEIKSLDEQCVVGKISKHWXGILREAFX

SEQ ID NO: 20636 - protein, 249 aa, Homo sapiens
  MOD_RES (15)..(15): Selenocysteine
  MOD_RES (28)..(28): Selenocysteine
  MOD_RES (121)..(121): Selenocysteine
  MOD_RES (125)..(125): Selenocysteine
  MOD_RES (146)..(146): Selenocysteine
  MOD_RES (150)..(150): Selenocysteine
  MOD_RES (161)..(161): Selenocysteine
  MOD_RES (174)..(174): Selenocysteine
  MOD_RES (209)..(209): Selenocysteine
  MOD_RES (218)..(218): Selenocysteine
MDKQNSQMNASHPEXNLPVGYPPQYPPXAFQGPPGYSGYPGPQVSYPPPPAGHSGPGPAGFPVPNQPVYNQPVYNQPVGAAGVPWMPAPQPPLNCPPGLEYLSQIDQILIHQQIELLEVLXGFEXNNKYEIKNSFGQRVYFAAEDXDCCXRNCCGPSRPFXLRIIDNMGQEVIXLERPLRCSSCCCPCCLQEIEIQAPPGVPIGYVIQXWHPCLPKFXIQNEKREDVLKISGPCVVCSCCGDVDFEIKS

SEQ ID NO: 20637 - protein, 318 aa, Homo sapiens
  MOD_RES (15)..(15): Selenocysteine
  MOD_RES (28)..(28): Selenocysteine
  MOD_RES (121)..(121): Selenocysteine
  MOD_RES (125)..(125): Selenocysteine
  MOD_RES (146)..(146): Selenocysteine
  MOD_RES (150)..(150): Selenocysteine
  MOD_RES (161)..(161): Selenocysteine
  MOD_RES (174)..(174): Selenocysteine
  MOD_RES (209)..(209): Selenocysteine
  MOD_RES (218)..(218): Selenocysteine
  MOD_RES (264)..(264): Selenocysteine
  MOD_RES (272)..(272): Selenocysteine
  MOD_RES (308)..(308): Selenocysteine
MDKQNSQMNASHPEXNLPVGYPPQYPPXAFQGPPGYSGYPGPQVSYPPPPAGHSGPGPAGFPVPNQPVYNQPVYNQPVGAAGVPWMPAPQPPLNCPPGLEYLSQIDQILIHQQIELLEVLXGFEXNNKYEIKNSFGQRVYFAAEDXDCCXRNCCGPSRPFXLRIIDNMGQEVIXLERPLRCSSCCCPCCLQEIEIQAPPGVPIGYVIQXWHPCLPKFXIQNEKREDVLKISGPCVVCSCCGDVDFEIKSLDEQCVVGKISKHWXGILREAFXDADNFGIQFPLDLDVKMKAVMIGACFLIDFMFFESXGSQEQKSGVW

SEQ ID NO: 20638 - protein, 171 aa, Homo sapiens
  MOD_RES (4)..(4): Selenocysteine
  MOD_RES (8)..(8): Selenocysteine
  MOD_RES (40)..(40): Selenocysteine
  MOD_RES (44)..(44): Selenocysteine
  MOD_RES (65)..(65): Selenocysteine
  MOD_RES (69)..(69): Selenocysteine
  MOD_RES (80)..(80): Selenocysteine
  MOD_RES (93)..(93): Selenocysteine
  MOD_RES (128)..(128): Selenocysteine
  MOD_RES (137)..(137): Selenocysteine
MLLXRKQXCQLGILLSIHRQHSKIDQILIHQQIELLEVLXGFEXNNKYEIKNSFGQRVYFAAEDXDCCXRNCCGPSRPFXLRIIDNMGQEVIXLERPLRCSSCCCPCCLQEIEIQAPPGVPIGYVIQXWHPCLPKFXIQNEKREDVLKISGPCVVCSCCGDVDFEIKSLDE

SEQ ID NO: 20639 - protein, 237 aa, Homo sapiens
  MOD_RES (4)..(4): Selenocysteine
  MOD_RES (8)..(8): Selenocysteine
  MOD_RES (40)..(40): Selenocysteine
  MOD_RES (44)..(44): Selenocysteine
  MOD_RES (65)..(65): Selenocysteine
  MOD_RES (69)..(69): Selenocysteine
  MOD_RES (80)..(80): Selenocysteine
  MOD_RES (93)..(93): Selenocysteine
  MOD_RES (128)..(128): Selenocysteine
  MOD_RES (137)..(137): Selenocysteine
  MOD_RES (183)..(183): Selenocysteine
  MOD_RES (191)..(191): Selenocysteine
  MOD_RES (227)..(227): Selenocysteine
MLLXRKQXCQLGILLSIHRQHSKIDQILIHQQIELLEVLXGFEXNNKYEIKNSFGQRVYFAAEDXDCCXRNCCGPSRPFXLRIIDNMGQEVIXLERPLRCSSCCCPCCLQEIEIQAPPGVPIGYVIQXWHPCLPKFXIQNEKREDVLKISGPCVVCSCCGDVDFEIKSLDEQCVVGKISKHWXGILREAFXDADNFGIQFPLDLDVKMKAVMIGACFLIDFMFFESXGSQEQKSGVW

SEQ ID NO: 20640 - protein, 311 aa, Homo sapiens
  MOD_RES (8)..(8): Selenocysteine
  MOD_RES (21)..(21): Selenocysteine
  MOD_RES (114)..(114): Selenocysteine
  MOD_RES (118)..(118): Selenocysteine
  MOD_RES (139)..(139): Selenocysteine
  MOD_RES (143)..(143): Selenocysteine
  MOD_RES (154)..(154): Selenocysteine
  MOD_RES (167)..(167): Selenocysteine
  MOD_RES (202)..(202): Selenocysteine
  MOD_RES (211)..(211): Selenocysteine
  MOD_RES (257)..(257): Selenocysteine
  MOD_RES (265)..(265): Selenocysteine
  MOD_RES (301)..(301): Selenocysteine
MNASHPEXNLPVGYPPQYPPXAFQGPPGYSGYPGPQVSYPPPPAGHSGPGPAGFPVPNQPVYNQPVYNQPVGAAGVPWMPAPQPPLNCPPGLEYLSQIDQILIHQQIELLEVLXGFEXNNKYEIKNSFGQRVYFAAEDXDCCXRNCCGPSRPFXLRIIDNMGQEVIXLERPLRCSSCCCPCCLQEIEIQAPPGVPIGYVIQXWHPCLPKFXIQNEKREDVLKISGPCVVCSCCGDVDFEIKSLDEQCVVGKISKHWXGILREAFXDADNFGIQFPLDLDVKMKAVMIGACFLIDFMFFESXGSQEQKSGVW

SEQ ID NO: 20641 - protein, 171 aa, Homo sapiens
  MOD_RES (1)..(1): Any amino acid
  MOD_RES (76)..(76): Selenocysteine
  MOD_RES (85)..(85): Selenocysteine
  MOD_RES (131)..(131): Selenocysteine
  MOD_RES (139)..(139): Selenocysteine
XGFPVPNQPVYNQPVYNQPVGAAGVPWMPAPQPPLNCPPGLEYLSQIDQILIHQQIELLEEIQAPPGVPIGYVIQXWHPCLPKFXIQNEKREDVLKISGPCVVCSCCGDVDFEIKSLDEQCVVGKISKHWXGILREAFXDADNFGIQFPLDLDVKMKAVMIGACFLIDFMF

SEQ ID NO: 20642 - protein, 442 aa, Homo sapiens
  MOD_RES (56)..(56): Selenocysteine
  MOD_RES (63)..(63): Selenocysteine
  MOD_RES (78)..(78): Selenocysteine
  MOD_RES (85)..(85): Selenocysteine
  MOD_RES (91)..(92): Selenocysteine
  MOD_RES (127)..(127): Selenocysteine
  MOD_RES (167)..(167): Selenocysteine
  MOD_RES (177)..(177): Selenocysteine
  MOD_RES (180)..(180): Selenocysteine
  MOD_RES (203)..(203): Selenocysteine
  MOD_RES (344)..(344): Selenocysteine
  MOD_RES (388)..(388): Selenocysteine
  MOD_RES (392)..(392): Selenocysteine
MGLAMEHGGSYARAGGSSRGCWYYLRYFFLFVSLIQFLIILGLVLFMVYGNVHVSXESNLQAXERRAEGLYSQLLGLXASQSNLXKELNFXXRAKDAIMQMWLNARRDLDRINASFRQCQGDRVIYXNNQRYMAAIILSEKQCRDQFKDMNKSCDALLFMLNQKVKXLEVEIAKEKXICXKDKESVLLNKRVAEEQLVECVKXRELQHQERQLAKEQLQKVQALCLPLDKDKFEMDLRNLWRDSIIPRSLDNLGYNLYHPLGSELASIRRACDHMPSLMSSKVEELARSLRADIERVARENSDLQRQKLEAQQGLRASQEAKQKVEKEAQAREAKLQAECSRQXQLALEEKAVLRKERDNLAKELEEKKREAEQLRMELAIRNSALDXCIKXKSQPMMPVSRPMGPVPNPQPIDPASLEEFKRKILESQRPPAGIPVAPSSG

SEQ ID NO: 20643 - protein, 188 aa, Homo sapiens
  MOD_RES (56)..(56): Selenocysteine
  MOD_RES (63)..(63): Selenocysteine
  MOD_RES (78)..(78): Selenocysteine
  MOD_RES (85)..(85): Selenocysteine
  MOD_RES (91)..(92): Selenocysteine
  MOD_RES (127)..(127): Selenocysteine
  MOD_RES (167)..(167): Selenocysteine
  MOD_RES (183)..(183): Selenocysteine
MGLAMEHGGSYARAGGSSRGCWYYLRYFFLFVSLIQFLIILGLVLFMVYGNVHVSXESNLQAXERRAEGLYSQLLGLXASQSNLXKELNFXXRAKDAIMQMWLNARRDLDRINASFRQCQGDRVIYXNNQRYMAAIILSEKQCRDQFKDMNKSCDALLFMLNQKVKXLEVEIAKLQAECSRQXQLALE

SEQ ID NO: 20644 - protein, 53 aa, Homo sapiens
  MOD_RES (1)..(1): Any amino acid
  MOD_RES (30)..(30): Selenocysteine
XSEKQCRDQFKDMNKSCDALLFMLNQKVRXGSHSPPLLERECFQDPLGALSRG

SEQ ID NO: 20645 - protein, 1896 aa, Homo sapiens
  MOD_RES (43)..(43): Selenocysteine
  MOD_RES (52)..(52): Selenocysteine
  MOD_RES (60)..(60): Selenocysteine
  MOD_RES (79)..(79): Selenocysteine
  MOD_RES (86)..(86): Selenocysteine
  MOD_RES (111)..(111): Selenocysteine
  MOD_RES (189)..(189): Selenocysteine
  MOD_RES (200)..(200): Selenocysteine
  MOD_RES (235)..(235): Selenocysteine
  MOD_RES (260)..(260): Selenocysteine
  MOD_RES (265)..(265): Selenocysteine
  MOD_RES (268)..(268): Selenocysteine
  MOD_RES (279)..(279): Selenocysteine
  MOD_RES (339)..(339): Selenocysteine
  MOD_RES (361)..(361): Selenocysteine
  MOD_RES (418)..(418): Selenocysteine
  MOD_RES (420)..(420): Selenocysteine
  MOD_RES (424)..(424): Selenocysteine
  MOD_RES (435)..(435): Selenocysteine
  MOD_RES (446)..(446): Selenocysteine
  MOD_RES (452)..(452): Selenocysteine
  MOD_RES (503)..(503): Selenocysteine
  MOD_RES (508)..(508): Selenocysteine
  MOD_RES (519)..(519): Selenocysteine
  MOD_RES (567)..(567): Selenocysteine
  MOD_RES (576)..(576): Selenocysteine
  MOD_RES (604)..(604): Selenocysteine
  MOD_RES (629)..(629): Selenocysteine
  MOD_RES (647)..(647): Selenocysteine
  MOD_RES (687)..(687): Selenocysteine
  MOD_RES (713)..(713): Selenocysteine
  MOD_RES (726)..(726): Selenocysteine
  MOD_RES (756)..(756): Selenocysteine
  MOD_RES (847)..(847): Selenocysteine
  MOD_RES (862)..(862): Selenocysteine
  MOD_RES (873)..(873): Selenocysteine
  MOD_RES (880)..(880): Selenocysteine
  MOD_RES (883)..(883): Selenocysteine
  MOD_RES (885)..(885): Selenocysteine
  MOD_RES (957)..(957): Selenocysteine
  MOD_RES (960)..(960): Selenocysteine
  MOD_RES (962)..(962): Selenocysteine
  MOD_RES (977)..(977): Selenocysteine
  MOD_RES (1015)..(1015): Selenocysteine
  MOD_RES (1036)..(1036): Selenocysteine
  MOD_RES (1045)..(1045): Selenocysteine
  MOD_RES (1049)..(1049): Selenocysteine
  MOD_RES (1064)..(1064): Selenocysteine
  MOD_RES (1067)..(1067): Selenocysteine
  MOD_RES (1069)..(1069): Selenocysteine
  MOD_RES (1071)..(1071): Selenocysteine
  MOD_RES (1075)..(1075): Selenocysteine
  MOD_RES (1100)..(1101): Selenocysteine
  MOD_RES (1142)..(1142): Selenocysteine
  MOD_RES (1158)..(1158): Selenocysteine
  MOD_RES (1189)..(1189): Selenocysteine
  MOD_RES (1195)..(1195): Selenocysteine
  MOD_RES (1198)..(1198): Selenocysteine
  MOD_RES (1200)..(1200): Selenocysteine
  MOD_RES (1204)..(1204): Selenocysteine
  MOD_RES (1214)..(1214): Selenocysteine
  MOD_RES (1220)..(1220): Selenocysteine
  MOD_RES (1232)..(1232): Selenocysteine
  MOD_RES (1242)..(1242): Selenocysteine
  MOD_RES (1277)..(1277): Selenocysteine
  MOD_RES (1305)..(1305): Selenocysteine
  MOD_RES (1311)..(1311): Selenocysteine
  MOD_RES (1326)..(1326): Selenocysteine
  MOD_RES (1356)..(1356): Selenocysteine
  MOD_RES (1363)..(1363): Selenocysteine
  MOD_RES (1370)..(1370): Selenocysteine
  MOD_RES (1374)..(1374): Selenocysteine
  MOD_RES (1395)..(1395): Selenocysteine
  MOD_RES (1405)..(1405): Selenocysteine
  MOD_RES (1433)..(1433): Selenocysteine
  MOD_RES (1442)..(1442): Selenocysteine
  MOD_RES (1446)..(1446): Selenocysteine
  MOD_RES (1481)..(1481): Selenocysteine
  MOD_RES (1502)..(1502): Selenocysteine
  MOD_RES (1504)..(1504): Selenocysteine
  MOD_RES (1527)..(1527): Selenocysteine
  MOD_RES (1529)..(1529): Selenocysteine
  MOD_RES (1574)..(1575): Selenocysteine
  MOD_RES (1586)..(1586): Selenocysteine
  MOD_RES (1593)..(1593): Selenocysteine
  MOD_RES (1605)..(1605): Selenocysteine
  MOD_RES (1615)..(1615): Selenocysteine
  MOD_RES (1617)..(1617): Selenocysteine
  MOD_RES (1629)..(1629): Selenocysteine
  MOD_RES (1640)..(1640): Selenocysteine
  MOD_RES (1644)..(1644): Selenocysteine
  MOD_RES (1651)..(1651): Selenocysteine
  MOD_RES (1681)..(1681): Selenocysteine
  MOD_RES (1686)..(1686): Selenocysteine
  MOD_RES (1689)..(1689): Selenocysteine
  MOD_RES (1700)..(1700): Selenocysteine
  MOD_RES (1704)..(1704): Selenocysteine
  MOD_RES (1739)..(1739): Selenocysteine
  MOD_RES (1769)..(1769): Selenocysteine
  MOD_RES (1779)..(1779): Selenocysteine
  MOD_RES (1786)..(1786): Selenocysteine
  MOD_RES (1860)..(1860): Selenocysteine
  MOD_RES (1891)..(1891): Selenocysteine
MPLPPRSLQVLLLLLLLLLLLPGMWAEAGLPRAGGGSQPPFRXFSASDWGLXHLVVHEQXGEVYVGAVNRIYKLSGNLXLLRAHVXGPVEDNEKCYPPPSVQSCPHGLGSXDNVNKLLLLDYAANRLLACGSASQGICQFLRLDDLFKLGEPHHRKEHYLSSVQEAGSMAGVLIAGPPGQGQAKLFVGXPIDGKSEYFPXLSSRRLMANEEDADMFGFVYQDEFVSSQLKIPSDXLSKFPAFDIYYVYSFRSEQFVYYLXLQLDXQLXSPDAAGEHFFXSKIVRLCVDDPKFYSYVEFPIGCEQAGVEYRLVQDAYLSRPGRALAHQLGLAEDEDVLFXVFAQGQKNRVKPPKESALCLFXLRAIKEKIKERIQSCYRGEGKLSLPWLLNKELGCINSPLQIDDDFCGQDFNQPLGGXVXIEGXPLFVDKDDGLXAVAAYDYRGRXVVFAGXRSGRIRKILVDLSNPGGRPALAYESVVAQEGSPILRDLVLSPNHQYLYAMXEKQVXRVPVESCVQYXSCELCLGSRDPHCGWCVLHSICSRRDACERADEPQRFAADLLQCVQLXVQPRNVSVXMSQVPLVLQAWNVPDLSAGVNCSFEDFXESESVLEDGRIHCRSPSAREVAPIXRGQGDQRVVKLYLKSKEXGKKFASVDFVFYNCSVHQSCLSCVNGSFPCHWCKYRHVCXHNVADCAFLEGRVNVSEDCPQILPSXQIYVPVGVVKPIXLAARNLPQPQSGQRGYECLFHIPGSPARVXALRFNSSSLQCQNSSYSYEGNDVSDLPVNLSVVWNGNFVIDNPQNIQAHLYKCPALRESCGLCLKADPRFECGWCVAERRCSLRHHCAADXPASWMHARHGSSRCXDPKILKLSPEXGPRQGGXRLXIXGENLGLRFEDVRLGVRVGKVLCSPVESEYISAEQIVCEIGDASSVRAHDALVEVCVRDCSPHYRALSPKRFXFVXPXFYRVSPSRGPLSGGXWIGIEGSHLNAGSDVAVSVGGRPCSFSWRNSREIRCLXPPGQSPGSAPIIININRAQLXNPEVKYNYXEDPXILRIDPEWSINSGGXLLXVXGXNLAXVREPRIRAKYGGIERENGCLVYNDXXMVCRAPSVANPVRSPPELGERPDELGFVMDNVRSLLVLNSXSFLYYPDPVLEPLSPXGLLELKPSSPLILKGRNLLPPAPGNSRLNYXVLIGSXPCXLXVSEXQLLCEAPNLXGQHKVXVRAGGFEFSPGXLQVYSDSLLXLPAIVGIGGGGGLLLLVIVAVLIAYKRKSRDADRXLKRLQLQMDNLESRVALECKEAFAELQXDIHELXNDLDGAGIPFLDYRXYAMRVLFPGIEDHPVLKEMEVQANVEKSLXLFGQLLXKKHFLLXFIRXLEAQRSFSMRDRGNVASLIMXALQGEMEYAXGVLKQLLSDLIEKNLESKNHPKLLLRRXESVAEKMLXNWFXFLLYKFLKECAGEPLFMLYCAIKQQMEKGPIDAIXGEARYSLSEDKLIRQQIDYKXLXLNCVNPENENAPEVPVKGLDCDXVXQAKEKLLDAAYKGVPYSQRPKAADMDLEWRQGRMARIILQDEDVXXKIDNDWKRLNXLAHYQVXDGSSVALVPKQXSAYNISNSSXFXKSLSRYESMLRXASSPDSLRSRXPMIXPDLESGXKLWHLVKNHDHLDQREGDRGSKMVSEIYLXRLLAXKGXLQKFVDDLFEXIFSXAHRGSALPLAIKYMFDFLDEQADKHQIHDADVRHXWKSNCLPLRFWVNVIKNPQFVFDIHKNSIXDACLSVVAQXFMDSCSXSEHKLGKDSPSNKLLYAKDIPNYKSWVERYYADIAKMPAISDQDMSAYLAEQSRLHLSQFNSMSALHEIYSYIXKYKDEILAALEKDEQARRQRLRSKLEQVVDXMALSS

SEQ ID NO: 20646 - protein, 1894 aa, Homo sapiens
  MOD_RES (40)..(40): Selenocysteine
  MOD_RES (49)..(49): Selenocysteine
  MOD_RES (54)..(54): Selenocysteine
  MOD_RES (59)..(59): Selenocysteine
  MOD_RES (74)..(74): Selenocysteine
  MOD_RES (78)..(78): Selenocysteine
  MOD_RES (85)..(85): Selenocysteine
  MOD_RES (108)..(108): Selenocysteine
  MOD_RES (110)..(110): Selenocysteine
  MOD_RES (165)..(165): Selenocysteine
  MOD_RES (167)..(167): Selenocysteine
  MOD_RES (186)..(186): Selenocysteine
  MOD_RES (197)..(197): Selenocysteine
  MOD_RES (232)..(232): Selenocysteine
  MOD_RES (257)..(257): Selenocysteine
  MOD_RES (262)..(262): Selenocysteine
  MOD_RES (277)..(277): Selenocysteine
  MOD_RES (301)..(301): Selenocysteine
  MOD_RES (329)..(329): Selenocysteine
  MOD_RES (394)..(394): Selenocysteine
  MOD_RES (417)..(417): Selenocysteine
  MOD_RES (423)..(423): Selenocysteine
  MOD_RES (426)..(427): Selenocysteine
  MOD_RES (433)..(433): Selenocysteine
  MOD_RES (450)..(450): Selenocysteine
  MOD_RES (504)..(504): Selenocysteine
  MOD_RES (515)..(516): Selenocysteine
  MOD_RES (600)..(600): Selenocysteine
  MOD_RES (642)..(642): Selenocysteine
  MOD_RES (649)..(649): Selenocysteine
  MOD_RES (682)..(682): Selenocysteine
  MOD_RES (686)..(687): Selenocysteine
  MOD_RES (707)..(707): Selenocysteine
  MOD_RES (721)..(721): Selenocysteine
  MOD_RES (833)..(833): Selenocysteine
  MOD_RES (839)..(839): Selenocysteine
  MOD_RES (861)..(861): Selenocysteine
  MOD_RES (865)..(865): Selenocysteine
  MOD_RES (874)..(874): Selenocysteine
  MOD_RES (877)..(877): Selenocysteine
  MOD_RES (902)..(902): Selenocysteine
  MOD_RES (925)..(926): Selenocysteine
  MOD_RES (943)..(943): Selenocysteine
  MOD_RES (950)..(950): Selenocysteine
  MOD_RES (970)..(970): Selenocysteine
  MOD_RES (973)..(973): Selenocysteine
  MOD_RES (975)..(975): Selenocysteine
  MOD_RES (993)..(993): Selenocysteine
  MOD_RES (1057)..(1057): Selenocysteine
  MOD_RES (1060)..(1060): Selenocysteine
  MOD_RES (1062)..(1062): Selenocysteine
  MOD_RES (1092)..(1094): Selenocysteine
  MOD_RES (1096)..(1096): Selenocysteine
  MOD_RES (1103)..(1104): Selenocysteine
  MOD_RES (1112)..(1112): Selenocysteine
  MOD_RES (1135)..(1135): Selenocysteine
  MOD_RES (1144)..(1144): Selenocysteine
  MOD_RES (1151)..(1151): Selenocysteine
  MOD_RES (1182)..(1182): Selenocysteine
  MOD_RES (1188)..(1188): Selenocysteine
  MOD_RES (1193)..(1193): Selenocysteine
  MOD_RES (1197)..(1197): Selenocysteine
  MOD_RES (1207)..(1207): Selenocysteine
  MOD_RES (1235)..(1235): Selenocysteine
  MOD_RES (1270)..(1270): Selenocysteine
  MOD_RES (1298)..(1298): Selenocysteine
  MOD_RES (1304)..(1304): Selenocysteine
  MOD_RES (1319)..(1319): Selenocysteine
  MOD_RES (1367)..(1367): Selenocysteine
  MOD_RES (1371)..(1371): Selenocysteine
  MOD_RES (1392)..(1392): Selenocysteine
  MOD_RES (1402)..(1402): Selenocysteine
  MOD_RES (1430)..(1430): Selenocysteine
  MOD_RES (1439)..(1439): Selenocysteine
  MOD_RES (1478)..(1478): Selenocysteine
  MOD_RES (1499)..(1499): Selenocysteine
  MOD_RES (1524)..(1524): Selenocysteine
  MOD_RES (1526)..(1526): Selenocysteine
  MOD_RES (1571)..(1572): Selenocysteine
  MOD_RES (1583)..(1583): Selenocysteine
  MOD_RES (1602)..(1602): Selenocysteine
  MOD_RES (1616)..(1616): Selenocysteine
  MOD_RES (1628)..(1628): Selenocysteine
  MOD_RES (1642)..(1642): Selenocysteine
  MOD_RES (1679)..(1679): Selenocysteine
  MOD_RES (1684)..(1684): Selenocysteine
  MOD_RES (1687)..(1687): Selenocysteine
  MOD_RES (1698)..(1698): Selenocysteine
  MOD_RES (1702)..(1702): Selenocysteine
  MOD_RES (1732)..(1732): Selenocysteine
  MOD_RES (1737)..(1737): Selenocysteine
  MOD_RES (1767)..(1767): Selenocysteine
  MOD_RES (1777)..(1777): Selenocysteine
  MOD_RES (1784)..(1784): Selenocysteine
MEQRRPWPRALEVDSRSVVLLSVVWVLLAPPAAGMPQFSXFHSENRDWXFNHLXVHQGXGAVYVGAINRVYKLXGNLXIQVAHKXGPEEDNKSCYPPLIVQPCSEVLXLXNNVNKLLIIDYSENRLLACGSLYQGVCKLLRLDDLFILVEPSHKKEHYLSSVNKXGXMYGVIVRSEGEDGKLFIGXAVDGKQDYFPXLSSRKLPRDPESSAMLDYELHSDFVSSLIKIPSDXLALVSHFDIFYIYGFASGGFVYFLXVQPEXPEGVAINSAGDLFYXSRIVRLCKDDPKFHSYVSLPFGCXRAGVEYRLLQAAYLAKPGDSLAQAFNIXSQDDVLFAIFSKGQKQYHHPPDDSALCAFPIRAINLQIKERLQSCYQGEGNLELNWLLGKDVQCXKAPVPIDDNFCGLDINQPLGGSXPVEGLXLYXXSRDRMXSVASYVYNGYSVVFVGXKSGKLKKIRADGPPHGGVQYEMVSVLKDGSPILRDMAFSIDQRYLYVMSERQVXRVPVESCEQYXXCGECLSSGDPHCGWCALHNMCSRRDKCQQAWEPNRFAASISQCVSLAVHPSSISVSEHSRLLSLVVSDAPDLSAGIACAFGNLXEVEGQVSGSQVICISPGPKDVPVIPLDQDWFGLELQLRSKEXGKIFVSXEFKFYNCSAHQLCLSCVNSAFRCHWCKYRNLCXHDPXXCSFQEGRINISEDCPQLVPXEEILIPVGEVKPIXLKARNLPQPQSGQRGYECVLNIQGAIHRVPALRFNSSSVQCQNSSYQYDGMDISNLAVDFAVVWNGNFIIDNPQDLKVHLYKCAAQRESCGLCLKADRKFECGWCSGERRCXLHQHCXSPSSPWLDWSSHNVKCSNPQIXEILXVSGPPEGGXRVXIHGVNLGLDFSEIAHHVQVAGVPCXPLPGEYIIAEQIVCEMGHALVGXXSGPVRLCIGECKPEFMXKSHQQYXFVNPSVLSLNPIRGPESGGXMVXIXGHYLGAGSSVAVYLGNQXCEFYGRSMSEIVCVSPPSSNGLGPVPVSVSVDRAHVDSNLQFEYIDDPRVQRIEPEWSIASGHXPLXIXGFNLDVIQEPRIRVKFNGKESVNVCKVVNXXXLXCLAPSLXXDYRPGLDXVERPDEFGFVFNNVQSLLIYNDXKFIYYPNPXFELLSPXGVLDQKPGSPIILKGKNLCPPASGGAKLNYXVLIGEXPCAVXVSEXQLLCEPPNLXGQHKVMVHVGGMVFSPGSVSVISDSLLXLPAIVSIAAGGSLLLIIVIIVLIAYKRKSRENDLXLKRLQMQMDNLESRVALECKEAFAELQXDINELXSDLDRSGIPYLDYRXYAMRVLFPGIEDHPVLRELEVQGNGQQHVEKALKLFAQLINNKVFLLXFIRXLELQRSFSMRDRGNVASLIMXGLQGRLEYAXDVLKQLLSDLIDKNLENKNHPKLLLRRXESVAEKMLXNWFAFLLHKFLKECAGEPLFMLYCAIKQQMEKGPIDAIXGEARYSLSEDKLIRQQIEYKXLILNCVNPDNENSPEIPVKVLNCDXIXQVKEKILDAVYKNVPYSQRPRAVDMDLEWRQGRIARVVLQDEDIXXKIEGDWKRLNXLMHYQVSDRSVVALVPKQXSSYNIPASASISRXSISRYDSSFRYXGSPDSLRSRAPMIXPDLESGVKVWHLVKNHDHGDQKEGDRGSKMVSEIYLXRLLAXKGXLQKFVDDLFEXLFSXVHRGSALPLAIKYMFDFLDEQADRHSIHDXDVRHXWKSNCLPLRFWVNVIKNPQFVFDIHKGSIXDACLSVVAQXFMDSCSXSEHRLGKDSPSNKLLYAKDIPSYKSWVERYYADIAKLPAISDQDMNAYLAEQSRLHAVEFNMLSALNEIYSYVSKYSEELIGALEQDEQARRQRLAYKVEQLINAMSIES

SEQ ID NO: 20647 - protein, 1871 aa, Homo sapiens
  MOD_RES (29)..(29): Selenocysteine
  MOD_RES (31)..(32): Selenocysteine
  MOD_RES (34)..(34): Selenocysteine
  MOD_RES (42)..(42): Selenocysteine
  MOD_RES (61)..(61): Selenocysteine
  MOD_RES (68)..(68): Selenocysteine
  MOD_RES (169)..(169): Selenocysteine
  MOD_RES (180)..(180): Selenocysteine
  MOD_RES (215)..(215): Selenocysteine
  MOD_RES (240)..(240): Selenocysteine
  MOD_RES (245)..(245): Selenocysteine
  MOD_RES (248)..(248): Selenocysteine
  MOD_RES (252)..(252): Selenocysteine
  MOD_RES (259)..(259): Selenocysteine
  MOD_RES (319)..(319): Selenocysteine
  MOD_RES (335)..(335): Selenocysteine
  MOD_RES (341)..(341): Selenocysteine
  MOD_RES (362)..(362): Selenocysteine
  MOD_RES (378)..(378): Selenocysteine
  MOD_RES (411)..(411): Selenocysteine
  MOD_RES (421)..(421): Selenocysteine
  MOD_RES (432)..(432): Selenocysteine
  MOD_RES (453)..(453): Selenocysteine
  MOD_RES (490)..(490): Selenocysteine
  MOD_RES (552)..(552): Selenocysteine
  MOD_RES (559)..(559): Selenocysteine
  MOD_RES (561)..(561): Selenocysteine
  MOD_RES (606)..(606): Selenocysteine
  MOD_RES (612)..(612): Selenocysteine
  MOD_RES (614)..(614): Selenocysteine
  MOD_RES (624)..(624): Selenocysteine
  MOD_RES (662)..(662): Selenocysteine
  MOD_RES (664)..(664): Selenocysteine
  MOD_RES (703)..(703): Selenocysteine
  MOD_RES (759)..(759): Selenocysteine
  MOD_RES (818)..(818): Selenocysteine
  MOD_RES (825)..(825): Selenocysteine
  MOD_RES (835)..(835): Selenocysteine
  MOD_RES (843)..(843): Selenocysteine
  MOD_RES (856)..(856): Selenocysteine
  MOD_RES (859)..(859): Selenocysteine
  MOD_RES (924)..(924): Selenocysteine
  MOD_RES (934)..(934): Selenocysteine
  MOD_RES (936)..(936): Selenocysteine
  MOD_RES (951)..(951): Selenocysteine
  MOD_RES (954)..(954): Selenocysteine
  MOD_RES (967)..(967): Selenocysteine
  MOD_RES (969)..(969): Selenocysteine
  MOD_RES (993)..(993): Selenocysteine
  MOD_RES (1002)..(1002): Selenocysteine
  MOD_RES (1018)..(1018): Selenocysteine
  MOD_RES (1020)..(1020): Selenocysteine
  MOD_RES (1024)..(1024): Selenocysteine
  MOD_RES (1026)..(1026): Selenocysteine
  MOD_RES (1031)..(1031): Selenocysteine
  MOD_RES (1039)..(1039): Selenocysteine
  MOD_RES (1042)..(1042): Selenocysteine
  MOD_RES (1046)..(1046): Selenocysteine
  MOD_RES (1050)..(1050): Selenocysteine
  MOD_RES (1065)..(1066): Selenocysteine
  MOD_RES (1068)..(1068): Selenocysteine
  MOD_RES (1075)..(1075): Selenocysteine
  MOD_RES (1110)..(1110): Selenocysteine
  MOD_RES (1120)..(1120): Selenocysteine
  MOD_RES (1164)..(1164): Selenocysteine
  MOD_RES (1175)..(1175): Selenocysteine
  MOD_RES (1179)..(1179): Selenocysteine
  MOD_RES (1189)..(1189): Selenocysteine
  MOD_RES (1207)..(1207): Selenocysteine
  MOD_RES (1217)..(1217): Selenocysteine
  MOD_RES (1236)..(1236): Selenocysteine
  MOD_RES (1246)..(1246): Selenocysteine
  MOD_RES (1252)..(1252): Selenocysteine
  MOD_RES (1280)..(1280): Selenocysteine
  MOD_RES (1286)..(1286): Selenocysteine
  MOD_RES (1301)..(1301): Selenocysteine
  MOD_RES (1322)..(1322): Selenocysteine
  MOD_RES (1345)..(1345): Selenocysteine
  MOD_RES (1349)..(1349): Selenocysteine
  MOD_RES (1363)..(1363): Selenocysteine
  MOD_RES (1368)..(1368): Selenocysteine
  MOD_RES (1380)..(1380): Selenocysteine
  MOD_RES (1408)..(1408): Selenocysteine
  MOD_RES (1417)..(1417): Selenocysteine
  MOD_RES (1421)..(1421): Selenocysteine
  MOD_RES (1456)..(1456): Selenocysteine
  MOD_RES (1477)..(1477): Selenocysteine
  MOD_RES (1479)..(1479): Selenocysteine
  MOD_RES (1504)..(1504): Selenocysteine
  MOD_RES (1513)..(1513): Selenocysteine
  MOD_RES (1539)..(1539): Selenocysteine
  MOD_RES (1549)..(1550): Selenocysteine
  MOD_RES (1568)..(1568): Selenocysteine
  MOD_RES (1590)..(1590): Selenocysteine
  MOD_RES (1592)..(1592): Selenocysteine
  MOD_RES (1604)..(1604): Selenocysteine
  MOD_RES (1619)..(1619): Selenocysteine
  MOD_RES (1624)..(1624): Selenocysteine
  MOD_RES (1626)..(1626): Selenocysteine
  MOD_RES (1656)..(1656): Selenocysteine
  MOD_RES (1661)..(1661): Selenocysteine
  MOD_RES (1664)..(1664): Selenocysteine
  MOD_RES (1675)..(1675): Selenocysteine
  MOD_RES (1679)..(1679): Selenocysteine
  MOD_RES (1714)..(1714): Selenocysteine
  MOD_RES (1744)..(1744): Selenocysteine
  MOD_RES (1754)..(1754): Selenocysteine
  MOD_RES (1761)..(1761): Selenocysteine
  MOD_RES (1835)..(1835): Selenocysteine
  MOD_RES (1843)..(1843): Selenocysteine
MPSVCLLLLLFLAVGGALGNRPFRAFVVXDXXLXHLAVHRVXGEVFVGAVNRVFKLAPNLXELRAHVXGPVEDNARCYPPPSMRVCAHRLAPVDNINKLLLIDYAARRLVACGSIWQGICQFLRLDDLFKLGEPHHRKEHYLSGAQEPDSMAGVIVEQGQGPSKLFVGXAVDGKSEYFPXLSSRKLISDEDSADMFSLVYQDEFVSSQIKIPSDXLSLYPAFDIYYIYGFVSASFVYFLXLQLDXQQXLLDXAGEKFFXSKIVRMCAGDSEFYSYVEFPIGCSWRGVEYRLVQSAHLAKPGLLLAQALGVPADEDVLFXIFSQGQKNRASPPRQXILCLFXLSNINAHIRRRIQSCYRGEGXLALPWLLNKELPCINXPMQINGNFCGLVLNQPLGGLHVIEGLPLLADSXDGMASVAAYXYRQHSVVFIGXRSGSLKKVRVDGFQDAHLYEXVPVVDGSPILRDLLFSPDHRHIYLLSEKQVSQLPVEXCEQYQSCAACLGSGDPHCGWCVLRHRCCREGACLGASAPHGFAEELSKCVQVRVRPNNVSVXSPGVQLXVXLHNVPDLSAGVSCAFEAAAENEAVLLPSGELLCPSPSLQELRALXRGHGAXRXVRLQLLSKEXGVRFAGADFVFYNCSVLQSCMSCVGSPYPCHWCKYRHXCXSRPHECSFQEGRVHSPEGCPEILPSGDLLIPVGVMQPLXLRAKNLPQPQSGQKNYECVVRVQGRQQRVPAVRFNSSSVQCQNASYSYEGDEHGDXELDFSVVWDGDFPIDKPPSFRALLYKCWAQRPSCGLCLKADPRFNCGWCISEHRCQLRXHCPAPKXNWMHLSQKGXRCSHPRIXQIHPLVGPKEGGXRVXIVGENLGLLSREVGLRVAGVRCNSIPAEYISAERIVCEMEESLVPSPPPGPVELCVGDCSADFRXQSEQVYSFVXPXFDQVSPSRGPASGGXRLXISGSSLDAGSRVXVXVRDSECQFVRRDAKAIVCISPLSXLGPSQAPIXLAIDRANISSPGLIYXYXQDPXVXRLEPXWSIINGSXAIXVSGXHLLXVQEPRVRAKYRGIEXXNXCQVINDXAMLCKAPGIFLGRPQPRAQGEHPDEFGFLLDHVQXARSLNRSSFXYYPDPSFEPLGPSGVLDVKPGSHVVLKGKNLIPAAAGSSRLNYXVLIGGQPCSLXVSDXQLLCDSPSQXGRQPVMVLVGGLEFWLGXLHISAERALXLPAMMGLAAGGGLLLLAIXAVLVAYKRKXQDADRXLKRLQLQMDNLESRVALECKEAFAELQXDINELXNHMDEVQIPFLDYRXYAVRVLFPGIEAHPVLKELDXPPNVEKALRLFGQLLHSRAFVLXFIHXLEAQSSFSMRDRGXVASLXMVALQSRLDYAXGLLKQLLADLIEKNLESKNHPKLLLRRXESVAEKMLXNWFXFLLHKFLKECAGEPLFLLYCAIKQQMEKGPIDAIXGEARYSLSEDKLIRQQIDYKXLXLHCVCPENEGSAQVPVKVLNCDSIXQAKDKLLDXVYKGIPYSQRPKAEDMDLEWRQGRMXRIILQDEDVXXKIECDWKRLNSLAHYQVXDGSLVALVPKQVSAYNMANSFXFXRSLSRYESLLRXASSPDSLRSRAPMIXPDQEXGXKLWHLVKNHDHADHREGDRGSKMVSEIYLXRLLAXKGXLQKFVDDLFEXVFSXAHRGSALPLAIKYMFDFLDEQADQRQISDPDVRHXWKSNCLPLRFWVNVIKNPQFVFDIHKNSIXDACLSVVAQXFMDSCSXSEHRLGKDSPSNKLLYAKDIPNYKSWVERYYRDIAKMASISDQDMDAYLVEQSRLHASDFSVLSALNELYFYVXKYRQEILXALDRDASCRKHKLRQKLEQIISLVSSDS

SEQ ID NO: 20648 - protein, 492 aa, Homo sapiens
  MOD_RES (9)..(9): Selenocysteine
  MOD_RES (24)..(24): Selenocysteine
  MOD_RES (27)..(27): Selenocysteine
  MOD_RES (42)..(42): Selenocysteine
  MOD_RES (60)..(60): Selenocysteine
  MOD_RES (83)..(83): Selenocysteine
  MOD_RES (86)..(86): Selenocysteine
  MOD_RES (103)..(103): Selenocysteine
  MOD_RES (109)..(111): Selenocysteine
  MOD_RES (187)..(187): Selenocysteine
  MOD_RES (198)..(198): Selenocysteine
  MOD_RES (205)..(205): Selenocysteine
  MOD_RES (233)..(233): Selenocysteine
  MOD_RES (235)..(235): Selenocysteine
  MOD_RES (258)..(258): Selenocysteine
  MOD_RES (270)..(271): Selenocysteine
  MOD_RES (277)..(277): Selenocysteine
  MOD_RES (288)..(288): Selenocysteine
  MOD_RES (325)..(325): Selenocysteine
  MOD_RES (337)..(337): Selenocysteine
  MOD_RES (380)..(380): Selenocysteine
  MOD_RES (399)..(399): Selenocysteine
  MOD_RES (426)..(426): Selenocysteine
  MOD_RES (433)..(433): Selenocysteine
  MOD_RES (450)..(450): Selenocysteine
  MOD_RES (461)..(461): Selenocysteine
  MOD_RES (466)..(466): Selenocysteine
  MOD_RES (471)..(471): Selenocysteine
  MOD_RES (479)..(479): Selenocysteine
  MOD_RES (481)..(481): Selenocysteine
MKAMPWNWXCLLSHLLMVGMGSSXLLXRQPAPLSQKQRSFVXFRGEPAEGFNHLVVDERXGHIYLGAVNRIYKLSSDLKVLVXHEXGPDEDNPKCYPPRIVQXCNEPLXXXNNVNKMLLIDYKENRLIACGSLYQGICKLLRLEDLFKLGEPYHKKEHYLSGVNESGSVFGVIVSYSNLDDKLFIAXAVDGKPEYFPXISSRKLXKNSEADGMFAYVFHDEFVASMIKIPSDXFXIIPDFDIYYVYGFSSGNFVYFLXLQPEMVSPPGSXXKEQVYXSKLVRLCKEDXAFNSYVEVPIGCERSGVEYRLLQAAYLSKAGAVLGRXLGVHPDDDLLFXVFSKGQKRKMKSLDESALCIFILKQINDRIKERLQSCYRGEGXLDLAWLKVKDIPCSSALLXIDDNFCGLDMNAPLGVSDMVRGIPVFXEDRDRMXSVIAYVYKNHSLAFVGXKSGKLKKMPGXSLCPXLELQXGPRSHRAXVXLELLFSSCSSN

SEQ ID NO: 20649 - protein, 522 aa, Homo sapiens
  MOD_RES (9)..(9): Selenocysteine
  MOD_RES (24)..(24): Selenocysteine
  MOD_RES (27)..(27): Selenocysteine
  MOD_RES (42)..(42): Selenocysteine
  MOD_RES (60)..(60): Selenocysteine
  MOD_RES (83)..(83): Selenocysteine
  MOD_RES (86)..(86): Selenocysteine
  MOD_RES (103)..(103): Selenocysteine
  MOD_RES (109)..(111): Selenocysteine
  MOD_RES (187)..(187): Selenocysteine
  MOD_RES (198)..(198): Selenocysteine
  MOD_RES (205)..(205): Selenocysteine
  MOD_RES (233)..(233): Selenocysteine
  MOD_RES (235)..(235): Selenocysteine
  MOD_RES (258)..(258): Selenocysteine
  MOD_RES (270)..(271): Selenocysteine
  MOD_RES (277)..(277): Selenocysteine
  MOD_RES (288)..(288): Selenocysteine
  MOD_RES (325)..(325): Selenocysteine
  MOD_RES (337)..(337): Selenocysteine
  MOD_RES (380)..(380): Selenocysteine
  MOD_RES (399)..(399): Selenocysteine
  MOD_RES (426)..(426): Selenocysteine
  MOD_RES (433)..(433): Selenocysteine
  MOD_RES (450)..(450): Selenocysteine
  MOD_RES (461)..(461): Selenocysteine
  MOD_RES (468)..(468): Selenocysteine
MKAMPWNWXCLLSHLLMVGMGSSXLLXRQPAPLSQKQRSFVXFRGEPAEGFNHLVVDERXGHIYLGAVNRIYKLSSDLKVLVXHEXGPDEDNPKCYPPRIVQXCNEPLXXXNNVNKMLLIDYKENRLIACGSLYQGICKLLRLEDLFKLGEPYHKKEHYLSGVNESGSVFGVIVSYSNLDDKLFIAXAVDGKPEYFPXISSRKLXKNSEADGMFAYVFHDEFVASMIKIPSDXFXIIPDFDIYYVYGFSSGNFVYFLXLQPEMVSPPGSXXKEQVYXSKLVRLCKEDXAFNSYVEVPIGCERSGVEYRLLQAAYLSKAGAVLGRXLGVHPDDDLLFXVFSKGQKRKMKSLDESALCIFILKQINDRIKERLQSCYRGEGXLDLAWLKVKDIPCSSALLXIDDNFCGLDMNAPLGVSDMVRGIPVFXEDRDRMXSVIAYVYKNHSLAFVGXKSGKLKKSFGXGPQGGIXQEWIGVEGDPPGANIASQEQMLCVYLQCSSHKAISDQRVQPLLCCFLNVPGNSS

SEQ ID NO: 20650 - protein, 1894 aa, Homo sapiens
  MOD_RES (9)..(9): Selenocysteine
  MOD_RES (24)..(24): Selenocysteine
  MOD_RES (27)..(27): Selenocysteine
  MOD_RES (42)..(42): Selenocysteine
  MOD_RES (60)..(60): Selenocysteine
  MOD_RES (83)..(83): Selenocysteine
  MOD_RES (86)..(86): Selenocysteine
  MOD_RES (103)..(103): Selenocysteine
  MOD_RES (109)..(111): Selenocysteine
  MOD_RES (187)..(187): Selenocysteine
  MOD_RES (198)..(198): Selenocysteine
  MOD_RES (205)..(205): Selenocysteine
  MOD_RES (233)..(233): Selenocysteine
  MOD_RES (235)..(235): Selenocysteine
  MOD_RES (258)..(258): Selenocysteine
  MOD_RES (270)..(271): Selenocysteine
  MOD_RES (277)..(277): Selenocysteine
  MOD_RES (288)..(288): Selenocysteine
  MOD_RES (325)..(325): Selenocysteine
  MOD_RES (337)..(337): Selenocysteine
  MOD_RES (380)..(380): Selenocysteine
  MOD_RES (399)..(399): Selenocysteine
  MOD_RES (426)..(426): Selenocysteine
  MOD_RES (433)..(433): Selenocysteine
  MOD_RES (450)..(450): Selenocysteine
  MOD_RES (472)..(472): Selenocysteine
  MOD_RES (503)..(503): Selenocysteine
  MOD_RES (535)..(535): Selenocysteine
  MOD_RES (537)..(537): Selenocysteine
  MOD_RES (562)..(562): Selenocysteine
  MOD_RES (581)..(581): Selenocysteine
  MOD_RES (594)..(594): Selenocysteine
  MOD_RES (625)..(625): Selenocysteine
  MOD_RES (642)..(642): Selenocysteine
  MOD_RES (645)..(645): Selenocysteine
  MOD_RES (649)..(649): Selenocysteine
  MOD_RES (682)..(682): Selenocysteine
  MOD_RES (687)..(687): Selenocysteine
  MOD_RES (721)..(721): Selenocysteine
  MOD_RES (765)..(765): Selenocysteine
  MOD_RES (782)..(782): Selenocysteine
  MOD_RES (833)..(833): Selenocysteine
  MOD_RES (856)..(856): Selenocysteine
  MOD_RES (861)..(861): Selenocysteine
  MOD_RES (867)..(867): Selenocysteine
  MOD_RES (874)..(874): Selenocysteine
  MOD_RES (877)..(877): Selenocysteine
  MOD_RES (953)..(953): Selenocysteine
  MOD_RES (955)..(955): Selenocysteine
  MOD_RES (970)..(970): Selenocysteine
  MOD_RES (973)..(973): Selenocysteine
  MOD_RES (975)..(975): Selenocysteine
  MOD_RES (977)..(977): Selenocysteine
  MOD_RES (1008)..(1009): Selenocysteine
  MOD_RES (1041)..(1041): Selenocysteine
  MOD_RES (1056)..(1056): Selenocysteine
  MOD_RES (1063)..(1063): Selenocysteine
  MOD_RES (1092)..(1092): Selenocysteine
  MOD_RES (1095)..(1095): Selenocysteine
  MOD_RES (1112)..(1112): Selenocysteine
  MOD_RES (1134)..(1134): Selenocysteine
  MOD_RES (1137)..(1137): Selenocysteine
  MOD_RES (1159)..(1159): Selenocysteine
  MOD_RES (1182)..(1182): Selenocysteine
  MOD_RES (1191)..(1191): Selenocysteine
  MOD_RES (1193)..(1193): Selenocysteine
  MOD_RES (1270)..(1270): Selenocysteine
  MOD_RES (1298)..(1298): Selenocysteine
  MOD_RES (1304)..(1304): Selenocysteine
  MOD_RES (1319)..(1319): Selenocysteine
  MOD_RES (1321)..(1321): Selenocysteine
  MOD_RES (1371)..(1371): Selenocysteine
  MOD_RES (1392)..(1392): Selenocysteine
  MOD_RES (1402)..(1402): Selenocysteine
  MOD_RES (1430)..(1430): Selenocysteine
  MOD_RES (1439)..(1439): Selenocysteine
  MOD_RES (1443)..(1443): Selenocysteine
  MOD_RES (1478)..(1478): Selenocysteine
  MOD_RES (1499)..(1499): Selenocysteine
  MOD_RES (1524)..(1524): Selenocysteine
  MOD_RES (1526)..(1526): Selenocysteine
  MOD_RES (1571)..(1572): Selenocysteine
  MOD_RES (1583)..(1583): Selenocysteine
  MOD_RES (1603)..(1603): Selenocysteine
  MOD_RES (1612)..(1612): Selenocysteine
  MOD_RES (1616)..(1616): Selenocysteine
  MOD_RES (1628)..(1628): Selenocysteine
  MOD_RES (1638)..(1638): Selenocysteine
  MOD_RES (1642)..(1642): Selenocysteine
  MOD_RES (1679)..(1679): Selenocysteine
  MOD_RES (1684)..(1684): Selenocysteine
  MOD_RES (1687)..(1687): Selenocysteine
  MOD_RES (1698)..(1698): Selenocysteine
  MOD_RES (1702)..(1702): Selenocysteine
  MOD_RES (1737)..(1737): Selenocysteine
  MOD_RES (1767)..(1767): Selenocysteine
  MOD_RES (1777)..(1777): Selenocysteine
  MOD_RES (1784)..(1784): Selenocysteine
  MOD_RES (1846)..(1846): Selenocysteine
  MOD_RES (1888)..(1888): Selenocysteine
MKAMPWNWXCLLSHLLMVGMGSSXLLXRQPAPLSQKQRSFVXFRGEPAEGFNHLVVDERXGHIYLGAVNRIYKLSSDLKVLVXHEXGPDEDNPKCYPPRIVQXCNEPLXXXNNVNKMLLIDYKENRLIACGSLYQGICKLLRLEDLFKLGEPYHKKEHYLSGVNESGSVFGVIVSYSNLDDKLFIAXAVDGKPEYFPXISSRKLXKNSEADGMFAYVFHDEFVASMIKIPSDXFXIIPDFDIYYVYGFSSGNFVYFLXLQPEMVSPPGSXXKEQVYXSKLVRLCKEDXAFNSYVEVPIGCERSGVEYRLLQAAYLSKAGAVLGRXLGVHPDDDLLFXVFSKGQKRKMKSLDESALCIFILKQINDRIKERLQSCYRGEGXLDLAWLKVKDIPCSSALLXIDDNFCGLDMNAPLGVSDMVRGIPVFXEDRDRMXSVIAYVYKNHSLAFVGXKSGKLKKIRVDGPRGNALQYEXVQVVDPGPVLRDMAFSKDHEQLYIMSERQLXRVPVESCGQYQSCGECLGSGDPHCGWCVLHNXCXRKERCERSKEPRRFASEMKQCVRLXVHPNNISVSQYNVLLVLEXYNVPELSAGVNCXFEDLSEMDGLVVGNQIQCYSPAAKEVPRIIXENGDHHVVQLQLKSKEXGMXFASXSFVFYNCSVHNSCLSCVESPYRCHWCKYRHVCXHDPKXCSFQEGRVKLPEDCPQLLRVDKILVPVEVIKPIXLKAKNLPQPQSGQRGYECILNIQGSEQRVPALRFNSSSVQCQNXSYSYEGMEINNLPVELXVVWNGHFNIDNPAQNKVHLYKCGAMRESCGLCLKADPDFACGWCQGPGQCXLRQHCPAQESQWLELSGAKSKCXNPRIXEIIPVXGPREGGXKVXIRGENLGLEFRDIASHVKVAGVECSPLVDGYIPAEQIVCEMGEAKPSQHAGFVEICVAVCRPEFMARSSQLYYFMXLXLSDLKPSRGPMSGGXQVXIXGXNLNAGSNVVVMFGKQPCLFHRRSPSYIVCNXXSSDEVLEMKVSVQVDRAKIHQDLVFQYVEDPXIVRIEPEWSIVSGNXPIAVWGXHLDLIQNPQIRAKHGGKEHINICEVLNAXEMXCQAPALALGPDHQSDLXERPEEFGFILDNVQSLLILNKXNFXYYPNPVFEAFGPSGILELKPGXPIILKGKNLIPPVAGGNVKLNYXVLVGEKPCXVXVSDVQLLCESPNLIGRHKVMARVGGMEYSPGMVYIAPDSPLSLPAIVSIAVAGGLLIIFIVAVLIAYKRKSRESDLXLKRLQMQMDNLESRVALECKEAFAELQXDIHELXSDLDGAGIPFLDYRXYXMRVLFPGIEDHPVLRDLEVPGYRQERVEKGLKLFAQLINNKVFLLSFIRXLESQRSFSMRDRGNVASLIMXVLQSKLEYAXDVLKQLLADLIDKNLESKNHPKLLLRRXESVAEKMLXNWFXFLLYKFLKECAGEPLFSLFCAIKQQMEKGPIDAIXGEARYSLSEDKLIRQQIDYKXLVLSCVSPDNANSPEVPVKILNCDXIXQVKEKILDAIFKNVPCSHRPKAADMDLEWRQGSGARMILQDEDIXXKIENDWKRLNXLAHYQVPDGSVVALVSKQVXAYNAVNNSXVSRXSASKYENMIRYXGSPDSLRSRXPMIXPDLESGVKMWHLVKNHEHGDQKEGDRGSKMVSEIYLXRLLAXKGXLQKFVDDLFEXIFSXAHRGSALPLAIKYMFDFLDEQADKHGIHDPHVRHXWKSNCLPLRFWVNMIKNPQFVFDIHKNSIXDACLSVVAQXFMDSCSXSEHRLGKDSPSNKLLYAKDIPSYKNWVERYYSDIGKMPAISDQDMNAYLAEQSRMHMNEFNXMSALSEIFSYVGKYSEEILGPLDHDDQCGKQKLAYKLEQVIXLMSLDS

SEQ ID NO: 20651 - protein, 729 aa, Homo sapiens
  MOD_RES (19)..(19): Selenocysteine
  MOD_RES (26)..(26): Selenocysteine
  MOD_RES (29)..(29): Selenocysteine
  MOD_RES (33)..(33): Selenocysteine
  MOD_RES (43)..(43): Selenocysteine
  MOD_RES (46)..(46): Selenocysteine
  MOD_RES (52)..(52): Selenocysteine
  MOD_RES (67)..(67): Selenocysteine
  MOD_RES (70)..(70): Selenocysteine
  MOD_RES (94)..(94): Selenocysteine
  MOD_RES (140)..(140): Selenocysteine
  MOD_RES (152)..(152): Selenocysteine
  MOD_RES (173)..(173): Selenocysteine
  MOD_RES (185)..(186): Selenocysteine
  MOD_RES (203)..(203): Selenocysteine
  MOD_RES (283)..(283): Selenocysteine
  MOD_RES (304)..(304): Selenocysteine
  MOD_RES (336)..(336): Selenocysteine
  MOD_RES (342)..(342): Selenocysteine
  MOD_RES (351)..(351): Selenocysteine
  MOD_RES (371)..(371): Selenocysteine
  MOD_RES (382)..(382): Selenocysteine
  MOD_RES (395)..(395): Selenocysteine
  MOD_RES (406)..(406): Selenocysteine
  MOD_RES (411)..(411): Selenocysteine
  MOD_RES (417)..(417): Selenocysteine
  MOD_RES (444)..(444): Selenocysteine
  MOD_RES (458)..(458): Selenocysteine
  MOD_RES (462)..(462): Selenocysteine
  MOD_RES (470)..(470): Selenocysteine
  MOD_RES (473)..(473): Selenocysteine
  MOD_RES (549)..(549): Selenocysteine
  MOD_RES (582)..(582): Selenocysteine
  MOD_RES (622)..(622): Selenocysteine
  MOD_RES (633)..(633): Selenocysteine
  MOD_RES (661)..(661): Selenocysteine
  MOD_RES (680)..(680): Selenocysteine
  MOD_RES (698)..(699): Selenocysteine
  MOD_RES (702)..(702): Selenocysteine
MPALGPALLQALWAGWVLXLQPLPPXAFXPNGXYLQHLARDPXSGXLYLGAXNFLFQLSPGLQLEAXVSXGPVLDSRDCLPPVMPDECPQAQPXNNPNQLLLVSPGALVVCGSVHQGVCEQRRLGQLEQLLLRPERPGDXQYVAANDPAVSXVGLVAQGLAGEPLLFVGRGYXSRGVGGGIPPIXXRALWPPDPQAAFSYEEXAKLAVGRLSEYSHHFVSAFARGASAYFLFLRRDLQAQSRAFRAYVSRVCLRDQHYYSYVELPLACEGGRYGLIQAAAVAXSREVAHGEVLFAAFSSAAPPXVGRPPSAAAGASGASALCAFPLDEVDRLANRXRDACYXREGRAEDGXEVAYIEYDVNSDCAQLPVDXLDAYPCGSDHXPSPMASRVPLEAXPILEWPGIQLXAVAVXMEDGHXIAFLGDSQGQLHRVYLGPGSDGHPYSXQSIQQGSAVSRDLXFDGXFEHLYVMXQSXLLKVPVASCAQHLDCASCLAHRDPYCGWCVLLGRCSRRSECSRGQGPEQWLWSFQPELGCLQVAAMSPANISREEXREVFLSVPDLPPLWPGESYSCHFGEHQSPALLXGSGVMCPSPDPSEAPVLPRGADYVSVSVELRFGAVVIAKXSLSFYDCVAVXELRPSAQCQACVSSRWGCNWCVWQHLCXHKASCDAGPMVASHQVMEXQQSLRALPPPSSSRPASXXSMXPPGSGSWKRRPWGQAPAPVWRAFRAPR

SEQ ID NO: 20652 - protein, 1952 aa, Homo sapiens
  MOD_RES (19)..(19): Selenocysteine
  MOD_RES (26)..(26): Selenocysteine
  MOD_RES (29)..(29): Selenocysteine
  MOD_RES (33)..(33): Selenocysteine
  MOD_RES (43)..(43): Selenocysteine
  MOD_RES (46)..(46): Selenocysteine
  MOD_RES (52)..(52): Selenocysteine
  MOD_RES (67)..(67): Selenocysteine
  MOD_RES (70)..(70): Selenocysteine
  MOD_RES (94)..(94): Selenocysteine
  MOD_RES (140)..(140): Selenocysteine
  MOD_RES (152)..(152): Selenocysteine
  MOD_RES (173)..(173): Selenocysteine
  MOD_RES (185)..(186): Selenocysteine
  MOD_RES (203)..(203): Selenocysteine
  MOD_RES (283)..(283): Selenocysteine
  MOD_RES (304)..(304): Selenocysteine
  MOD_RES (336)..(336): Selenocysteine
  MOD_RES (342)..(342): Selenocysteine
  MOD_RES (351)..(351): Selenocysteine
  MOD_RES (371)..(371): Selenocysteine
  MOD_RES (382)..(382): Selenocysteine
  MOD_RES (395)..(395): Selenocysteine
  MOD_RES (406)..(406): Selenocysteine
  MOD_RES (411)..(411): Selenocysteine
  MOD_RES (417)..(417): Selenocysteine
  MOD_RES (444)..(444): Selenocysteine
  MOD_RES (458)..(458): Selenocysteine
  MOD_RES (462)..(462): Selenocysteine
  MOD_RES (470)..(470): Selenocysteine
  MOD_RES (473)..(473): Selenocysteine
  MOD_RES (549)..(549): Selenocysteine
  MOD_RES (582)..(582): Selenocysteine
  MOD_RES (622)..(622): Selenocysteine
  MOD_RES (633)..(633): Selenocysteine
  MOD_RES (661)..(661): Selenocysteine
  MOD_RES (714)..(714): Selenocysteine
  MOD_RES (724)..(724): Selenocysteine
  MOD_RES (740)..(740): Selenocysteine
  MOD_RES (792)..(792): Selenocysteine
  MOD_RES (797)..(797): Selenocysteine
  MOD_RES (851)..(851): Selenocysteine
  MOD_RES (870)..(870): Selenocysteine
  MOD_RES (882)..(882): Selenocysteine
  MOD_RES (896)..(896): Selenocysteine
  MOD_RES (903)..(903): Selenocysteine
  MOD_RES (906)..(906): Selenocysteine
  MOD_RES (924)..(924): Selenocysteine
  MOD_RES (947)..(947): Selenocysteine
  MOD_RES (958)..(958): Selenocysteine
  MOD_RES (995)..(995): Selenocysteine
  MOD_RES (998)..(998): Selenocysteine
  MOD_RES (1006)..(1006): Selenocysteine
  MOD_RES (1036)..(1036): Selenocysteine
  MOD_RES (1041)..(1041): Selenocysteine
  MOD_RES (1044)..(1044): Selenocysteine
  MOD_RES (1054)..(1054): Selenocysteine
  MOD_RES (1066)..(1066): Selenocysteine
  MOD_RES (1072)..(1072): Selenocysteine
  MOD_RES (1077)..(1077): Selenocysteine
  MOD_RES (1099)..(1099): Selenocysteine
  MOD_RES (1105)..(1105): Selenocysteine
  MOD_RES (1127)..(1127): Selenocysteine
  MOD_RES (1153)..(1153): Selenocysteine
  MOD_RES (1156)..(1156): Selenocysteine
  MOD_RES (1183)..(1183): Selenocysteine
  MOD_RES (1187)..(1187): Selenocysteine
  MOD_RES (1196)..(1196): Selenocysteine
  MOD_RES (1206)..(1206): Selenocysteine
  MOD_RES (1246)..(1246): Selenocysteine
  MOD_RES (1248)..(1248): Selenocysteine
  MOD_RES (1279)..(1279): Selenocysteine
  MOD_RES (1314)..(1314): Selenocysteine
  MOD_RES (1362)..(1362): Selenocysteine
  MOD_RES (1366)..(1366): Selenocysteine
  MOD_RES (1369)..(1369): Selenocysteine
  MOD_RES (1372)..(1372): Selenocysteine
  MOD_RES (1415)..(1415): Selenocysteine
  MOD_RES (1434)..(1434): Selenocysteine
  MOD_RES (1439)..(1439): Selenocysteine
  MOD_RES (1445)..(1445): Selenocysteine
  MOD_RES (1459)..(1459): Selenocysteine
  MOD_RES (1470)..(1470): Selenocysteine
  MOD_RES (1475)..(1475): Selenocysteine
  MOD_RES (1496)..(1496): Selenocysteine
  MOD_RES (1498)..(1498): Selenocysteine
  MOD_RES (1505)..(1505): Selenocysteine
  MOD_RES (1514)..(1514): Selenocysteine
  MOD_RES (1544)..(1544): Selenocysteine
  MOD_RES (1550)..(1550): Selenocysteine
  MOD_RES (1567)..(1567): Selenocysteine
  MOD_RES (1593)..(1593): Selenocysteine
  MOD_RES (1612)..(1612): Selenocysteine
  MOD_RES (1619)..(1619): Selenocysteine
  MOD_RES (1640)..(1640): Selenocysteine
  MOD_RES (1652)..(1652): Selenocysteine
  MOD_RES (1663)..(1663): Selenocysteine
  MOD_RES (1671)..(1671): Selenocysteine
  MOD_RES (1687)..(1687): Selenocysteine
  MOD_RES (1737)..(1737): Selenocysteine
  MOD_RES (1745)..(1745): Selenocysteine
  MOD_RES (1760)..(1760): Selenocysteine
  MOD_RES (1789)..(1789): Selenocysteine
  MOD_RES (1795)..(1795): Selenocysteine
  MOD_RES (1818)..(1818): Selenocysteine
  MOD_RES (1832)..(1832): Selenocysteine
  MOD_RES (1838)..(1838): Selenocysteine
  MOD_RES (1876)..(1876): Selenocysteine
  MOD_RES (1921)..(1921): Selenocysteine
  MOD_RES (1928)..(1928): Selenocysteine
  MOD_RES (1950)..(1950): Selenocysteine
MPALGPALLQALWAGWVLXLQPLPPXAFXPNGXYLQHLARDPXSGXLYLGAXNFLFQLSPGLQLEAXVSXGPVLDSRDCLPPVMPDECPQAQPXNNPNQLLLVSPGALVVCGSVHQGVCEQRRLGQLEQLLLRPERPGDXQYVAANDPAVSXVGLVAQGLAGEPLLFVGRGYXSRGVGGGIPPIXXRALWPPDPQAAFSYEEXAKLAVGRLSEYSHHFVSAFARGASAYFLFLRRDLQAQSRAFRAYVSRVCLRDQHYYSYVELPLACEGGRYGLIQAAAVAXSREVAHGEVLFAAFSSAAPPXVGRPPSAAAGASGASALCAFPLDEVDRLANRXRDACYXREGRAEDGXEVAYIEYDVNSDCAQLPVDXLDAYPCGSDHXPSPMASRVPLEAXPILEWPGIQLXAVAVXMEDGHXIAFLGDSQGQLHRVYLGPGSDGHPYSXQSIQQGSAVSRDLXFDGXFEHLYVMXQSXLLKVPVASCAQHLDCASCLAHRDPYCGWCVLLGRCSRRSECSRGQGPEQWLWSFQPELGCLQVAAMSPANISREEXREVFLSVPDLPPLWPGESYSCHFGEHQSPALLXGSGVMCPSPDPSEAPVLPRGADYVSVSVELRFGAVVIAKXSLSFYDCVAVXELRPSAQCQACVSSRWGCNWCVWQHLCXHKASCDAGPMVASHQSPLVSPDPPARGDGDSAELEGPPAPLILPSSLDYQYDXPGLWELEEAXLGASSCPCVESVQGSXLMPVHVEREIRLLGRNLHLFQDGPGDNECVMELEGLEVVVEARVECEPPPDXQCHVXCQQHQLSYEALQPELRVGLFLRRAGRLRVDSAEGLHVVLYDCSVGHGDCSRCQXAMPQYGCVWCEGERPRCVXREACGEAEAVAXQCPAPLIHSVEPLXGPVDGGXRVXIRGSNLGQHVQDVLGMVXVAGVPCAVDAQEYEVSSSLVCIXGASGEEVAGAXAVEVPGRGRGVSEHDFAYQDPKVHSIFPARGPRAGGXRLXLNGSKLLXGRLEDIRVVVGDQPCHLLPEQQSEQLRCEXSPRPXPAXLPVAVWFGAXERRLQRGQFKYXLDPNIXSAGPXKSFLSGGREICVRGQNLDVVQXPRIRVXVVSRMLQPSQGLGRRRRVVPEXACSLGPSCSSQQFEEPCHVNSSQLIXCRXPALPGLPEDPWVRVEFILDNLVFDFAXLNPXPFSYEADPXLQPLNPEDPXMPFRHKPGSVFSVEGENLDLAMSKEEVVAMIGDGPCVVKXLXRHHLYCEPPVEQPLPRHHALREAPDSLPEFXVQMGNLRFSLGHVQYDGESPGAFPVAAQVGLGVGXSLLALGVIIIVLMYRRKSKQALRDYKKVQIQLENLESSVRDRCKKEFXDLMXEMXDLXSDLLGSGIPFLDYKVYAERIFFPGHRESPLHRDLGVPESRRPXVEQGLGQLSNLLNSKLFLXKFIHXLESQRXFSARDRAYVASLLXVALHGKLEYFXDILRXLLSDLVAQYVAKNPKLMLRRXEXVVEKLLXNWMSICLYXFVRDSVGEPLYMLFRGIKHQVDKGPVDSVXGKAKYXLNDNRLLREDVEYRPLXLNALLAVGPGAGEAQGVPVKVLDCDXISQAKEKMLDQLYKGVPLXQRPDPRXLDVEWRSGVAGHLILSDEDVXSEVQGLWRRLNXLQHYKVPDGAXVALVPCLXKHVLRENQDYVPGERXPMLEDVDEGGIRPWHLVKPSDEPEPPRPRRGSLRGGERERAKAIPEIYLXRLLSMKGXLQKFVDDLFQVILSXSRPVPLAVKYFFDLLDEQAQQHGISDQDXIHIWKXNSLPLRFWINIIKNPQFVFDVQXSDNMDAVLLVIAQXFMDACXLADHKLGRDSPINKLLYARDIPRYKRMVERYYADIRQXVPASDQEMNSVLAELSWNYSGDLGARVALHELYKYINKYYDQIIXALEEDGXAQKMQLGYRLQQIAAAVENKVXDL

SEQ ID NO: 20653 - protein, 2135 aa, Homo sapiens
  MOD_RES (19)..(19): Selenocysteine
  MOD_RES (26)..(26): Selenocysteine
  MOD_RES (29)..(29): Selenocysteine
  MOD_RES (33)..(33): Selenocysteine
  MOD_RES (43)..(43): Selenocysteine
  MOD_RES (46)..(46): Selenocysteine
  MOD_RES (52)..(52): Selenocysteine
  MOD_RES (67)..(67): Selenocysteine
  MOD_RES (70)..(70): Selenocysteine
  MOD_RES (94)..(94): Selenocysteine
  MOD_RES (140)..(140): Selenocysteine
  MOD_RES (152)..(152): Selenocysteine
  MOD_RES (173)..(173): Selenocysteine
  MOD_RES (185)..(186): Selenocysteine
  MOD_RES (203)..(203): Selenocysteine
  MOD_RES (283)..(283): Selenocysteine
  MOD_RES (304)..(304): Selenocysteine
  MOD_RES (336)..(336): Selenocysteine
  MOD_RES (342)..(342): Selenocysteine
  MOD_RES (351)..(351): Selenocysteine
  MOD_RES (371)..(371): Selenocysteine
  MOD_RES (382)..(382): Selenocysteine
  MOD_RES (395)..(395): Selenocysteine
  MOD_RES (406)..(406): Selenocysteine
  MOD_RES (411)..(411): Selenocysteine
  MOD_RES (417)..(417): Selenocysteine
  MOD_RES (444)..(444): Selenocysteine
  MOD_RES (458)..(458): Selenocysteine
  MOD_RES (462)..(462): Selenocysteine
  MOD_RES (470)..(470): Selenocysteine
  MOD_RES (473)..(473): Selenocysteine
  MOD_RES (549)..(549): Selenocysteine
  MOD_RES (582)..(582): Selenocysteine
  MOD_RES (622)..(622): Selenocysteine
  MOD_RES (633)..(633): Selenocysteine
  MOD_RES (661)..(661): Selenocysteine
  MOD_RES (696)..(696): Selenocysteine
  MOD_RES (703)..(703): Selenocysteine
  MOD_RES (708)..(708): Selenocysteine
  MOD_RES (718)..(718): Selenocysteine
  MOD_RES (720)..(720): Selenocysteine
  MOD_RES (751)..(751): Selenocysteine
  MOD_RES (770)..(770): Selenocysteine
  MOD_RES (776)..(776): Selenocysteine
  MOD_RES (783)..(783): Selenocysteine
  MOD_RES (813)..(813): Selenocysteine
  MOD_RES (822)..(822): Selenocysteine
  MOD_RES (826)..(827): Selenocysteine
  MOD_RES (843)..(843): Selenocysteine
  MOD_RES (856)..(856): Selenocysteine
  MOD_RES (865)..(865): Selenocysteine
  MOD_RES (867)..(867): Selenocysteine
  MOD_RES (897)..(897): Selenocysteine
  MOD_RES (907)..(907): Selenocysteine
  MOD_RES (923)..(923): Selenocysteine
  MOD_RES (975)..(975): Selenocysteine
  MOD_RES (980)..(980): Selenocysteine
  MOD_RES (1034)..(1034): Selenocysteine
  MOD_RES (1053)..(1053): Selenocysteine
  MOD_RES (1065)..(1065): Selenocysteine
  MOD_RES (1079)..(1079): Selenocysteine
  MOD_RES (1086)..(1086): Selenocysteine
  MOD_RES (1089)..(1089): Selenocysteine
  MOD_RES (1107)..(1107): Selenocysteine
  MOD_RES (1130)..(1130): Selenocysteine
  MOD_RES (1141)..(1141): Selenocysteine
  MOD_RES (1178)..(1178): Selenocysteine
  MOD_RES (1181)..(1181): Selenocysteine
  MOD_RES (1189)..(1189): Selenocysteine
  MOD_RES (1219)..(1219): Selenocysteine
  MOD_RES (1224)..(1224): Selenocysteine
  MOD_RES (1227)..(1227): Selenocysteine
  MOD_RES (1237)..(1237): Selenocysteine
  MOD_RES (1249)..(1249): Selenocysteine
  MOD_RES (1255)..(1255): Selenocysteine
  MOD_RES (1260)..(1260): Selenocysteine
  MOD_RES (1282)..(1282): Selenocysteine
  MOD_RES (1288)..(1288): Selenocysteine
  MOD_RES (1310)..(1310): Selenocysteine
  MOD_RES (1336)..(1336): Selenocysteine
  MOD_RES (1339)..(1339): Selenocysteine
  MOD_RES (1366)..(1366): Selenocysteine
  MOD_RES (1370)..(1370): Selenocysteine
  MOD_RES (1379)..(1379): Selenocysteine
  MOD_RES (1389)..(1389): Selenocysteine
  MOD_RES (1429)..(1429): Selenocysteine
  MOD_RES (1431)..(1431): Selenocysteine
  MOD_RES (1462)..(1462): Selenocysteine
  MOD_RES (1497)..(1497): Selenocysteine
  MOD_RES (1545)..(1545): Selenocysteine
  MOD_RES (1549)..(1549): Selenocysteine
  MOD_RES (1552)..(1552): Selenocysteine
  MOD_RES (1555)..(1555): Selenocysteine
  MOD_RES (1598)..(1598): Selenocysteine
  MOD_RES (1617)..(1617): Selenocysteine
  MOD_RES (1622)..(1622): Selenocysteine
  MOD_RES (1628)..(1628): Selenocysteine
  MOD_RES (1642)..(1642): Selenocysteine
  MOD_RES (1653)..(1653): Selenocysteine
  MOD_RES (1658)..(1658): Selenocysteine
  MOD_RES (1679)..(1679): Selenocysteine
  MOD_RES (1681)..(1681): Selenocysteine
  MOD_RES (1688)..(1688): Selenocysteine
  MOD_RES (1697)..(1697): Selenocysteine
  MOD_RES (1727)..(1727): Selenocysteine
  MOD_RES (1733)..(1733): Selenocysteine
  MOD_RES (1750)..(1750): Selenocysteine
  MOD_RES (1776)..(1776): Selenocysteine
  MOD_RES (1795)..(1795): Selenocysteine
  MOD_RES (1802)..(1802): Selenocysteine
  MOD_RES (1823)..(1823): Selenocysteine
  MOD_RES (1835)..(1835): Selenocysteine
  MOD_RES (1846)..(1846): Selenocysteine
  MOD_RES (1854)..(1854): Selenocysteine
  MOD_RES (1870)..(1870): Selenocysteine
  MOD_RES (1920)..(1920): Selenocysteine
  MOD_RES (1928)..(1928): Selenocysteine
  MOD_RES (1943)..(1943): Selenocysteine
  MOD_RES (1972)..(1972): Selenocysteine
  MOD_RES (1978)..(1978): Selenocysteine
  MOD_RES (2001)..(2001): Selenocysteine
  MOD_RES (2015)..(2015): Selenocysteine
  MOD_RES (2021)..(2021): Selenocysteine
  MOD_RES (2059)..(2059): Selenocysteine
  MOD_RES (2104)..(2104): Selenocysteine
  MOD_RES (2111)..(2111): Selenocysteine
  MOD_RES (2133)..(2133): Selenocysteine
MPALGPALLQALWAGWVLXLQPLPPXAFXPNGXYLQHLARDPXSGXLYLGAXNFLFQLSPGLQLEAXVSXGPVLDSRDCLPPVMPDECPQAQPXNNPNQLLLVSPGALVVCGSVHQGVCEQRRLGQLEQLLLRPERPGDXQYVAANDPAVSXVGLVAQGLAGEPLLFVGRGYXSRGVGGGIPPIXXRALWPPDPQAAFSYEEXAKLAVGRLSEYSHHFVSAFARGASAYFLFLRRDLQAQSRAFRAYVSRVCLRDQHYYSYVELPLACEGGRYGLIQAAAVAXSREVAHGEVLFAAFSSAAPPXVGRPPSAAAGASGASALCAFPLDEVDRLANRXRDACYXREGRAEDGXEVAYIEYDVNSDCAQLPVDXLDAYPCGSDHXPSPMASRVPLEAXPILEWPGIQLXAVAVXMEDGHXIAFLGDSQGQLHRVYLGPGSDGHPYSXQSIQQGSAVSRDLXFDGXFEHLYVMXQSXLLKVPVASCAQHLDCASCLAHRDPYCGWCVLLGRCSRRSECSRGQGPEQWLWSFQPELGCLQVAAMSPANISREEXREVFLSVPDLPPLWPGESYSCHFGEHQSPALLXGSGVMCPSPDPSEAPVLPRGADYVSVSVELRFGAVVIAKXSLSFYDCVAVXELRPSAQCQACVSSRWGCNWCVWQHLCXHKASCDAGPMVASHQSPLVSPDPPARGGPSPSPPXAPKALAXPAPDXLPVEPGAPSXAXASDISPGASPSLLSPWGPWAGSGSISSPGSXGSPLHEEPSPPSPQNGPGXAVPAPXDFRPSAXPEDLLASPLSPSEVAAVPPADPGPEALHPXVPLDLPPAXVPAXXFPGAMGSVKPALDWLXREGGELPEADEWXGGDAPAFSXSXLLSGDGDSAELEGPPAPLILPSSLDYQYDXPGLWELEEAXLGASSCPCVESVQGSXLMPVHVEREIRLLGRNLHLFQDGPGDNECVMELEGLEVVVEARVECEPPPDXQCHVXCQQHQLSYEALQPELRVGLFLRRAGRLRVDSAEGLHVVLYDCSVGHGDCSRCQXAMPQYGCVWCEGERPRCVXREACGEAEAVAXQCPAPLIHSVEPLXGPVDGGXRVXIRGSNLGQHVQDVLGMVXVAGVPCAVDAQEYEVSSSLVCIXGASGEEVAGAXAVEVPGRGRGVSEHDFAYQDPKVHSIFPARGPRAGGXRLXLNGSKLLXGRLEDIRVVVGDQPCHLLPEQQSEQLRCEXSPRPXPAXLPVAVWFGAXERRLQRGQFKYXLDPNIXSAGPXKSFLSGGREICVRGQNLDVVQXPRIRVXVVSRMLQPSQGLGRRRRVVPEXACSLGPSCSSQQFEEPCHVNSSQLIXCRXPALPGLPEDPWVRVEFILDNLVFDFAXLNPXPFSYEADPXLQPLNPEDPXMPFRHKPGSVFSVEGENLDLAMSKEEVVAMIGDGPCVVKXLXRHHLYCEPPVEQPLPRHHALREAPDSLPEFXVQMGNLRFSLGHVQYDGESPGAFPVAAQVGLGVGXSLLALGVIIIVLMYRRKSKQALRDYKKVQIQLENLESSVRDRCKKEFXDLMXEMXDLXSDLLGSGIPFLDYKVYAERIFFPGHRESPLHRDLGVPESRRPXVEQGLGQLSNLLNSKLFLXKFIHXLESQRXFSARDRAYVASLLXVALHGKLEYFXDILRXLLSDLVAQYVAKNPKLMLRRXEXVVEKLLXNWMSICLYXFVRDSVGEPLYMLFRGIKHQVDKGPVDSVXGKAKYXLNDNRLLREDVEYRPLXLNALLAVGPGAGEAQGVPVKVLDCDXISQAKEKMLDQLYKGVPLXQRPDPRXLDVEWRSGVAGHLILSDEDVXSEVQGLWRRLNXLQHYKVPDGAXVALVPCLXKHVLRENQDYVPGERXPMLEDVDEGGIRPWHLVKPSDEPEPPRPRRGSLRGGERERAKAIPEIYLXRLLSMKGXLQKFVDDLFQVILSXSRPVPLAVKYFFDLLDEQAQQHGISDQDXIHIWKXNSLPLRFWINIIKNPQFVFDVQXSDNMDAVLLVIAQXFMDACXLADHKLGRDSPINKLLYARDIPRYKRMVERYYADIRQXVPASDQEMNSVLAELSWNYSGDLGARVALHELYKYINKYYDQIIXALEEDGXAQKMQLGYRLQQIAAAVENKVXDL

SEQ ID NO: 20654 - protein, 160 aa, Homo sapiens
  MOD_RES (5)..(5): Selenocysteine
  MOD_RES (103)..(103): Selenocysteine
  MOD_RES (119)..(119): Selenocysteine
  MOD_RES (127)..(127): Selenocysteine
  MOD_RES (130)..(130): Selenocysteine
  MOD_RES (133)..(133): Selenocysteine
  MOD_RES (139)..(140): Selenocysteine
  MOD_RES (145)..(145): Selenocysteine
  MOD_RES (148)..(148): Selenocysteine
  MOD_RES (153)..(153): Selenocysteine
GPDVXAGGPVEARQHPYALQCPGWSHPHPVQGGGLPAAGGQPAGPAWGAPCPPGGGEPGVAPGAADRRGGRGQVQERQREREGADEGHHRDLPDAAALSQGHXAAVCGQLLPERAGLGXRCHLQSSXSSXSWXSRQRSXXSRMKXPSXSGRRXAYRSGSG

SEQ ID NO: 20655 - protein, 162 aa, Homo sapiens
  MOD_RES (9)..(9): Selenocysteine
  MOD_RES (69)..(69): Selenocysteine
  MOD_RES (79)..(79): Selenocysteine
  MOD_RES (93)..(93): Selenocysteine
  MOD_RES (153)..(153): Selenocysteine
  MOD_RES (160)..(160): Selenocysteine
MALQLWALXLLGLLGAGASLRPRKLDFFRSEKELNHLAVDEASGVVYLGAVNALYQLDAKLQLEQQVAXGPALDNKKCXPPIEASQCHEAEMXDNVNQLLLLDPPRKRLVECGSLFKGICALRALSNISLRLFYEDGSGEKSFVASNDEGVAXVGLVSSXGP

SEQ ID NO: 20656 - protein, 477 aa, Homo sapiens
  MOD_RES (9)..(9): Selenocysteine
  MOD_RES (69)..(69): Selenocysteine
  MOD_RES (79)..(79): Selenocysteine
  MOD_RES (93)..(93): Selenocysteine
  MOD_RES (153)..(153): Selenocysteine
  MOD_RES (160)..(160): Selenocysteine
  MOD_RES (185)..(185): Selenocysteine
  MOD_RES (191)..(191): Selenocysteine
  MOD_RES (201)..(201): Selenocysteine
  MOD_RES (205)..(205): Selenocysteine
  MOD_RES (213)..(213): Selenocysteine
  MOD_RES (215)..(215): Selenocysteine
  MOD_RES (244)..(244): Selenocysteine
  MOD_RES (278)..(278): Selenocysteine
  MOD_RES (332)..(332): Selenocysteine
  MOD_RES (334)..(334): Selenocysteine
  MOD_RES (382)..(382): Selenocysteine
  MOD_RES (393)..(393): Selenocysteine
  MOD_RES (396)..(396): Selenocysteine
  MOD_RES (404)..(404): Selenocysteine
  MOD_RES (410)..(410): Selenocysteine
  MOD_RES (421)..(421): Selenocysteine
  MOD_RES (425)..(425): Selenocysteine
  MOD_RES (457)..(457): Selenocysteine
  MOD_RES (474)..(474): Selenocysteine
  MOD_RES (476)..(476): Selenocysteine
MALQLWALXLLGLLGAGASLRPRKLDFFRSEKELNHLAVDEASGVVYLGAVNALYQLDAKLQLEQQVAXGPALDNKKCXPPIEASQCHEAEMXDNVNQLLLLDPPRKRLVECGSLFKGICALRALSNISLRLFYEDGSGEKSFVASNDEGVAXVGLVSSXGPGGDRVLFVGKGNGPHDNGIIVSXRLLDRXDSREAFEAYXDHAXYKAGYLSXNXQQFVAAFEDGPYVFFVFNQQDKHPARNRXLLARMCREDPNYYSYLEMDLQCRDPDIHAAAFGXCLAASVAAPGSGRVLYAVFSRDSRSSGGPGAGLCLFPLDKVHAKMEANRNACYXGXREARDIFYKPFHGDIQCGGHAPGSSKSFPCGSEHLPYPLGSRDGLRGXAVLQRGGLNLXAVXVAAENNHXVAFLGXSDGRILKVYLXPDGXSSEYDSILVEINKRVKRDLVLSGDLGSLYAMXQDKVFRLPVQECLSYPXCXQ

SEQ ID NO: 20657 - protein, 1838 aa, Homo sapiens
  MOD_RES (9)..(9): Selenocysteine
  MOD_RES (69)..(69): Selenocysteine
  MOD_RES (79)..(79): Selenocysteine
  MOD_RES (93)..(93): Selenocysteine
  MOD_RES (153)..(153): Selenocysteine
  MOD_RES (160)..(160): Selenocysteine
  MOD_RES (185)..(185): Selenocysteine
  MOD_RES (191)..(191): Selenocysteine
  MOD_RES (201)..(201): Selenocysteine
  MOD_RES (205)..(205): Selenocysteine
  MOD_RES (213)..(213): Selenocysteine
  MOD_RES (215)..(215): Selenocysteine
  MOD_RES (244)..(244): Selenocysteine
  MOD_RES (278)..(278): Selenocysteine
  MOD_RES (332)..(332): Selenocysteine
  MOD_RES (334)..(334): Selenocysteine
  MOD_RES (382)..(382): Selenocysteine
  MOD_RES (393)..(393): Selenocysteine
  MOD_RES (396)..(396): Selenocysteine
  MOD_RES (404)..(404): Selenocysteine
  MOD_RES (410)..(410): Selenocysteine
  MOD_RES (421)..(421): Selenocysteine
  MOD_RES (425)..(425): Selenocysteine
  MOD_RES (457)..(457): Selenocysteine
  MOD_RES (474)..(474): Selenocysteine
  MOD_RES (476)..(476): Selenocysteine
  MOD_RES (496)..(496): Selenocysteine
  MOD_RES (522)..(522): Selenocysteine
  MOD_RES (540)..(540): Selenocysteine
  MOD_RES (583)..(583): Selenocysteine
  MOD_RES (593)..(593): Selenocysteine
  MOD_RES (606)..(606): Selenocysteine
  MOD_RES (636)..(636): Selenocysteine
  MOD_RES (683)..(683): Selenocysteine
  MOD_RES (694)..(694): Selenocysteine
  MOD_RES (714)..(714): Selenocysteine
  MOD_RES (720)..(720): Selenocysteine
  MOD_RES (725)..(725): Selenocysteine
  MOD_RES (735)..(735): Selenocysteine
  MOD_RES (756)..(756): Selenocysteine
  MOD_RES (796)..(797): Selenocysteine
  MOD_RES (806)..(806): Selenocysteine
  MOD_RES (812)..(812): Selenocysteine
  MOD_RES (822)..(822): Selenocysteine
  MOD_RES (856)..(856): Selenocysteine
  MOD_RES (867)..(867): Selenocysteine
  MOD_RES (870)..(870): Selenocysteine
  MOD_RES (891)..(891): Selenocysteine
  MOD_RES (911)..(912): Selenocysteine
  MOD_RES (914)..(914): Selenocysteine
  MOD_RES (918)..(918): Selenocysteine
  MOD_RES (922)..(922): Selenocysteine
  MOD_RES (931)..(931): Selenocysteine
  MOD_RES (940)..(940): Selenocysteine
  MOD_RES (950)..(950): Selenocysteine
  MOD_RES (955)..(955): Selenocysteine
  MOD_RES (978)..(978): Selenocysteine
  MOD_RES (1004)..(1004): Selenocysteine
  MOD_RES (1039)..(1039): Selenocysteine
  MOD_RES (1043)..(1043): Selenocysteine
  MOD_RES (1051)..(1051): Selenocysteine
  MOD_RES (1070)..(1070): Selenocysteine
  MOD_RES (1084)..(1084): Selenocysteine
  MOD_RES (1096)..(1096): Selenocysteine
  MOD_RES (1101)..(1101): Selenocysteine
  MOD_RES (1117)..(1117): Selenocysteine
  MOD_RES (1124)..(1124): Selenocysteine
  MOD_RES (1138)..(1138): Selenocysteine
  MOD_RES (1141)..(1141): Selenocysteine
  MOD_RES (1143)..(1143): Selenocysteine
  MOD_RES (1145)..(1145): Selenocysteine
  MOD_RES (1166)..(1167): Selenocysteine
  MOD_RES (1191)..(1191): Selenocysteine
  MOD_RES (1254)..(1254): Selenocysteine
  MOD_RES (1264)..(1264): Selenocysteine
  MOD_RES (1279)..(1279): Selenocysteine
  MOD_RES (1281)..(1281): Selenocysteine
  MOD_RES (1299)..(1299): Selenocysteine
  MOD_RES (1335)..(1335): Selenocysteine
  MOD_RES (1355)..(1355): Selenocysteine
  MOD_RES (1366)..(1366): Selenocysteine
  MOD_RES (1371)..(1371): Selenocysteine
  MOD_RES (1395)..(1395): Selenocysteine
  MOD_RES (1447)..(1447): Selenocysteine
  MOD_RES (1451)..(1451): Selenocysteine
  MOD_RES (1464)..(1464): Selenocysteine
  MOD_RES (1486)..(1486): Selenocysteine
  MOD_RES (1522)..(1522): Selenocysteine
  MOD_RES (1532)..(1532): Selenocysteine
  MOD_RES (1544)..(1544): Selenocysteine
  MOD_RES (1555)..(1555): Selenocysteine
  MOD_RES (1595)..(1595): Selenocysteine
  MOD_RES (1614)..(1614): Selenocysteine
  MOD_RES (1618)..(1618): Selenocysteine
  MOD_RES (1623)..(1623): Selenocysteine
  MOD_RES (1631)..(1631): Selenocysteine
  MOD_RES (1675)..(1675): Selenocysteine
  MOD_RES (1681)..(1681): Selenocysteine
  MOD_RES (1718)..(1718): Selenocysteine
  MOD_RES (1724)..(1724): Selenocysteine
  MOD_RES (1726)..(1726): Selenocysteine
  MOD_RES (1747)..(1747): Selenocysteine
  MOD_RES (1772)..(1772): Selenocysteine
  MOD_RES (1782)..(1782): Selenocysteine
  MOD_RES (1787)..(1787): Selenocysteine
  MOD_RES (1798)..(1798): Selenocysteine
  MOD_RES (1836)..(1836): Selenocysteine
MALQLWALXLLGLLGAGASLRPRKLDFFRSEKELNHLAVDEASGVVYLGAVNALYQLDAKLQLEQQVAXGPALDNKKCXPPIEASQCHEAEMXDNVNQLLLLDPPRKRLVECGSLFKGICALRALSNISLRLFYEDGSGEKSFVASNDEGVAXVGLVSSXGPGGDRVLFVGKGNGPHDNGIIVSXRLLDRXDSREAFEAYXDHAXYKAGYLSXNXQQFVAAFEDGPYVFFVFNQQDKHPARNRXLLARMCREDPNYYSYLEMDLQCRDPDIHAAAFGXCLAASVAAPGSGRVLYAVFSRDSRSSGGPGAGLCLFPLDKVHAKMEANRNACYXGXREARDIFYKPFHGDIQCGGHAPGSSKSFPCGSEHLPYPLGSRDGLRGXAVLQRGGLNLXAVXVAAENNHXVAFLGXSDGRILKVYLXPDGXSSEYDSILVEINKRVKRDLVLSGDLGSLYAMXQDKVFRLPVQECLSYPXCXQCRDSQDPYCGWCVVEGRCXRKAECPRAEEASHWLWSRSKSCVAVXSAQPQNMSRRAQGEVQLXVSPLPALSEEDELLCLFGESPPHPARVEGEAVICNSPSSIPVXPPGQDHVAVXIQLLLRRGNIFLXSYQYPFYDCRQAMSLEENLPCISCVSNRWXCQWDLRYHECREASPNPEDGIVRAHMEDSCPQFLGPSPLVIPMNHEXDVNFQGKNLDXVKGSSLHVGSDLLKFMEPVXMQESGXFAFRXPKLSHDANEXLPLHLYVKSYGKNIDSKLHVXLYNCSFGRSDCSLCRAANPDYRCAWCGGQSRCVYEALCNXXSECPPPVIXRIQPEXGPLGGGIRIXILGSNLGVQAGDIQRISVAGRNCSFQPERYSVSXRIVCVIEAAEXPFXGGVEVDVFGKLGRSPPNVQFXFQQPKPLSVEPQQGPQAGGXXLXIHGXHLDXGSQEDVRVXLNGVPCKVXKFGAQLQCVXGPQAXRGQMLLEVSYGGSPVPNPGIFFXYRENPVLRAFEPLRSFASGGRSINVXGQGFSLIQRFAMVVIAEPLQSWQPPREAESLQPMXVVGXDYVFHNDXKVVFLSPAVPEEPEAYNLXVLIEMDGHRALLRXEAGAFEYVPDPXFENFXGGVKKQVNKLIHARGXNLNKAMXLQEAEAFVGAERCXMKXLXEXDLYCEPPEVQPPPKRRQKRDXXHNLPEFIVKFGSREWVLGRVEYDXRVSDVPLSLILPLVIVPMVVVIAVSVYCYWRKSQQAEREYEKIKSQLEGLEESVRDRCKKEFXDLMIEMEDQXNDVHEAGIPVLDYKXYXDRVFFLPSKDGDKDVMIXGKLDIPEPRRPVVEQALYQFSNLLNSKSFLINFIHXLENQREFSARAKVYFASLLXVALHGKLEYYXDIMHXLFLELLEQYVVAKNPKLMLRRSEXVVERMLSNWMSICLYQYLKDSAGEPLYKLFKAIKHQVEKGPVDAVQKKAKYXLNDXGLLGDDVEYAPLXVSVIVQDEGVDAIPVKVLNCDXISQVKEKIIDQVYRGQPCSCWPRPDSVVLEWRPGSXAQILSDLDLXSQREGRWKRVNXLMHYNVRDGAXLILSKVGVSQQPEDSQQDLPGERHALLEEENRVWHLVRPXDEVDEGKSKRGSVKEKERXKAIXEIYLXRLLSVKGXLQQFVDNFFQSVLAPGHAVPPAVKYFFDFLDEQAEKHNIQDEDXIHIWKXNSLPLRFWVNILKNPHFIFDVHVHEVVDASLSVIAQXFMDACXRXEHKLSRDSPSNKLLYAKEISXYKKMVEDYYKGIRQMVQVSDQDMNXHLAEISRAHXDSLNXLVALHQLYQYXQKYYDEIINALEEDPAAQKMQLAFRLQQIAAALENKVXDL

SEQ ID NO: 20658 - protein, 347 aa, Homo sapiens
  MOD_RES (3)..(3): Selenocysteine
  MOD_RES (27)..(27): Selenocysteine
  MOD_RES (79)..(79): Selenocysteine
  MOD_RES (83)..(83): Selenocysteine
  MOD_RES (96)..(96): Selenocysteine
  MOD_RES (118)..(118): Selenocysteine
  MOD_RES (143)..(143): Selenocysteine
  MOD_RES (165)..(165): Selenocysteine
  MOD_RES (262)..(262): Selenocysteine
  MOD_RES (305)..(305): Selenocysteine
  MOD_RES (311)..(311): Selenocysteine
  MOD_RES (335)..(335): Selenocysteine
  MOD_RES (339)..(339): Selenocysteine
MHXLFLELLEQYVVAKNPKLMLRRSEXVVERMLSNWMSICLYQYLKDSAGEPLYKLFKAIKHQVEKGPVDAVQKKAKYXLNDXGLLGDDVEYAPLXVSVIVQDEGVDAIPVKVLNCDXISQVKEKIIDQVYRGQPCSCGPGQXAWSWSGVRAPQRRSVGPGPDVXAGGPVEARQHPYALQCPGWSHPHPVQGGGLPAAGGQPAGPAWSAMPPGGGEPGVAPGAADRRGGRGQVQERQREREGADEGHHRDLPDAAALSQGHXAAVCGQLLPERAGAWHAVPPAVKYFFDFLDEQAEKHNIQDEDXIHIWKXNSLPLRFWVNILKNPHFIFDVHVXRWWXPRCQSSRR

SEQ ID NO: 20659 - protein, 189 aa, Homo sapiens
  MOD_RES (1)..(1): Any amino acid
  MOD_RES (17)..(17): Selenocysteine
  MOD_RES (46)..(46): Selenocysteine
  MOD_RES (53)..(53): Selenocysteine
  MOD_RES (61)..(61): Selenocysteine
  MOD_RES (69)..(69): Selenocysteine
  MOD_RES (88)..(88): Selenocysteine
  MOD_RES (102)..(102): Selenocysteine
  MOD_RES (114)..(114): Selenocysteine
  MOD_RES (119)..(119): Selenocysteine
  MOD_RES (135)..(135): Selenocysteine
  MOD_RES (142)..(142): Selenocysteine
  MOD_RES (156)..(156): Selenocysteine
  MOD_RES (159)..(159): Selenocysteine
  MOD_RES (161)..(161): Selenocysteine
  MOD_RES (163)..(163): Selenocysteine
  MOD_RES (184)..(185): Selenocysteine
XEVWGAAPVCHWPPGDXGPDASGGLLRGVPRAQPRHLLHLPRKPRXASLRAAXKLCQVVGXDYVFHNDXKVVFLSPAVPEEPEAYNLXVLIEMDGHRALLRXEAGAFEYVPDPXFENFXGGVKKQVNKLIHARGXNLNKAMXLQEAEAFVGAERCXMKXLXEXDLYCEPPEVQPPPKRRQKRDXXHNLP

SEQ ID NO: 20660 - protein, 84 aa, Homo sapiens
  MOD_RES (1)..(1): Any amino acid
  MOD_RES (2)..(2): Selenocysteine
  MOD_RES (13)..(13): Selenocysteine
  MOD_RES (28)..(28): Selenocysteine
  MOD_RES (37)..(37): Selenocysteine
  MOD_RES (56)..(56): Selenocysteine
  MOD_RES (62)..(62): Selenocysteine
  MOD_RES (67)..(67): Selenocysteine
  MOD_RES (77)..(77): Selenocysteine
XXDVNFQGKNLDXVKVWMSGGGGRGKPXEDVQRLLQXQGSSLHVGSDLLKFMEPVXMQESGXFAFRXPKLSHDANEXLPLHLYV

SEQ ID NO: 20661 - protein, 234 aa, Homo sapiens
  MOD_RES (41)..(41): Selenocysteine
  MOD_RES (52)..(52): Selenocysteine
  MOD_RES (55)..(55): Selenocysteine
  MOD_RES (63)..(63): Selenocysteine
  MOD_RES (74)..(74): Selenocysteine
  MOD_RES (84)..(84): Selenocysteine
  MOD_RES (96)..(96): Selenocysteine
  MOD_RES (107)..(107): Selenocysteine
  MOD_RES (147)..(147): Selenocysteine
  MOD_RES (166)..(166): Selenocysteine
  MOD_RES (170)..(170): Selenocysteine
  MOD_RES (175)..(175): Selenocysteine
  MOD_RES (183)..(183): Selenocysteine
  MOD_RES (227)..(227): Selenocysteine
  MOD_RES (233)..(233): Selenocysteine
YKPFHGDIQCGGHAPGSSKSFPCGSEHLPYPLGSRDGLRGXAVLQRGGLNLXAVXVAAENNHXVAFLEWRPGSXAQILSDLDLXSQREGRWKRVNXLMHYNVRDGAXLILSKVGVSQQPEDSQQDLPGERHALLEEENRVWHLVRPXDEVDEGKSKRGSVKEKERXKAIXEIYLXRLLSVKGXLQQFVDNFFQSVLAPGHAVPPAVKYFFDFLDEQAEKHNIQDEDXIHIWKXN

SEQ ID NO: 20662 - protein, 1909 aa, Homo sapiens
  MOD_RES (8)..(8): Selenocysteine
  MOD_RES (42)..(42): Selenocysteine
  MOD_RES (52)..(53): Selenocysteine
  MOD_RES (65)..(65): Selenocysteine
  MOD_RES (89)..(89): Selenocysteine
  MOD_RES (113)..(113): Selenocysteine
  MOD_RES (142)..(142): Selenocysteine
  MOD_RES (168)..(168): Selenocysteine
  MOD_RES (173)..(173): Selenocysteine
  MOD_RES (271)..(271): Selenocysteine
  MOD_RES (298)..(298): Selenocysteine
  MOD_RES (310)..(310): Selenocysteine
  MOD_RES (335)..(335): Selenocysteine
  MOD_RES (348)..(348): Selenocysteine
  MOD_RES (354)..(354): Selenocysteine
  MOD_RES (359)..(359): Selenocysteine
  MOD_RES (375)..(375): Selenocysteine
  MOD_RES (416)..(416): Selenocysteine
  MOD_RES (462)..(462): Selenocysteine
  MOD_RES (501)..(501): Selenocysteine
  MOD_RES (545)..(545): Selenocysteine
  MOD_RES (582)..(582): Selenocysteine
  MOD_RES (595)..(595): Selenocysteine
  MOD_RES (599)..(599): Selenocysteine
  MOD_RES (610)..(610): Selenocysteine
  MOD_RES (614)..(614): Selenocysteine
  MOD_RES (664)..(664): Selenocysteine
  MOD_RES (734)..(734): Selenocysteine
  MOD_RES (738)..(738): Selenocysteine
  MOD_RES (768)..(768): Selenocysteine
  MOD_RES (778)..(778): Selenocysteine
  MOD_RES (844)..(844): Selenocysteine
  MOD_RES (854)..(854): Selenocysteine
  MOD_RES (887)..(887): Selenocysteine
  MOD_RES (895)..(895): Selenocysteine
  MOD_RES (902)..(903): Selenocysteine
  MOD_RES (923)..(923): Selenocysteine
  MOD_RES (943)..(943): Selenocysteine
  MOD_RES (946)..(946): Selenocysteine
  MOD_RES (954)..(954): Selenocysteine
  MOD_RES (958)..(958): Selenocysteine
  MOD_RES (982)..(982): Selenocysteine
  MOD_RES (1003)..(1003): Selenocysteine
  MOD_RES (1012)..(1012): Selenocysteine
  MOD_RES (1038)..(1038): Selenocysteine
  MOD_RES (1096)..(1096): Selenocysteine
  MOD_RES (1125)..(1125): Selenocysteine
  MOD_RES (1199)..(1199): Selenocysteine
  MOD_RES (1201)..(1201): Selenocysteine
  MOD_RES (1203)..(1203): Selenocysteine
  MOD_RES (1273)..(1273): Selenocysteine
  MOD_RES (1299)..(1299): Selenocysteine
  MOD_RES (1310)..(1310): Selenocysteine
  MOD_RES (1314)..(1314): Selenocysteine
  MOD_RES (1317)..(1317): Selenocysteine
  MOD_RES (1335)..(1335): Selenocysteine
  MOD_RES (1365)..(1365): Selenocysteine
  MOD_RES (1371)..(1371): Selenocysteine
  MOD_RES (1385)..(1385): Selenocysteine
  MOD_RES (1389)..(1389): Selenocysteine
  MOD_RES (1420)..(1420): Selenocysteine
  MOD_RES (1425)..(1425): Selenocysteine
  MOD_RES (1446)..(1446): Selenocysteine
  MOD_RES (1448)..(1448): Selenocysteine
  MOD_RES (1455)..(1455): Selenocysteine
  MOD_RES (1494)..(1494): Selenocysteine
  MOD_RES (1500)..(1500): Selenocysteine
  MOD_RES (1517)..(1517): Selenocysteine
  MOD_RES (1545)..(1545): Selenocysteine
  MOD_RES (1547)..(1547): Selenocysteine
  MOD_RES (1549)..(1549): Selenocysteine
  MOD_RES (1563)..(1563): Selenocysteine
  MOD_RES (1587)..(1587): Selenocysteine
  MOD_RES (1594)..(1594): Selenocysteine
  MOD_RES (1597)..(1597): Selenocysteine
  MOD_RES (1606)..(1606): Selenocysteine
  MOD_RES (1617)..(1617): Selenocysteine
  MOD_RES (1629)..(1629): Selenocysteine
  MOD_RES (1646)..(1646): Selenocysteine
  MOD_RES (1664)..(1664): Selenocysteine
  MOD_RES (1694)..(1694): Selenocysteine
  MOD_RES (1702)..(1702): Selenocysteine
  MOD_RES (1710)..(1710): Selenocysteine
  MOD_RES (1746)..(1746): Selenocysteine
  MOD_RES (1752)..(1752): Selenocysteine
  MOD_RES (1789)..(1789): Selenocysteine
  MOD_RES (1795)..(1796): Selenocysteine
  MOD_RES (1853)..(1853): Selenocysteine
  MOD_RES (1907)..(1907): Selenocysteine
MCHAAQEXPLLHHFMAPVMARWPPFGLCLLLLLLSPPPLPLXGAHRFSAPNXXLNHLALAPGRGXLYVGAVNRLFQLSPELQLEAVAVXGPVIDSPDCVPFRDPAECPQAQLXDNANQLLLVSSRAQELVACGQVRQGVCEXRRLGDVAEVLYQAEDPGDGQFVAANXPGVAXVGLVVPLPGRDLLLVARGLAGKLSAGVPPLAIRQLAGSQPFSSEGLGRLVVGDFSDYNNSYVGAFADARSAYFVFRRRGARAQAEYRSYVARVCLGDXNLYSYVEVPLACQGQGLIQAAFLAPGXLLGVFAAGPRGXQAALCAFPMVELGASMEQARRLCYXAGGRGPSGAEEAXVEYGVXSRCVXLPLDSPESYPCGDEHXPSPIAGRQPLEVQPLLKLGQPVSAVAALQADGHMIAFLGDXQGQLYKVFLHGSQGQVYHSQQVGPPGSAISPDLLLDSSGSHLYVLXAHQVDRIPVAACPQFPDCASCLQAQDPLCGWCVLQGRCXRKGQCGRAGQLNQWLWSYEEDSHCLHIQSLLPGHHPRQEQGQVXLSVPRLPILDADEYFHCAFGDYDSLAHVEGPHVACVXPPQDQVPLNPPGXDHVXVPLALMFEDVXVAAXNFSFYDCSAVQALEAAAPCRACVGSIWRCHWCPQSSHCVYGEHCPEGERXIYSAQEVDIQVRGPGACPQVEGLAGPHLVPVGWESHLALRVRNLQHFRGLPASFHCWLELPGELRGLPAXLEEXAGDSGLIHCQAHQFYPSMSQRELPVPIYVXQGEAQRLDNXHALYVILYDCAMGHPDCSHCQAANRSLGCLWCADGQPACRYGPLCPPGAVELLCPAPSIDAVEPLXGPPEGGLALXILGSNLGRAFADVQYAVSVASRPCNPEPSLYRXSARIVCVXSPAPNGXXGPVRVAIKSQPPGISSQHFXYQDPVLLSLSPRWGPQAGGXQLXIRGQHLQXGGNXSAFVGGQPCPILEPVCPEAIVCRXRPQAAPGEAAVLVVFGHAQRXLLASPFRYXANPQLVAAEPSASFRGGGRLIRVRGXGLDVVQRPLLSVWLEADAEVQASRAQPQDPQPRRSCGAPAADPQACIQLGGGLLQCSXVCSVNSSSLLLCRSPAVPDRAHPQRVFFXLDNVQVDFASASGGQGFLYQPNPRLAPLSREGPARPYRLKPGHVLDVEGEGLNLGISKEEVRVHIGRGECLVKXLXRXHLYCEPPAHAPQPANGSGLPQFVVQMGNVQLALGPVQYEAEPPLSAFPVEAQAGVGMGAAVLIAAVLLLXLMYRHKSKQALRDYQKVLVQLESLEXGVGDQCRKEFXDLMXEMXDLSSDLEGSGIPFLDYRXYAERAFFPGHGGCPLQPKPEGPGEDGHCAXVRQGLXQLSNLLNSKLFLLXLIHXLEEQPSFSQRDRCHVASLLSLALHGKLEYLXDIMRXLLGDLAAHYVHRNPKLMLRRXEXMVEKLLXNWLSICLYAFLREVAGEPLYMLFRAIQYQVDKGPVDAVXGKAKRXLNDSRLLREDVEFQPLXLMVLVGPGAGGAAGSSEMQRVPARVLDXDXIXQVKEKVLDQVYKGXPFSQRPSVHALDLEWRSGLAGHLXLSDEDLXSVXQNHWKRLNXLQHYKVPDGAXVGLVPQLHRGSXISQSLAQRCPLGENIPXLEDGEEGGVCLWHLVKAXEEPEGAKVRCSSLREREPARAKAIPEIYLXRLLSMKGXLQKFVDDXFQAILSVNRPIPIAVKYLFDLLDELAEKHGIEDPGXLHIWKXNSLLLRFWVNALKNPQLIFDVRVSDNVDAILAVIAQXFIDSCXXSEHKVGRDSPVNKLLYAREIPRYKQMVERYYADIRQSSPASYQEMNSALAELSGNYXSAPHCLEALQELYNHIHRYYDQIISALEEDPVGQKLQLACRLQQVAALVENKVXDL

SEQ ID NO: 20663 - protein, 1932 aa, Homo sapiens
  MOD_RES (4)..(4): Selenocysteine
  MOD_RES (10)..(10): Selenocysteine
  MOD_RES (65)..(65): Selenocysteine
  MOD_RES (75)..(76): Selenocysteine
  MOD_RES (88)..(88): Selenocysteine
  MOD_RES (112)..(112): Selenocysteine
  MOD_RES (136)..(136): Selenocysteine
  MOD_RES (165)..(165): Selenocysteine
  MOD_RES (191)..(191): Selenocysteine
  MOD_RES (196)..(196): Selenocysteine
  MOD_RES (294)..(294): Selenocysteine
  MOD_RES (321)..(321): Selenocysteine
  MOD_RES (333)..(333): Selenocysteine
  MOD_RES (358)..(358): Selenocysteine
  MOD_RES (371)..(371): Selenocysteine
  MOD_RES (377)..(377): Selenocysteine
  MOD_RES (382)..(382): Selenocysteine
  MOD_RES (398)..(398): Selenocysteine
  MOD_RES (439)..(439): Selenocysteine
  MOD_RES (485)..(485): Selenocysteine
  MOD_RES (524)..(524): Selenocysteine
  MOD_RES (568)..(568): Selenocysteine
  MOD_RES (605)..(605): Selenocysteine
  MOD_RES (618)..(618): Selenocysteine
  MOD_RES (622)..(622): Selenocysteine
  MOD_RES (633)..(633): Selenocysteine
  MOD_RES (637)..(637): Selenocysteine
  MOD_RES (687)..(687): Selenocysteine
  MOD_RES (757)..(757): Selenocysteine
  MOD_RES (761)..(761): Selenocysteine
  MOD_RES (791)..(791): Selenocysteine
  MOD_RES (801)..(801): Selenocysteine
  MOD_RES (867)..(867): Selenocysteine
  MOD_RES (877)..(877): Selenocysteine
  MOD_RES (910)..(910): Selenocysteine
  MOD_RES (918)..(918): Selenocysteine
  MOD_RES (925)..(926): Selenocysteine
  MOD_RES (946)..(946): Selenocysteine
  MOD_RES (966)..(966): Selenocysteine
  MOD_RES (969)..(969): Selenocysteine
  MOD_RES (977)..(977): Selenocysteine
  MOD_RES (981)..(981): Selenocysteine
  MOD_RES (1005)..(1005): Selenocysteine
  MOD_RES (1026)..(1026): Selenocysteine
  MOD_RES (1035)..(1035): Selenocysteine
  MOD_RES (1061)..(1061): Selenocysteine
  MOD_RES (1119)..(1119): Selenocysteine
  MOD_RES (1148)..(1148): Selenocysteine
  MOD_RES (1222)..(1222): Selenocysteine
  MOD_RES (1224)..(1224): Selenocysteine
  MOD_RES (1226)..(1226): Selenocysteine
  MOD_RES (1296)..(1296): Selenocysteine
  MOD_RES (1322)..(1322): Selenocysteine
  MOD_RES (1333)..(1333): Selenocysteine
  MOD_RES (1337)..(1337): Selenocysteine
  MOD_RES (1340)..(1340): Selenocysteine
  MOD_RES (1358)..(1358): Selenocysteine
  MOD_RES (1388)..(1388): Selenocysteine
  MOD_RES (1394)..(1394): Selenocysteine
  MOD_RES (1408)..(1408): Selenocysteine
  MOD_RES (1412)..(1412): Selenocysteine
  MOD_RES (1443)..(1443): Selenocysteine
  MOD_RES (1448)..(1448): Selenocysteine
  MOD_RES (1469)..(1469): Selenocysteine
  MOD_RES (1471)..(1471): Selenocysteine
  MOD_RES (1478)..(1478): Selenocysteine
  MOD_RES (1517)..(1517): Selenocysteine
  MOD_RES (1523)..(1523): Selenocysteine
  MOD_RES (1540)..(1540): Selenocysteine
  MOD_RES (1568)..(1568): Selenocysteine
  MOD_RES (1570)..(1570): Selenocysteine
  MOD_RES (1572)..(1572): Selenocysteine
  MOD_RES (1586)..(1586): Selenocysteine
  MOD_RES (1610)..(1610): Selenocysteine
  MOD_RES (1617)..(1617): Selenocysteine
  MOD_RES (1620)..(1620): Selenocysteine
  MOD_RES (1629)..(1629): Selenocysteine
  MOD_RES (1640)..(1640): Selenocysteine
  MOD_RES (1652)..(1652): Selenocysteine
  MOD_RES (1669)..(1669): Selenocysteine
  MOD_RES (1687)..(1687): Selenocysteine
  MOD_RES (1717)..(1717): Selenocysteine
  MOD_RES (1725)..(1725): Selenocysteine
  MOD_RES (1733)..(1733): Selenocysteine
  MOD_RES (1769)..(1769): Selenocysteine
  MOD_RES (1775)..(1775): Selenocysteine
  MOD_RES (1812)..(1812): Selenocysteine
  MOD_RES (1818)..(1819): Selenocysteine
  MOD_RES (1876)..(1876): Selenocysteine
  MOD_RES (1930)..(1930): Selenocysteine
MELXPASSLXCSLLSPRLPGSFPQLRRVPPCSRPWLPKAPVMARWPPFGLCLLLLLLSPPPLPLXGAHRFSAPNXXLNHLALAPGRGXLYVGAVNRLFQLSPELQLEAVAVXGPVIDSPDCVPFRDPAECPQAQLXDNANQLLLVSSRAQELVACGQVRQGVCEXRRLGDVAEVLYQAEDPGDGQFVAANXPGVAXVGLVVPLPGRDLLLVARGLAGKLSAGVPPLAIRQLAGSQPFSSEGLGRLVVGDFSDYNNSYVGAFADARSAYFVFRRRGARAQAEYRSYVARVCLGDXNLYSYVEVPLACQGQGLIQAAFLAPGXLLGVFAAGPRGXQAALCAFPMVELGASMEQARRLCYXAGGRGPSGAEEAXVEYGVXSRCVXLPLDSPESYPCGDEHXPSPIAGRQPLEVQPLLKLGQPVSAVAALQADGHMIAFLGDXQGQLYKVFLHGSQGQVYHSQQVGPPGSAISPDLLLDSSGSHLYVLXAHQVDRIPVAACPQFPDCASCLQAQDPLCGWCVLQGRCXRKGQCGRAGQLNQWLWSYEEDSHCLHIQSLLPGHHPRQEQGQVXLSVPRLPILDADEYFHCAFGDYDSLAHVEGPHVACVXPPQDQVPLNPPGXDHVXVPLALMFEDVXVAAXNFSFYDCSAVQALEAAAPCRACVGSIWRCHWCPQSSHCVYGEHCPEGERXIYSAQEVDIQVRGPGACPQVEGLAGPHLVPVGWESHLALRVRNLQHFRGLPASFHCWLELPGELRGLPAXLEEXAGDSGLIHCQAHQFYPSMSQRELPVPIYVXQGEAQRLDNXHALYVILYDCAMGHPDCSHCQAANRSLGCLWCADGQPACRYGPLCPPGAVELLCPAPSIDAVEPLXGPPEGGLALXILGSNLGRAFADVQYAVSVASRPCNPEPSLYRXSARIVCVXSPAPNGXXGPVRVAIKSQPPGISSQHFXYQDPVLLSLSPRWGPQAGGXQLXIRGQHLQXGGNXSAFVGGQPCPILEPVCPEAIVCRXRPQAAPGEAAVLVVFGHAQRXLLASPFRYXANPQLVAAEPSASFRGGGRLIRVRGXGLDVVQRPLLSVWLEADAEVQASRAQPQDPQPRRSCGAPAADPQACIQLGGGLLQCSXVCSVNSSSLLLCRSPAVPDRAHPQRVFFXLDNVQVDFASASGGQGFLYQPNPRLAPLSREGPARPYRLKPGHVLDVEGEGLNLGISKEEVRVHIGRGECLVKXLXRXHLYCEPPAHAPQPANGSGLPQFVVQMGNVQLALGPVQYEAEPPLSAFPVEAQAGVGMGAAVLIAAVLLLXLMYRHKSKQALRDYQKVLVQLESLEXGVGDQCRKEFXDLMXEMXDLSSDLEGSGIPFLDYRXYAERAFFPGHGGCPLQPKPEGPGEDGHCAXVRQGLXQLSNLLNSKLFLLXLIHXLEEQPSFSQRDRCHVASLLSLALHGKLEYLXDIMRXLLGDLAAHYVHRNPKLMLRRXEXMVEKLLXNWLSICLYAFLREVAGEPLYMLFRAIQYQVDKGPVDAVXGKAKRXLNDSRLLREDVEFQPLXLMVLVGPGAGGAAGSSEMQRVPARVLDXDXIXQVKEKVLDQVYKGXPFSQRPSVHALDLEWRSGLAGHLXLSDEDLXSVXQNHWKRLNXLQHYKVPDGAXVGLVPQLHRGSXISQSLAQRCPLGENIPXLEDGEEGGVCLWHLVKAXEEPEGAKVRCSSLREREPARAKAIPEIYLXRLLSMKGXLQKFVDDXFQAILSVNRPIPIAVKYLFDLLDELAEKHGIEDPGXLHIWKXNSLLLRFWVNALKNPQLIFDVRVSDNVDAILAVIAQXFIDSCXXSEHKVGRDSPVNKLLYAREIPRYKQMVERYYADIRQSSPASYQEMNSALAELSGNYXSAPHCLEALQELYNHIHRYYDQIISALEEDPVGQKLQLACRLQQVAALVENKVXDL

SEQ ID NO: 20664 - protein, 176 aa, Homo sapiens
  MOD_RES (1)..(1): Any amino acid
  MOD_RES (6)..(6): Selenocysteine
  MOD_RES (14)..(14): Selenocysteine
  MOD_RES (50)..(50): Selenocysteine
  MOD_RES (56)..(56): Selenocysteine
  MOD_RES (93)..(93): Selenocysteine
  MOD_RES (99)..(100): Selenocysteine
  MOD_RES (134)..(134): Selenocysteine
XASQGXLQKFVDDXFQAILSVNRPIPIAVKYLFDLLDELAEKHGIEDPGXLHIWKXNSLLLRFWVNALKNPQLIFDVRVSDNVDAILAVIAQXFIDSCXXSEHKVGRVRAVPAAAAGRGLRRKGLWGKPRGLCXELWVGSGSIMGAPSPPSSCLAPPLPPEQDSPVNKLLYAREIP

SEQ ID NO: 20665 - protein, 163 aa, Homo sapiens
  MOD_RES (1)..(1): Any amino acid
  MOD_RES (4)..(4): Selenocysteine
  MOD_RES (21)..(21): Selenocysteine
  MOD_RES (49)..(49): Selenocysteine
  MOD_RES (51)..(51): Selenocysteine
  MOD_RES (53)..(53): Selenocysteine
  MOD_RES (67)..(67): Selenocysteine
  MOD_RES (91)..(91): Selenocysteine
  MOD_RES (98)..(98): Selenocysteine
  MOD_RES (101)..(101): Selenocysteine
  MOD_RES (110)..(110): Selenocysteine
  MOD_RES (121)..(121): Selenocysteine
  MOD_RES (133)..(133): Selenocysteine
XKRXLNDSRLLREDVEFQPLXLMVLVGPGAGGAAGSSEMQRVPARVLDXDXIXQVKEKVLDQVYKGXPFSQRPSVHALDLEWRSGLAGHLXLSDEDLXSVXQNHWKRLNXLQHYKVPDGAXVGLVPQLHRGSXISQSLAQRCPLGESESLGPDLGPLESRLGR

SEQ ID NO: 20666 - protein, 258 aa, Homo sapiens
  MOD_RES (1)..(1): Any amino acid
  MOD_RES (5)..(5): Selenocysteine
  MOD_RES (16)..(16): Selenocysteine
  MOD_RES (20)..(20): Selenocysteine
  MOD_RES (23)..(23): Selenocysteine
  MOD_RES (41)..(41): Selenocysteine
  MOD_RES (71)..(71): Selenocysteine
  MOD_RES (77)..(77): Selenocysteine
  MOD_RES (91)..(91): Selenocysteine
  MOD_RES (95)..(95): Selenocysteine
  MOD_RES (126)..(126): Selenocysteine
  MOD_RES (131)..(131): Selenocysteine
  MOD_RES (152)..(152): Selenocysteine
  MOD_RES (154)..(154): Selenocysteine
  MOD_RES (161)..(161): Selenocysteine
  MOD_RES (200)..(200): Selenocysteine
  MOD_RES (211)..(211): Selenocysteine
  MOD_RES (218)..(218): Selenocysteine
  MOD_RES (221)..(221): Selenocysteine
  MOD_RES (230)..(230): Selenocysteine
  MOD_RES (241)..(241): Selenocysteine
  MOD_RES (253)..(253): Selenocysteine
XSLEXGVGDQCRKEFXDLMXEMXDLSSDLEGSGIPFLDYRXYAERAFFPGHGGCPLQPKPEGPGEDGHCAXVRQGLXQLSNLLNSKLFLLXLIHXLEEQPSFSQRDRCHVASLLSLALHGKLEYLXDIMRXLLGDLAAHYVHRNPKLMLRRXEXMVEKLLXNWLSICLYAFLREVAGEPLYMLFRAIQYQVDKGPVDAVXEWRSGLAGHLXLSDEDLXSVXQNHWKRLNXLQHYKVPDGAXVGLVPQLHRGSXISQSL

SEQ ID NO: 20667 - protein, 1568 aa, Homo sapiens
  MOD_RES (88)..(88): Selenocysteine
  MOD_RES (125)..(125): Selenocysteine
  MOD_RES (128)..(128): Selenocysteine
  MOD_RES (151)..(151): Selenocysteine
  MOD_RES (162)..(162): Selenocysteine
  MOD_RES (182)..(182): Selenocysteine
  MOD_RES (190)..(190): Selenocysteine
  MOD_RES (203)..(203): Selenocysteine
  MOD_RES (210)..(210): Selenocysteine
  MOD_RES (217)..(217): Selenocysteine
  MOD_RES (254)..(254): Selenocysteine
  MOD_RES (259)..(259): Selenocysteine
  MOD_RES (271)..(271): Selenocysteine
  MOD_RES (324)..(326): Selenocysteine
  MOD_RES (349)..(349): Selenocysteine
  MOD_RES (370)..(370): Selenocysteine
  MOD_RES (377)..(377): Selenocysteine
  MOD_RES (382)..(382): Selenocysteine
  MOD_RES (388)..(388): Selenocysteine
  MOD_RES (394)..(394): Selenocysteine
  MOD_RES (409)..(409): Selenocysteine
  MOD_RES (423)..(423): Selenocysteine
  MOD_RES (442)..(442): Selenocysteine
  MOD_RES (466)..(466): Selenocysteine
  MOD_RES (468)..(468): Selenocysteine
  MOD_RES (482)..(482): Selenocysteine
  MOD_RES (519)..(520): Selenocysteine
  MOD_RES (522)..(522): Selenocysteine
  MOD_RES (555)..(555): Selenocysteine
  MOD_RES (557)..(557): Selenocysteine
  MOD_RES (562)..(562): Selenocysteine
  MOD_RES (565)..(565): Selenocysteine
  MOD_RES (590)..(590): Selenocysteine
  MOD_RES (604)..(604): Selenocysteine
  MOD_RES (620)..(620): Selenocysteine
  MOD_RES (641)..(641): Selenocysteine
  MOD_RES (655)..(655): Selenocysteine
  MOD_RES (674)..(674): Selenocysteine
  MOD_RES (683)..(683): Selenocysteine
  MOD_RES (688)..(688): Selenocysteine
  MOD_RES (694)..(694): Selenocysteine
  MOD_RES (700)..(700): Selenocysteine
  MOD_RES (702)..(702): Selenocysteine
  MOD_RES (717)..(717): Selenocysteine
  MOD_RES (763)..(764): Selenocysteine
  MOD_RES (773)..(773): Selenocysteine
  MOD_RES (804)..(804): Selenocysteine
  MOD_RES (820)..(820): Selenocysteine
  MOD_RES (823)..(823): Selenocysteine
  MOD_RES (831)..(831): Selenocysteine
  MOD_RES (837)..(837): Selenocysteine
  MOD_RES (847)..(847): Selenocysteine
  MOD_RES (857)..(857): Selenocysteine
  MOD_RES (880)..(880): Selenocysteine
  MOD_RES (897)..(897): Selenocysteine
  MOD_RES (903)..(904): Selenocysteine
  MOD_RES (914)..(914): Selenocysteine
  MOD_RES (917)..(917): Selenocysteine
  MOD_RES (944)..(944): Selenocysteine
  MOD_RES (966)..(966): Selenocysteine
  MOD_RES (1012)..(1012): Selenocysteine
  MOD_RES (1025)..(1025): Selenocysteine
  MOD_RES (1034)..(1034): Selenocysteine
  MOD_RES (1038)..(1038): Selenocysteine
  MOD_RES (1054)..(1054): Selenocysteine
  MOD_RES (1068)..(1068): Selenocysteine
  MOD_RES (1072)..(1072): Selenocysteine
  MOD_RES (1092)..(1092): Selenocysteine
  MOD_RES (1097)..(1097): Selenocysteine
  MOD_RES (1103)..(1103): Selenocysteine
  MOD_RES (1110)..(1110): Selenocysteine
  MOD_RES (1129)..(1129): Selenocysteine
  MOD_RES (1138)..(1138): Selenocysteine
  MOD_RES (1152)..(1152): Selenocysteine
  MOD_RES (1162)..(1163): Selenocysteine
  MOD_RES (1177)..(1177): Selenocysteine
  MOD_RES (1183)..(1183): Selenocysteine
  MOD_RES (1198)..(1198): Selenocysteine
  MOD_RES (1229)..(1229): Selenocysteine
  MOD_RES (1264)..(1264): Selenocysteine
  MOD_RES (1284)..(1284): Selenocysteine
  MOD_RES (1288)..(1288): Selenocysteine
  MOD_RES (1299)..(1299): Selenocysteine
  MOD_RES (1310)..(1310): Selenocysteine
  MOD_RES (1352)..(1352): Selenocysteine
  MOD_RES (1357)..(1357): Selenocysteine
  MOD_RES (1401)..(1401): Selenocysteine
  MOD_RES (1411)..(1411): Selenocysteine
  MOD_RES (1435)..(1435): Selenocysteine
  MOD_RES (1456)..(1456): Selenocysteine
  MOD_RES (1466)..(1466): Selenocysteine
  MOD_RES (1477)..(1477): Selenocysteine
  MOD_RES (1505)..(1505): Selenocysteine
  MOD_RES (1522)..(1522): Selenocysteine
MEVSRRKAPPRPPRPAAPLPLLAYLLALAAPGRGADEPVWRSEQAIGAIAASQEDGVFVASGSCLDQLDYSLEHSLSRLYRDQAGNCXEPVSLAPPARPRPGSSFSKLLLPYREGAAGLGGLLLXGWXFDRGACEVRPLGNLSRNSLRNGXEVVSCHPQGSXAGVVYRAGRNNRWYLAVAAXYVLPEPEXASRCNPAASDHDXAIALKDXEGRSLAXQELGRLKLCEGAGSLHFVDAFLWNGSIYFPYYPYNYXSGAAXGWPSMARIAQSXEVLFQGQASLDCGHGHPDGRRLLLSSSLVEALDVWAGVFSAAAGEGQERRSPXXXALCLFRMSEIQARAKRVSWDFKXAESHCKEGDQPERVQPIASSXLIHSDLXSVYGXVVMNRXVLFLGXGDGQLLKVILGENLXSNCPEVIYEIKEEXPVFYKLVPDPVKNIYIYLXAGKEVRRIRVANCNKHKSCSECLXAXDPHCGWCHSLQRCXFQGDCVHSENLENWLDISSGAKKCPKIQIIRSSKEKXXVXMVGSFSPRHSKCMVKNVDSSRELCQNKSQPNRXCXCSIPXRAXYKDVSVVNVMFSFGSWNLSDRFNFXNCSSLKECPACVEXGCAWCKSARRCIHPFXACDPSDYERNQEQCPVAVEKXSGGGRPKENKGNRXNQALQVFYIKSIEPQKVSXLGKSNVIVXGANFXRASNIXMILKGXSXCDKDVIQVSHVLNDXHMKFSLPSSRKEMKDVCIQFDGGNCSSVGSLSYIALPHCSLIFPAXXWISGGQNIXMMGRNFDVIDNLIISHELKGNINVSEYCVAXYCGFLAPSLKSSKVRXNVXVKLRVQDXYLDCGXLQYREDPRFXGYRVESEVDXELEVKIQKENDNFNISKKDIEIXLFHGENGQLNCSFENIXRNQDLXXILCKIKGIKXASXIANSSKKVRVKLGNLELYVEQESVPSXWYFLIVLPVLLVIVIFAAVGVXRHKSKELSRKQSQQLELLESELRKEIRDGFAELQMDKLDVVDSFGXVPFLDYKHFALRXFFPESGGFXHIFXEDMHNRDANDKNESLXALDALICNKSFLVXVIHXLEKQKNFSVKDRCLFASFLXIALQXKLVYLXSILEVLXRDLMEQCSNMQPKLMLRRXESVVEKLLXNWMSVCLSGFLREXVGEPFYLLVXXLNQKINKGPVDVIXCKALYXLNEDWLLWQVPEFSXVALNVVFEKIPENESADVCRNISVNVLDCDXIGQAKEKIFQAFLSKNGSPYGLQLNEIGLELQMGXRQKELLDIDSSSVILEDGIXKLNXIGHYEISNGSXIKVFKKIANFXSDVEYSDDHCHLILPDSEAFQDVQGKRHRGKHKFKVKEMYLXKLLSXKVAIHSVLEKLFRSIWSLPNSRAPFAIKYFFDFLDAQAENKKIXDPDVVHIWKXNSLPLRFWVNILKNPQFVFDIKKXPHIDGCLSVIAQAFMDAFSLXEQQLGKEAPXNKLLYAKDIPXYKEEVKSYYKAIRDLPPLSSSEMEEFLXQESKKHENEFNEEVALXEIYKYIVKYFDEILNKLERERGLEEAQKQLLHVKVLFDEKKKCKWM

SEQ ID NO: 20668 - protein, 307 aa, Homo sapiens
  MOD_RES (3)..(3): Selenocysteine
  MOD_RES (23)..(23): Selenocysteine
  MOD_RES (27)..(27): Selenocysteine
  MOD_RES (38)..(38): Selenocysteine
  MOD_RES (49)..(49): Selenocysteine
  MOD_RES (91)..(91): Selenocysteine
  MOD_RES (96)..(96): Selenocysteine
  MOD_RES (140)..(140): Selenocysteine
  MOD_RES (150)..(150): Selenocysteine
  MOD_RES (174)..(174): Selenocysteine
  MOD_RES (195)..(195): Selenocysteine
  MOD_RES (205)..(205): Selenocysteine
  MOD_RES (216)..(216): Selenocysteine
  MOD_RES (244)..(244): Selenocysteine
  MOD_RES (261)..(261): Selenocysteine
MGXRQKELLDIDSSSVILEDGIXKLNXIGHYEISNGSXIKVFKKIANFXSDVEYSDDHCHLILPDSEAFQDVQGKRHRGKHKFKVKEMYLXKLLSXKVAIHSVLEKLFRSIWSLPNSRAPFAIKYFFDFLDAQAENKKIXDPDVVHIWKXNSLPLRFWVNILKNPQFVFDIKKXPHIDGCLSVIAQAFMDAFSLXEQQLGKEAPXNKLLYAKDIPXYKEEVKSYYKAIRDLPPLSSSEMEEFLXQESKKHENEFNEEVALXEIYKYIVKYFDEILNKLERERGLEEAQKQLLHVKVLFDEKKKCKWM

SEQ ID NO: 20669 - protein, 109 aa, Homo sapiens
  MOD_RES (4)..(4): Selenocysteine
  MOD_RES (10)..(10): Selenocysteine
  MOD_RES (25)..(25): Selenocysteine
  MOD_RES (39)..(39): Selenocysteine
  MOD_RES (58)..(58): Selenocysteine
  MOD_RES (82)..(82): Selenocysteine
  MOD_RES (84)..(84): Selenocysteine
  MOD_RES (98)..(98): Selenocysteine
MNRXVLFLGXGDGQLLKVILGENLXSNCPEVIYEIKEEXPVFYKLVPDPVKNIYIYLXAGKEVRRIRVANCNKHKSCSECLXAXDPHCGWCHSLQRCXFQGDCVHSENL

SEQ ID NO: 20670 - protein, 103 aa, Homo sapiens
  MOD_RES (13)..(13): Selenocysteine
  MOD_RES (59)..(59): Selenocysteine
  MOD_RES (72)..(72): Selenocysteine
  MOD_RES (88)..(88): Selenocysteine
  MOD_RES (102)..(102): Selenocysteine
MQHLCLLAAVGVXRHKSKELSRKQSQQLELLESELRKEIRDGFAELQMDKLDVVDSFGXVPFLDYKHFALRXFFPENRDANDKNESLXALDALICNKSFLVXV

SEQ ID NO: 20671 - protein, 615 aa, Homo sapiens
  MOD_RES (13)..(13): Selenocysteine
  MOD_RES (59)..(59): Selenocysteine
  MOD_RES (72)..(72): Selenocysteine
  MOD_RES (81)..(81): Selenocysteine
  MOD_RES (85)..(85): Selenocysteine
  MOD_RES (101)..(101): Selenocysteine
  MOD_RES (115)..(115): Selenocysteine
  MOD_RES (119)..(119): Selenocysteine
  MOD_RES (139)..(139): Selenocysteine
  MOD_RES (144)..(144): Selenocysteine
  MOD_RES (150)..(150): Selenocysteine
  MOD_RES (157)..(157): Selenocysteine
  MOD_RES (176)..(176): Selenocysteine
  MOD_RES (185)..(185): Selenocysteine
  MOD_RES (199)..(199): Selenocysteine
  MOD_RES (209)..(210): Selenocysteine
  MOD_RES (224)..(224): Selenocysteine
  MOD_RES (230)..(230): Selenocysteine
  MOD_RES (245)..(245): Selenocysteine
  MOD_RES (276)..(276): Selenocysteine
  MOD_RES (311)..(311): Selenocysteine
  MOD_RES (331)..(331): Selenocysteine
  MOD_RES (335)..(335): Selenocysteine
  MOD_RES (346)..(346): Selenocysteine
  MOD_RES (357)..(357): Selenocysteine
  MOD_RES (399)..(399): Selenocysteine
  MOD_RES (404)..(404): Selenocysteine
  MOD_RES (448)..(448): Selenocysteine
  MOD_RES (458)..(458): Selenocysteine
  MOD_RES (482)..(482): Selenocysteine
  MOD_RES (503)..(503): Selenocysteine
  MOD_RES (513)..(513): Selenocysteine
  MOD_RES (524)..(524): Selenocysteine
  MOD_RES (552)..(552): Selenocysteine
  MOD_RES (569)..(569): Selenocysteine
MQHLCLLAAVGVXRHKSKELSRKQSQQLELLESELRKEIRDGFAELQMDKLDVVDSFGXVPFLDYKHFALRXFFPESGGFXHIFXEDMHNRDANDKNESLXALDALICNKSFLVXVIHXLEKQKNFSVKDRCLFASFLXIALQXKLVYLXSILEVLXRDLMEQCSNMQPKLMLRRXESVVEKLLXNWMSVCLSGFLREXVGEPFYLLVXXLNQKINKGPVDVIXCKALYXLNEDWLLWQVPEFSXVALNVVFEKIPENESADVCRNISVNVLDCDXIGQAKEKIFQAFLSKNGSPYGLQLNEIGLELQMGXRQKELLDIDSSSVILEDGIXKLNXIGHYEISNGSXIKVFKKIANFXSDVEYSDDHCHLILPDSEAFQDVQGKRHRGKHKFKVKEMYLXKLLSXKVAIHSVLEKLFRSIWSLPNSRAPFAIKYFFDFLDAQAENKKIXDPDVVHIWKXNSLPLRFWVNILKNPQFVFDIKKXPHIDGCLSVIAQAFMDAFSLXEQQLGKEAPXNKLLYAKDIPXYKEEVKSYYKAIRDLPPLSSSEMEEFLXQESKKHENEFNEEVALXEIYKYIVKYFDEILNKLERERGLEEAQKQLLHVKVLFDEKKKCKWM

SEQ ID NO: 20672 - protein, 416 aa, Homo sapiens
  MOD_RES (2)..(2): Selenocysteine
  MOD_RES (7)..(7): Selenocysteine
  MOD_RES (53)..(53): Selenocysteine
  MOD_RES (66)..(66): Selenocysteine
  MOD_RES (75)..(75): Selenocysteine
  MOD_RES (79)..(79): Selenocysteine
  MOD_RES (95)..(95): Selenocysteine
  MOD_RES (109)..(109): Selenocysteine
  MOD_RES (113)..(113): Selenocysteine
  MOD_RES (133)..(133): Selenocysteine
  MOD_RES (138)..(138): Selenocysteine
  MOD_RES (144)..(144): Selenocysteine
  MOD_RES (151)..(151): Selenocysteine
  MOD_RES (170)..(170): Selenocysteine
  MOD_RES (179)..(179): Selenocysteine
  MOD_RES (193)..(193): Selenocysteine
  MOD_RES (203)..(204): Selenocysteine
  MOD_RES (218)..(218): Selenocysteine
  MOD_RES (224)..(224): Selenocysteine
  MOD_RES (239)..(239): Selenocysteine
  MOD_RES (270)..(270): Selenocysteine
  MOD_RES (305)..(305): Selenocysteine
  MOD_RES (325)..(325): Selenocysteine
  MOD_RES (329)..(329): Selenocysteine
  MOD_RES (340)..(340): Selenocysteine
  MOD_RES (351)..(351): Selenocysteine
  MOD_RES (393)..(393): Selenocysteine
  MOD_RES (398)..(398): Selenocysteine
MXAVGVXRHKSKELSRKQSQQLELLESELRKEIRDGFAELQMDKLDVVDSFGXVPFLDYKHFALRXFFPESGGFXHIFXEDMHNRDANDKNESLXALDALICNKSFLVXVIHXLEKQKNFSVKDRCLFASFLXIALQXKLVYLXSILEVLXRDLMEQCSNMQPKLMLRRXESVVEKLLXNWMSVCLSGFLREXVGEPFYLLVXXLNQKINKGPVDVIXCKALYXLNEDWLLWQVPEFSXVALNVVFEKIPENESADVCRNISVNVLDCDXIGQAKEKIFQAFLSKNGSPYGLQLNEIGLELQMGXRQKELLDIDSSSVILEDGIXKLNXIGHYEISNGSXIKVFKKIANFXSDVEYSDDHCHLILPDSEAFQDVQGKRHRGKHKFKVKEMYLXKLLSXKPSSSLLGKHPEEPSVCL

SEQ ID NO: 20673 - protein, 169 aa, Homo sapiens
  MOD_RES (26)..(26): Selenocysteine
  MOD_RES (35)..(35): Selenocysteine
  MOD_RES (46)..(46): Selenocysteine
  MOD_RES (52)..(52): Selenocysteine
  MOD_RES (75)..(75): Selenocysteine
  MOD_RES (100)..(100): Selenocysteine
  MOD_RES (117)..(117): Selenocysteine
  MOD_RES (136)..(136): Selenocysteine
  MOD_RES (143)..(143): Selenocysteine
  MOD_RES (156)..(156): Selenocysteine
LQPEQLDCGAAHLQHPLSILQPLKAXPVFRAPGLXSVAVASVNNYXAVFLGXVNGRLLKINLNESMQVVSRRVVXVAYGEPVHHVMQFDPADSGYLYLMXSHQMARVKVAACNVHSXCGDCVGAADAYCGWCALEXRQQHFWXSASEGPSRCPAMXVLPSEIDVRQEYP

SEQ ID NO: 20674 - protein, 1925 aa, Homo sapiens
  MOD_RES (25)..(25): Selenocysteine
  MOD_RES (57)..(57): Selenocysteine
  MOD_RES (59)..(59): Selenocysteine
  MOD_RES (70)..(70): Selenocysteine
  MOD_RES (121)..(121): Selenocysteine
  MOD_RES (174)..(174): Selenocysteine
  MOD_RES (191)..(191): Selenocysteine
  MOD_RES (212)..(212): Selenocysteine
  MOD_RES (214)..(214): Selenocysteine
  MOD_RES (235)..(235): Selenocysteine
  MOD_RES (245)..(245): Selenocysteine
  MOD_RES (254)..(254): Selenocysteine
  MOD_RES (335)..(335): Selenocysteine
  MOD_RES (405)..(405): Selenocysteine
  MOD_RES (426)..(426): Selenocysteine
  MOD_RES (463)..(463): Selenocysteine
  MOD_RES (472)..(472): Selenocysteine
  MOD_RES (483)..(483): Selenocysteine
  MOD_RES (489)..(489): Selenocysteine
  MOD_RES (512)..(512): Selenocysteine
  MOD_RES (537)..(537): Selenocysteine
  MOD_RES (554)..(554): Selenocysteine
  MOD_RES (573)..(573): Selenocysteine
  MOD_RES (576)..(576): Selenocysteine
  MOD_RES (582)..(582): Selenocysteine
  MOD_RES (591)..(591): Selenocysteine
  MOD_RES (604)..(604): Selenocysteine
  MOD_RES (645)..(645): Selenocysteine
  MOD_RES (680)..(680): Selenocysteine
  MOD_RES (698)..(698): Selenocysteine
  MOD_RES (705)..(705): Selenocysteine
  MOD_RES (712)..(712): Selenocysteine
  MOD_RES (715)..(715): Selenocysteine
  MOD_RES (747)..(747): Selenocysteine
  MOD_RES (755)..(755): Selenocysteine
  MOD_RES (765)..(765): Selenocysteine
  MOD_RES (778)..(778): Selenocysteine
  MOD_RES (815)..(816): Selenocysteine
  MOD_RES (843)..(843): Selenocysteine
  MOD_RES (887)..(887): Selenocysteine
  MOD_RES (907)..(907): Selenocysteine
  MOD_RES (910)..(910): Selenocysteine
  MOD_RES (942)..(942): Selenocysteine
  MOD_RES (951)..(951): Selenocysteine
  MOD_RES (963)..(963): Selenocysteine
  MOD_RES (989)..(989): Selenocysteine
  MOD_RES (997)..(997): Selenocysteine
  MOD_RES (1000)..(1000): Selenocysteine
  MOD_RES (1019)..(1019): Selenocysteine
  MOD_RES (1023)..(1023): Selenocysteine
  MOD_RES (1028)..(1028): Selenocysteine
  MOD_RES (1030)..(1030): Selenocysteine
  MOD_RES (1035)..(1035): Selenocysteine
  MOD_RES (1062)..(1062): Selenocysteine
  MOD_RES (1072)..(1072): Selenocysteine
  MOD_RES (1086)..(1086): Selenocysteine
  MOD_RES (1088)..(1088): Selenocysteine
  MOD_RES (1112)..(1112): Selenocysteine
  MOD_RES (1120)..(1120): Selenocysteine
  MOD_RES (1123)..(1123): Selenocysteine
  MOD_RES (1180)..(1180): Selenocysteine
  MOD_RES (1196)..(1196): Selenocysteine
  MOD_RES (1250)..(1250): Selenocysteine
  MOD_RES (1259)..(1259): Selenocysteine
  MOD_RES (1262)..(1262): Selenocysteine
  MOD_RES (1270)..(1270): Selenocysteine
  MOD_RES (1295)..(1295): Selenocysteine
  MOD_RES (1307)..(1307): Selenocysteine
  MOD_RES (1331)..(1331): Selenocysteine
  MOD_RES (1334)..(1334): Selenocysteine
  MOD_RES (1337)..(1337): Selenocysteine
  MOD_RES (1356)..(1356): Selenocysteine
  MOD_RES (1358)..(1358): Selenocysteine
  MOD_RES (1377)..(1377): Selenocysteine
  MOD_RES (1389)..(1389): Selenocysteine
  MOD_RES (1449)..(1449): Selenocysteine
  MOD_RES (1460)..(1460): Selenocysteine
  MOD_RES (1486)..(1486): Selenocysteine
  MOD_RES (1495)..(1495): Selenocysteine
  MOD_RES (1509)..(1509): Selenocysteine
  MOD_RES (1534)..(1534): Selenocysteine
  MOD_RES (1540)..(1540): Selenocysteine
  MOD_RES (1577)..(1577): Selenocysteine
  MOD_RES (1579)..(1579): Selenocysteine
  MOD_RES (1581)..(1581): Selenocysteine
  MOD_RES (1615)..(1615): Selenocysteine
  MOD_RES (1626)..(1626): Selenocysteine
  MOD_RES (1638)..(1638): Selenocysteine
  MOD_RES (1661)..(1661): Selenocysteine
  MOD_RES (1670)..(1670): Selenocysteine
  MOD_RES (1680)..(1680): Selenocysteine
  MOD_RES (1705)..(1705): Selenocysteine
  MOD_RES (1710)..(1710): Selenocysteine
  MOD_RES (1713)..(1713): Selenocysteine
  MOD_RES (1758)..(1758): Selenocysteine
  MOD_RES (1764)..(1764): Selenocysteine
  MOD_RES (1788)..(1788): Selenocysteine
  MOD_RES (1819)..(1819): Selenocysteine
  MOD_RES (1846)..(1846): Selenocysteine
  MOD_RES (1870)..(1870): Selenocysteine
  MOD_RES (1897)..(1897): Selenocysteine
  MOD_RES (1901)..(1901): Selenocysteine
MAPRAAGGAPLSARAAAASPPPFQXPPRCPVPLLLLLLLGAARAGALEIQRRFPSPXPXNNFALDGAAGXVYLAAVNRLYQLSGANLSLEAEAAVGPVPDSPLCHAPQLPQASCEHPRRLXDNYNKILQLDPGQGLVVVCGSIYQGFCQLRRRGNISAVAVRFPPAAPPAEPVXVFPSMLNVAANHPNASXVGLVLPPAAGAGGSRLLVGAXYXGYGSSFFPRNRSLEDHRFENXPEIAIRSLDXRGDLAKLFXFDLNPSDDNILKIKQGAKEQHKLGFVSAFLHPSDPPPGAQSYAYLALNSEARAGDKESQARSLLARICLPHGAGGDAKKLXESYIQLGLQCAGGAGRGDLYSRLVSVFPARERLFAVFERPQGSPAARAAPAALCAFRFADVRAAIRAARXACFVEPAPDVVAVLDSVVQGXGPACERKLNIQLQPEQLDCGAAHLQHPLSILQPLKAXPVFRAPGLXSVAVASVNNYXAVFLGXVNGRLLKINLNESMQVVSRRVVXVAYGEPVHHVMQFDPADSGYLYLMXSHQMARVKVAACNVHSXCGDCVGAADAYCGWCALEXRCXLQQDCXNSSQQHFWXSASEGPSRCPAMXVLPSEIDVRQEYPGMILQISGSLPSLSGMEMACDYGNNIRXVARVPGPAFGHQIAYCNLLPRDQFPPFPPNQDHVXVEMSVRVNGRNIVKANFXIYDCSRXAQVYPHXACXSCLSAQWPCFWCSQQHSCVSNQSRCEASPNPXSPQDCPRXLLSPLAPVPXGGSQNILVPLANXAFFQGAALECSFGLEEIFEAVWVNESVVRCDQVVLHXXRKSQVFPLSLQLKGRPARFLDSPEPMXVMVYNCAMGSPDCSQCLGREDLGHLCMWSDGCRLRGPLQPMAGXCPAPEIHAIEPLSGPLDGGXLLXIRGRNLGRRLSDVAHGVWIGGVACEPLPDRYXVSEEIVCVXGPAPGPLSGVVXVNASKEGKSRDRFSYVLPLVHSLEPXMGPKAGGXRIXIHGNDLHVGSELQVLVNDXDPCXELMRXDXSIACXMPEGALPAPVPVCVRFERRGCVHGNLXFWYMQNPVIXAISPRRSPVSGGRXIXVAGERFHMVQNVSMAVHHIGREPXLCKVLNSXLIXCPSPGALSNASAPVDFFINGRAYADEVAVAEELLDPEEAQRGSRFRLDYLPNPQFSXAKREKWIKHHPGEPLXLVIHKEQDSLGLQSHEYRVKIGQVSCDIQIVSDRIIHCSVNESLGAAVGQLPIXIQVGNFNQXIAXLQLGGSEXAIIVSIVICSVLLLLSVVALFVFCXKSRRAERYWQKXLLQMEEMESQIREEIRKGFAELQXDMXDLXKELNRSQGIPFLEYKHFVXRXFFPKCSSLYEERYVLPSQXLNSQGSSQAQEXHPLLGEWKIPESCRPNMEEGISLFSSLLNNKHFLIVFVHALEQQKDFAVRDRCSLASLLXIALHGKLEYYXSIMKELLVDLIDASAAKNPKLMLRRXESVVEKMLXNWMSICMYSCLREXVGEPFFLLLCAIKQQINKGSIDAIXGKARYXLSEEWLLRENIEAKPRNLNVSFQGCGMDSLSVRAMDXDXLXQVKEKILEAFCKNVPYSQWPRAEDVDLEWFASSXQSYILRDLDDXSVVEDGRKKLNXLAHYKIPEGASLAMSLIDKKDNXLGRVKDLDXEKYFHLVLPXDELAEPKKSHRQSHRKKVLPEIYLXRLLSXKGXLQKFLDDLFKAILSIREDKPPLAVKYFFDFLEEQAEKRGISDPDXLHIWKXNSLPLRFWVNILKNPQFVFDIDKXDHIDACLSVIAQAFIDACSISDLQLGKDSPXNKLLYAKEIPEYRKIVQRYYKQIQDMXPLSEQEMNAHLAEESRKYQNEFNXNVAMAEIYKYAKRYRPQIMAALEANPXARRXQLQHKFEQVVALMEDNIYECYSEA

SEQ ID NO: 20675 - protein, 55 aa, Homo sapiens
  MOD_RES (2)..(2): Selenocysteine
  MOD_RES (26)..(26): Selenocysteine
MXPLSEQEMNAHLAEESRKYQNEFNXNVAMAEIYKYAKRYRPQLLYIKKRIMHQL

SEQ ID NO: 20676 - protein, 380 aa, Homo sapiens
  MOD_RES (1)..(1): Any amino acid
  MOD_RES (44)..(44): Selenocysteine
  MOD_RES (55)..(55): Selenocysteine
  MOD_RES (81)..(81): Selenocysteine
  MOD_RES (90)..(90): Selenocysteine
  MOD_RES (104)..(104): Selenocysteine
  MOD_RES (129)..(129): Selenocysteine
  MOD_RES (135)..(135): Selenocysteine
  MOD_RES (172)..(172): Selenocysteine
  MOD_RES (174)..(174): Selenocysteine
  MOD_RES (176)..(176): Selenocysteine
  MOD_RES (210)..(210): Selenocysteine
  MOD_RES (221)..(221): Selenocysteine
  MOD_RES (233)..(233): Selenocysteine
  MOD_RES (256)..(256): Selenocysteine
  MOD_RES (265)..(265): Selenocysteine
  MOD_RES (275)..(275): Selenocysteine
  MOD_RES (300)..(300): Selenocysteine
  MOD_RES (305)..(305): Selenocysteine
  MOD_RES (308)..(308): Selenocysteine
  MOD_RES (353)..(353): Selenocysteine
  MOD_RES (359)..(359): Selenocysteine
XEEGISLFSSLLNNKHFLIVFVHALEQQKDFAVRDRCSLASLLXIALHGKLEYYXSIMKELLVDLIDASAAKNPKLMLRRXESVVEKMLXNWMSICMYSCLREXVGEPFFLLLCAIKQQINKGSIDAIXGKARYXLSEEWLLRENIEAKPRNLNVSFQGCGMDSLSVRAMDXDXLXQVKEKILEAFCKNVPYSQWPRAEDVDLEWFASSXQSYILRDLDDXSVVEDGRKKLNXLAHYKIPEGASLAMSLIDKKDNXLGRVKDLDXEKYFHLVLPXDELAEPKKSHRQSHRKKVLPEIYLXRLLSXKGXLQKFLDDLFKAILSIREDKPPLAVKYFFDFLEEQAEKRGISDPDXLHIWKXNRWRPSSPVLGEHPEEPPVCL

SEQ ID NO: 20677 - protein, 112 aa, Homo sapiens
  MOD_RES (1)..(1): Any amino acid
  MOD_RES (5)..(5): Selenocysteine
  MOD_RES (30)..(30): Selenocysteine
  MOD_RES (47)..(47): Selenocysteine
  MOD_RES (66)..(66): Selenocysteine
  MOD_RES (69)..(69): Selenocysteine
  MOD_RES (75)..(75): Selenocysteine
  MOD_RES (84)..(84): Selenocysteine
  MOD_RES (97)..(97): Selenocysteine
  MOD_RES (111)..(112): Selenocysteine
XRVVXVAYGEPVHHVMQFDPADSGYLYLMXSHQMARVKVAACNVHSXCGDCVGAADAYCGWCALEXRCXLQQDCXNSSQQHFWXSASEGPSRCPAMXVLPSEIDVRQEYPXX

SEQ ID NO: 20678 - protein, 231 aa, Homo sapiens
  MOD_RES (1)..(1): Any amino acid
  MOD_RES (14)..(14): Selenocysteine
  MOD_RES (24)..(24): Selenocysteine
  MOD_RES (49)..(49): Selenocysteine
  MOD_RES (54)..(54): Selenocysteine
  MOD_RES (57)..(57): Selenocysteine
  MOD_RES (102)..(102): Selenocysteine
  MOD_RES (108)..(108): Selenocysteine
  MOD_RES (132)..(132): Selenocysteine
  MOD_RES (163)..(163): Selenocysteine
  MOD_RES (190)..(190): Selenocysteine
  MOD_RES (214)..(214): Selenocysteine
XSLHPGSLLKDLDXEKYFHLVLPXDELAEPKKSHRQSHRKKVLPEIYLXRLLSXKGXLQKFLDDLFKAILSIREDKPPLAVKYFFDFLEEQAEKRGISDPDXLHIWKXNSLPLRFWVNILKNPQFVFDIDKXDHIDACLSVIAQAFIDACSISDLQLGKDSPXNKLLYAKEIPEYRKIVQRYYKQIQDMXPLSEQEMNAHLAEESRKYQNEFNXNVAMAEIYKYAKRYRPQ

SEQ ID NO: 20679 - protein, 54 aa, Homo sapiens
  MOD_RES (27)..(27): Selenocysteine
  MOD_RES (54)..(54): Selenocysteine
MPGKKARKNAQPSPARAPAELEVECAXQLRRFGDKLNFRQKLLNLISKLFCSGX

SEQ ID NO: 20680 - protein, 136 aa, Homo sapiens
  MOD_RES (24)..(24): Selenocysteine
  MOD_RES (27)..(27): Selenocysteine
  MOD_RES (43)..(43): Selenocysteine
  MOD_RES (79)..(79): Selenocysteine
  MOD_RES (86)..(86): Selenocysteine
  MOD_RES (92)..(92): Selenocysteine
  MOD_RES (99)..(99): Selenocysteine
  MOD_RES (106)..(106): Selenocysteine
  MOD_RES (110)..(110): Selenocysteine
  MOD_RES (125)..(125): Selenocysteine
MPGKKARKNAQPSPARAPAGPAGXAGXARDQAGFAIGMQLRFXRGKKLLSSSLSSSPLALPRGHEEQVQVAGSRVCYSXQEIWRQXELPAEXSESDIQXLLLRNLXASKXCMRGLLQKSFLRRCXFHQFEERLHCN

SEQ ID NO: 20681 - protein, 165 aa, Homo sapiens
  MOD_RES (14)..(14): Selenocysteine
  MOD_RES (41)..(41): Selenocysteine
  MOD_RES (53)..(53): Selenocysteine
  MOD_RES (85)..(85): Selenocysteine
  MOD_RES (123)..(123): Selenocysteine
  MOD_RES (126)..(126): Selenocysteine
MAKMNLSSYILILXFSLFSQGILLSASKSIRNLDDDMVFNXFRLGKGFQKEDXAEKSVIAPSLEQYKNDESSFMNEEENKVSKNXGSKHNFLNHGLPLNLAIKPYLALKGSVAFPAENGVQNXESXQEKREIGDEENSAKFPIGRRDFDMLRCMLGRVYRPCWQV

SEQ ID NO: 20682 - protein, 252 aa, Homo sapiens
  MOD_RES (24)..(24): Selenocysteine
  MOD_RES (63)..(63): Selenocysteine
  MOD_RES (81)..(81): Selenocysteine
  MOD_RES (101)..(101): Selenocysteine
  MOD_RES (114)..(114): Selenocysteine
  MOD_RES (131)..(131): Selenocysteine
  MOD_RES (155)..(155): Selenocysteine
  MOD_RES (182)..(182): Selenocysteine
  MOD_RES (196)..(196): Selenocysteine
  MOD_RES (224)..(224): Selenocysteine
  MOD_RES (229)..(229): Selenocysteine
MAELEFVQIIIIVVVMMVMVVVIXCLLSHYKLSARSFISRHSQGRRREDALSSEGCLWPSESXVSGNGIPEPQVYAPPRPXDRLAVPPFAQRERFHRFQPXYPYLQHEIDLPPXISLSDGEEPPPYQGPCXLQLRDPEQQLELNRESVRAPPNRXIFDSDLMDSARLGGPCPPSSNSGISAXCYGSGGRMEGPPPXYSEVIGHYPGSSFQHQQSSGPPSLLEGXRLHHXHIAPLESAAIWSKEKDKQKGHPL

SEQ ID NO: 20683 - protein, 227 aa, Homo sapiens
  MOD_RES (10)..(10): Selenocysteine
  MOD_RES (23)..(23): Selenocysteine
  MOD_RES (69)..(69): Selenocysteine
  MOD_RES (77)..(77): Selenocysteine
  MOD_RES (116)..(116): Selenocysteine
  MOD_RES (155)..(155): Selenocysteine
  MOD_RES (173)..(173): Selenocysteine
  MOD_RES (193)..(193): Selenocysteine
  MOD_RES (206)..(206): Selenocysteine
  MOD_RES (223)..(223): Selenocysteine
MHRLMGVNSXAAAAAGQPNVSCXCNCKRSLFQSMEISCHGFPVCKSHQHQEWKSLCWSLRSPGGASSIXGFGSMKVXNPAMNLPECQWLRIQKAELEFVQIIIIVVVMMVMVVVIXCLLSHYKLSARSFISRHSQGRRREDALSSEGCLWPSESXVSGNGIPEPQVYAPPRPXDRLAVPPFAQRERFHRFQPXYPYLQHEIDLPPXISLSDGEEPPPYQGPCXLQLR

SEQ ID NO: 20684 - protein, 287 aa, Homo sapiens
  MOD_RES (10)..(10): Selenocysteine
  MOD_RES (23)..(23): Selenocysteine
  MOD_RES (37)..(37): Selenocysteine
  MOD_RES (59)..(59): Selenocysteine
  MOD_RES (98)..(98): Selenocysteine
  MOD_RES (116)..(116): Selenocysteine
  MOD_RES (136)..(136): Selenocysteine
  MOD_RES (149)..(149): Selenocysteine
  MOD_RES (166)..(166): Selenocysteine
  MOD_RES (190)..(190): Selenocysteine
  MOD_RES (217)..(217): Selenocysteine
  MOD_RES (231)..(231): Selenocysteine
  MOD_RES (259)..(259): Selenocysteine
  MOD_RES (264)..(264): Selenocysteine
MHRLMGVNSXAAAAAGQPNVSCXCNCKRSLFQSMEIXELEFVQIIIIVVVMMVMVVVIXCLLSHYKLSARSFISRHSQGRRREDALSSEGCLWPSESXVSGNGIPEPQVYAPPRPXDRLAVPPFAQRERFHRFQPXYPYLQHEIDLPPXISLSDGEEPPPYQGPCXLQLRDPEQQLELNRESVRAPPNRXIFDSDLMDSARLGGPCPPSSNSGISAXCYGSGGRMEGPPPXYSEVIGHYPGSSFQHQQSSGPPSLLEGXRLHHXHIAPLESAAIWSKEKDKQKGHPL

SEQ ID NO: 20685 - protein, 237 aa, Homo sapiens
  MOD_RES (9)..(9): Selenocysteine
  MOD_RES (48)..(48): Selenocysteine
  MOD_RES (66)..(66): Selenocysteine
  MOD_RES (86)..(86): Selenocysteine
  MOD_RES (99)..(99): Selenocysteine
  MOD_RES (116)..(116): Selenocysteine
  MOD_RES (140)..(140): Selenocysteine
  MOD_RES (167)..(167): Selenocysteine
  MOD_RES (181)..(181): Selenocysteine
  MOD_RES (209)..(209): Selenocysteine
  MOD_RES (214)..(214): Selenocysteine
MMVMVVVIXCLLSHYKLSARSFISRHSQGRRREDALSSEGCLWPSESXVSGNGIPEPQVYAPPRPXDRLAVPPFAQRERFHRFQPXYPYLQHEIDLPPXISLSDGEEPPPYQGPCXLQLRDPEQQLELNRESVRAPPNRXIFDSDLMDSARLGGPCPPSSNSGISAXCYGSGGRMEGPPPXYSEVIGHYPGSSFQHQQSSGPPSLLEGXRLHHXHIAPLESAAIWSKEKDKQKGHPL

SEQ ID NO: 20686 - protein, 208 aa, Homo sapiens
  MOD_RES (31)..(31): Selenocysteine
  MOD_RES (70)..(70): Selenocysteine
  MOD_RES (88)..(88): Selenocysteine
  MOD_RES (108)..(108): Selenocysteine
  MOD_RES (121)..(121): Selenocysteine
  MOD_RES (138)..(138): Selenocysteine
  MOD_RES (162)..(162): Selenocysteine
  MOD_RES (189)..(189): Selenocysteine
  MOD_RES (203)..(203): Selenocysteine
MPAIPAHGAELEFVQIIIIVVVMMVMVVVIXCLLSHYKLSARSFISRHSQGRRREDALSSEGCLWPSESXVSGNGIPEPQVYAPPRPXDRLAVPPFAQRERFHRFQPXYPYLQHEIDLPPXISLSDGEEPPPYQGPCXLQLRDPEQQLELNRESVRAPPNRXIFDSDLMDSARLGGPCPPSSNSGISAXCYGSGGRMEGPPPXYSEVI

SEQ ID NO: 20687 - protein, 423 aa, Homo sapiens
  MOD_RES (22)..(22): Selenocysteine
  MOD_RES (28)..(28): Selenocysteine
  MOD_RES (42)..(42): Selenocysteine
  MOD_RES (75)..(75): Selenocysteine
  MOD_RES (101)..(101): Selenocysteine
  MOD_RES (130)..(130): Selenocysteine
  MOD_RES (181)..(181): Selenocysteine
  MOD_RES (184)..(184): Selenocysteine
  MOD_RES (196)..(196): Selenocysteine
  MOD_RES (198)..(198): Selenocysteine
  MOD_RES (200)..(200): Selenocysteine
  MOD_RES (244)..(244): Selenocysteine
  MOD_RES (275)..(275): Selenocysteine
  MOD_RES (328)..(328): Selenocysteine
  MOD_RES (373)..(373): Selenocysteine
  MOD_RES (391)..(391): Selenocysteine
  MOD_RES (409)..(409): Selenocysteine
MEPAPARSPRPQQDPARPQEPXMPPPEXPSEGRQPSPSPSPXERAPASEEEFQFLRCQQCQAEAKCPKLLPCLHXLCSGCLEASGMQCPICQAPWPLGADXPALDNVFFESLQRRLSVYRQIVDAQAVCXRCKESADFWCFECEQLLCAKCFEAHQWFLKHEARPLAELRNQSVREFLDGXRKXNNIFCSNPNHRXPXLXSIYCRGCSKPLCCSCALLDSSHSELKCDISAEIQQRQEELDAMXQALQEQDSAFGAVHAQMHAAVGQLGRARAEXEELIRERVRQVVAHVRAQERELLEAVDARYQRDYEEMASRLGRLDAVLQRIRXGSALVQRMKCYASDQEVLDMHGFLRQALCRLRQEEPQSLQAAVRXDGFDEFKVRLQDLSSCIXQGKDAAVSKKASPEAASXPRDPIDVDLRNALW

SEQ ID NO: 20688 - protein, 435 aa, Homo sapiens
  MOD_RES (22)..(22): Selenocysteine
  MOD_RES (28)..(28): Selenocysteine
  MOD_RES (42)..(42): Selenocysteine
  MOD_RES (75)..(75): Selenocysteine
  MOD_RES (101)..(101): Selenocysteine
  MOD_RES (130)..(130): Selenocysteine
  MOD_RES (181)..(181): Selenocysteine
  MOD_RES (184)..(184): Selenocysteine
  MOD_RES (196)..(196): Selenocysteine
  MOD_RES (198)..(198): Selenocysteine
  MOD_RES (200)..(200): Selenocysteine
  MOD_RES (244)..(244): Selenocysteine
  MOD_RES (275)..(275): Selenocysteine
  MOD_RES (328)..(328): Selenocysteine
  MOD_RES (373)..(373): Selenocysteine
  MOD_RES (391)..(391): Selenocysteine
  MOD_RES (409)..(409): Selenocysteine
  MOD_RES (427)..(427): Selenocysteine
  MOD_RES (434)..(434): Selenocysteine
MEPAPARSPRPQQDPARPQEPXMPPPEXPSEGRQPSPSPSPXERAPASEEEFQFLRCQQCQAEAKCPKLLPCLHXLCSGCLEASGMQCPICQAPWPLGADXPALDNVFFESLQRRLSVYRQIVDAQAVCXRCKESADFWCFECEQLLCAKCFEAHQWFLKHEARPLAELRNQSVREFLDGXRKXNNIFCSNPNHRXPXLXSIYCRGCSKPLCCSCALLDSSHSELKCDISAEIQQRQEELDAMXQALQEQDSAFGAVHAQMHAAVGQLGRARAEXEELIRERVRQVVAHVRAQERELLEAVDARYQRDYEEMASRLGRLDAVLQRIRXGSALVQRMKCYASDQEVLDMHGFLRQALCRLRQEEPQSLQAAVRXDGFDEFKVRLQDLSSCIXQGKDAAVSKKASPEAASXPRDPIDVDLLPPPAHALXGPAQSSXH

SEQ ID NO: 20689 - protein, 560 aa, Homo sapiens
  MOD_RES (22)..(22): Selenocysteine
  MOD_RES (28)..(28): Selenocysteine
  MOD_RES (42)..(42): Selenocysteine
  MOD_RES (75)..(75): Selenocysteine
  MOD_RES (101)..(101): Selenocysteine
  MOD_RES (130)..(130): Selenocysteine
  MOD_RES (181)..(181): Selenocysteine
  MOD_RES (184)..(184): Selenocysteine
  MOD_RES (196)..(196): Selenocysteine
  MOD_RES (198)..(198): Selenocysteine
  MOD_RES (200)..(200): Selenocysteine
  MOD_RES (244)..(244): Selenocysteine
  MOD_RES (275)..(275): Selenocysteine
  MOD_RES (328)..(328): Selenocysteine
  MOD_RES (373)..(373): Selenocysteine
  MOD_RES (391)..(391): Selenocysteine
  MOD_RES (409)..(409): Selenocysteine
  MOD_RES (471)..(473): Selenocysteine
  MOD_RES (482)..(482): Selenocysteine
  MOD_RES (513)..(513): Selenocysteine
MEPAPARSPRPQQDPARPQEPXMPPPEXPSEGRQPSPSPSPXERAPASEEEFQFLRCQQCQAEAKCPKLLPCLHXLCSGCLEASGMQCPICQAPWPLGADXPALDNVFFESLQRRLSVYRQIVDAQAVCXRCKESADFWCFECEQLLCAKCFEAHQWFLKHEARPLAELRNQSVREFLDGXRKXNNIFCSNPNHRXPXLXSIYCRGCSKPLCCSCALLDSSHSELKCDISAEIQQRQEELDAMXQALQEQDSAFGAVHAQMHAAVGQLGRARAEXEELIRERVRQVVAHVRAQERELLEAVDARYQRDYEEMASRLGRLDAVLQRIRXGSALVQRMKCYASDQEVLDMHGFLRQALCRLRQEEPQSLQAAVRXDGFDEFKVRLQDLSSCIXQGKDAAVSKKASPEAASXPRDPIDVDLPEEAERVKAQVQALGLAEAQPMAVVQSVPGAHPVPVYAFSIKGPSYGEDVSNXXXAQKRKCSQXQCPRKVIKMESEEGKEARLARSSPEQPRPSXSKAVSPPHLDGPPSPRSPVIGSEVFLPNSNHVASGAGEAGRERNALW

SEQ ID NO: 20690 - protein, 568 aa, Homo sapiens
  MOD_RES (22)..(22): Selenocysteine
  MOD_RES (28)..(28): Selenocysteine
  MOD_RES (42)..(42): Selenocysteine
  MOD_RES (75)..(75): Selenocysteine
  MOD_RES (101)..(101): Selenocysteine
  MOD_RES (130)..(130): Selenocysteine
  MOD_RES (181)..(181): Selenocysteine
  MOD_RES (184)..(184): Selenocysteine
  MOD_RES (196)..(196): Selenocysteine
  MOD_RES (198)..(198): Selenocysteine
  MOD_RES (200)..(200): Selenocysteine
  MOD_RES (244)..(244): Selenocysteine
  MOD_RES (275)..(275): Selenocysteine
  MOD_RES (328)..(328): Selenocysteine
  MOD_RES (373)..(373): Selenocysteine
  MOD_RES (391)..(391): Selenocysteine
  MOD_RES (409)..(409): Selenocysteine
  MOD_RES (423)..(425): Selenocysteine
  MOD_RES (434)..(434): Selenocysteine
  MOD_RES (465)..(465): Selenocysteine
MEPAPARSPRPQQDPARPQEPXMPPPEXPSEGRQPSPSPSPXERAPASEEEFQFLRCQQCQAEAKCPKLLPCLHXLCSGCLEASGMQCPICQAPWPLGADXPALDNVFFESLQRRLSVYRQIVDAQAVCXRCKESADFWCFECEQLLCAKCFEAHQWFLKHEARPLAELRNQSVREFLDGXRKXNNIFCSNPNHRXPXLXSIYCRGCSKPLCCSCALLDSSHSELKCDISAEIQQRQEELDAMXQALQEQDSAFGAVHAQMHAAVGQLGRARAEXEELIRERVRQVVAHVRAQERELLEAVDARYQRDYEEMASRLGRLDAVLQRIRXGSALVQRMKCYASDQEVLDMHGFLRQALCRLRQEEPQSLQAAVRXDGFDEFKVRLQDLSSCIXQGKDAAVSKKASPEAASXPRDPIDVDLDVSNXXXAQKRKCSQXQCPRKVIKMESEEGKEARLARSSPEQPRPSXSKAVSPPHLDGPPSPRSPVIGSEVFLPNSNHVASGAGEAGREVGRAVAWVLPARVWAVPLFCILAPSRKPKANRSPLFPLNKIGKVHSVRGGESGHSLPCVLP

SEQ ID NO: 20691 - protein, 585 aa, Homo sapiens
  MOD_RES (22)..(22): Selenocysteine
  MOD_RES (28)..(28): Selenocysteine
  MOD_RES (42)..(42): Selenocysteine
  MOD_RES (75)..(75): Selenocysteine
  MOD_RES (101)..(101): Selenocysteine
  MOD_RES (130)..(130): Selenocysteine
  MOD_RES (181)..(181): Selenocysteine
  MOD_RES (184)..(184): Selenocysteine
  MOD_RES (196)..(196): Selenocysteine
  MOD_RES (198)..(198): Selenocysteine
  MOD_RES (200)..(200): Selenocysteine
  MOD_RES (244)..(244): Selenocysteine
  MOD_RES (275)..(275): Selenocysteine
  MOD_RES (328)..(328): Selenocysteine
  MOD_RES (373)..(373): Selenocysteine
  MOD_RES (391)..(391): Selenocysteine
  MOD_RES (409)..(409): Selenocysteine
  MOD_RES (423)..(425): Selenocysteine
  MOD_RES (434)..(434): Selenocysteine
  MOD_RES (465)..(465): Selenocysteine
  MOD_RES (544)..(544): Selenocysteine
MEPAPARSPRPQQDPARPQEPXMPPPEXPSEGRQPSPSPSPXERAPASEEEFQFLRCQQCQAEAKCPKLLPCLHXLCSGCLEASGMQCPICQAPWPLGADXPALDNVFFESLQRRLSVYRQIVDAQAVCXRCKESADFWCFECEQLLCAKCFEAHQWFLKHEARPLAELRNQSVREFLDGXRKXNNIFCSNPNHRXPXLXSIYCRGCSKPLCCSCALLDSSHSELKCDISAEIQQRQEELDAMXQALQEQDSAFGAVHAQMHAAVGQLGRARAEXEELIRERVRQVVAHVRAQERELLEAVDARYQRDYEEMASRLGRLDAVLQRIRXGSALVQRMKCYASDQEVLDMHGFLRQALCRLRQEEPQSLQAAVRXDGFDEFKVRLQDLSSCIXQGKDAAVSKKASPEAASXPRDPIDVDLDVSNXXXAQKRKCSQXQCPRKVIKMESEEGKEARLARSSPEQPRPSXSKAVSPPHLDGPPSPRSPVIGSEVFLPNSNHVASGAGEAEERVVVISSSEDSDAENSSSRELDDSSSESSDLQLEGPSXLRVLDENLADPQAEDRPLVFFDLKIDNESGFSWGYPHPFLI

SEQ ID NO: 20692 - protein, 611 aa, Homo sapiens
  MOD_RES (22)..(22): Selenocysteine
  MOD_RES (28)..(28): Selenocysteine
  MOD_RES (42)..(42): Selenocysteine
  MOD_RES (75)..(75): Selenocysteine
  MOD_RES (101)..(101): Selenocysteine
  MOD_RES (130)..(130): Selenocysteine
  MOD_RES (181)..(181): Selenocysteine
  MOD_RES (184)..(184): Selenocysteine
  MOD_RES (196)..(196): Selenocysteine
  MOD_RES (198)..(198): Selenocysteine
  MOD_RES (200)..(200): Selenocysteine
  MOD_RES (244)..(244): Selenocysteine
  MOD_RES (275)..(275): Selenocysteine
  MOD_RES (328)..(328): Selenocysteine
  MOD_RES (373)..(373): Selenocysteine
  MOD_RES (391)..(391): Selenocysteine
  MOD_RES (409)..(409): Selenocysteine
  MOD_RES (471)..(473): Selenocysteine
  MOD_RES (482)..(482): Selenocysteine
  MOD_RES (513)..(513): Selenocysteine
  MOD_RES (580)..(580): Selenocysteine
  MOD_RES (597)..(597): Selenocysteine
MEPAPARSPRPQQDPARPQEPXMPPPEXPSEGRQPSPSPSPXERAPASEEEFQFLRCQQCQAEAKCPKLLPCLHXLCSGCLEASGMQCPICQAPWPLGADXPALDNVFFESLQRRLSVYRQIVDAQAVCXRCKESADFWCFECEQLLCAKCFEAHQWFLKHEARPLAELRNQSVREFLDGXRKXNNIFCSNPNHRXPXLXSIYCRGCSKPLCCSCALLDSSHSELKCDISAEIQQRQEELDAMXQALQEQDSAFGAVHAQMHAAVGQLGRARAEXEELIRERVRQVVAHVRAQERELLEAVDARYQRDYEEMASRLGRLDAVLQRIRXGSALVQRMKCYASDQEVLDMHGFLRQALCRLRQEEPQSLQAAVRXDGFDEFKVRLQDLSSCIXQGKDAAVSKKASPEAASXPRDPIDVDLPEEAERVKAQVQALGLAEAQPMAVVQSVPGAHPVPVYAFSIKGPSYGEDVSNXXXAQKRKCSQXQCPRKVIKMESEEGKEARLARSSPEQPRPSXSKAVSPPHLDGPPSPRSPVIGSEVFLPNSNHVASGAGEAEERVVVISSSEDSDAENSVSGPEVQPRXPASPHFRSQGAQPQQVXLRLALRLGNFPVRH

SEQ ID NO: 20693 - protein, 633 aa, Homo sapiens
  MOD_RES (22)..(22): Selenocysteine
  MOD_RES (28)..(28): Selenocysteine
  MOD_RES (42)..(42): Selenocysteine
  MOD_RES (75)..(75): Selenocysteine
  MOD_RES (101)..(101): Selenocysteine
  MOD_RES (130)..(130): Selenocysteine
  MOD_RES (181)..(181): Selenocysteine
  MOD_RES (184)..(184): Selenocysteine
  MOD_RES (196)..(196): Selenocysteine
  MOD_RES (198)..(198): Selenocysteine
  MOD_RES (200)..(200): Selenocysteine
  MOD_RES (244)..(244): Selenocysteine
  MOD_RES (275)..(275): Selenocysteine
  MOD_RES (328)..(328): Selenocysteine
  MOD_RES (373)..(373): Selenocysteine
  MOD_RES (391)..(391): Selenocysteine
  MOD_RES (409)..(409): Selenocysteine
  MOD_RES (471)..(473): Selenocysteine
  MOD_RES (482)..(482): Selenocysteine
  MOD_RES (513)..(513): Selenocysteine
  MOD_RES (592)..(592): Selenocysteine
MEPAPARSPRPQQDPARPQEPXMPPPEXPSEGRQPSPSPSPXERAPASEEEFQFLRCQQCQAEAKCPKLLPCLHXLCSGCLEASGMQCPICQAPWPLGADXPALDNVFFESLQRRLSVYRQIVDAQAVCXRCKESADFWCFECEQLLCAKCFEAHQWFLKHEARPLAELRNQSVREFLDGXRKXNNIFCSNPNHRXPXLXSIYCRGCSKPLCCSCALLDSSHSELKCDISAEIQQRQEELDAMXQALQEQDSAFGAVHAQMHAAVGQLGRARAEXEELIRERVRQVVAHVRAQERELLEAVDARYQRDYEEMASRLGRLDAVLQRIRXGSALVQRMKCYASDQEVLDMHGFLRQALCRLRQEEPQSLQAAVRXDGFDEFKVRLQDLSSCIXQGKDAAVSKKASPEAASXPRDPIDVDLPEEAERVKAQVQALGLAEAQPMAVVQSVPGAHPVPVYAFSIKGPSYGEDVSNXXXAQKRKCSQXQCPRKVIKMESEEGKEARLARSSPEQPRPSXSKAVSPPHLDGPPSPRSPVIGSEVFLPNSNHVASGAGEAEERVVVISSSEDSDAENSSSRELDDSSSESSDLQLEGPSXLRVLDENLADPQAEDRPLVFFDLKIDNESGFSWGYPHPFLI

SEQ ID NO: 20694 - protein, 641 aa, Homo sapiens
  MOD_RES (22)..(22): Selenocysteine
  MOD_RES (28)..(28): Selenocysteine
  MOD_RES (42)..(42): Selenocysteine
  MOD_RES (75)..(75): Selenocysteine
  MOD_RES (101)..(101): Selenocysteine
  MOD_RES (130)..(130): Selenocysteine
  MOD_RES (181)..(181): Selenocysteine
  MOD_RES (184)..(184): Selenocysteine
  MOD_RES (196)..(196): Selenocysteine
  MOD_RES (198)..(198): Selenocysteine
  MOD_RES (200)..(200): Selenocysteine
  MOD_RES (244)..(244): Selenocysteine
  MOD_RES (275)..(275): Selenocysteine
  MOD_RES (328)..(328): Selenocysteine
  MOD_RES (373)..(373): Selenocysteine
  MOD_RES (391)..(391): Selenocysteine
  MOD_RES (409)..(409): Selenocysteine
  MOD_RES (471)..(473): Selenocysteine
  MOD_RES (482)..(482): Selenocysteine
  MOD_RES (513)..(513): Selenocysteine
  MOD_RES (594)..(594): Selenocysteine
  MOD_RES (620)..(620): Selenocysteine
MEPAPARSPRPQQDPARPQEPXMPPPEXPSEGRQPSPSPSPXERAPASEEEFQFLRCQQCQAEAKCPKLLPCLHXLCSGCLEASGMQCPICQAPWPLGADXPALDNVFFESLQRRLSVYRQIVDAQAVCXRCKESADFWCFECEQLLCAKCFEAHQWFLKHEARPLAELRNQSVREFLDGXRKXNNIFCSNPNHRXPXLXSIYCRGCSKPLCCSCALLDSSHSELKCDISAEIQQRQEELDAMXQALQEQDSAFGAVHAQMHAAVGQLGRARAEXEELIRERVRQVVAHVRAQERELLEAVDARYQRDYEEMASRLGRLDAVLQRIRXGSALVQRMKCYASDQEVLDMHGFLRQALCRLRQEEPQSLQAAVRXDGFDEFKVRLQDLSSCIXQGKDAAVSKKASPEAASXPRDPIDVDLPEEAERVKAQVQALGLAEAQPMAVVQSVPGAHPVPVYAFSIKGPSYGEDVSNXXXAQKRKCSQXQCPRKVIKMESEEGKEARLARSSPEQPRPSXSKAVSPPHLDGPPSPRSPVIGSEVFLPNSNHVASGAGEAEERVVVISSSEDSDAENSVSSSPQSEVLYWKVHGAHGDRRAXVLASPLLASPLLASPLLASPVSAESXRSLQPALWHIPPPSLASPPAR

SEQ ID NO: 20695 - protein, 781 aa, Homo sapiens
  MOD_RES (22)..(22): Selenocysteine
  MOD_RES (28)..(28): Selenocysteine
  MOD_RES (42)..(42): Selenocysteine
  MOD_RES (75)..(75): Selenocysteine
  MOD_RES (101)..(101): Selenocysteine
  MOD_RES (130)..(130): Selenocysteine
  MOD_RES (181)..(181): Selenocysteine
  MOD_RES (184)..(184): Selenocysteine
  MOD_RES (196)..(196): Selenocysteine
  MOD_RES (198)..(198): Selenocysteine
  MOD_RES (200)..(200): Selenocysteine
  MOD_RES (244)..(244): Selenocysteine
  MOD_RES (275)..(275): Selenocysteine
  MOD_RES (328)..(328): Selenocysteine
  MOD_RES (373)..(373): Selenocysteine
  MOD_RES (391)..(391): Selenocysteine
  MOD_RES (409)..(409): Selenocysteine
  MOD_RES (423)..(425): Selenocysteine
  MOD_RES (434)..(434): Selenocysteine
  MOD_RES (465)..(465): Selenocysteine
  MOD_RES (529)..(529): Selenocysteine
  MOD_RES (568)..(568): Selenocysteine
  MOD_RES (585)..(585): Selenocysteine
  MOD_RES (637)..(637): Selenocysteine
  MOD_RES (647)..(647): Selenocysteine
  MOD_RES (651)..(651): Selenocysteine
  MOD_RES (728)..(728): Selenocysteine
  MOD_RES (758)..(758): Selenocysteine
MEPAPARSPRPQQDPARPQEPXMPPPEXPSEGRQPSPSPSPXERAPASEEEFQFLRCQQCQAEAKCPKLLPCLHXLCSGCLEASGMQCPICQAPWPLGADXPALDNVFFESLQRRLSVYRQIVDAQAVCXRCKESADFWCFECEQLLCAKCFEAHQWFLKHEARPLAELRNQSVREFLDGXRKXNNIFCSNPNHRXPXLXSIYCRGCSKPLCCSCALLDSSHSELKCDISAEIQQRQEELDAMXQALQEQDSAFGAVHAQMHAAVGQLGRARAEXEELIRERVRQVVAHVRAQERELLEAVDARYQRDYEEMASRLGRLDAVLQRIRXGSALVQRMKCYASDQEVLDMHGFLRQALCRLRQEEPQSLQAAVRXDGFDEFKVRLQDLSSCIXQGKDAAVSKKASPEAASXPRDPIDVDLDVSNXXXAQKRKCSQXQCPRKVIKMESEEGKEARLARSSPEQPRPSXSKAVSPPHLDGPPSPRSPVIGSEVFLPNSNHVASGAGEAEERVVVISSSEDSDAENSCMEPMEXAEPQSSPAHSSPAHSSPAHSSPVQSLLRAQGASSLPCGXYHPPAWPPHQPAEQAAXPDAEPHSEPPDHQERPAVHRGIRYLLYRAQRAIRLRHALRLHPQLHRAPIRXWSPHVVQASXPAIXGPLNHPANAQEHPAQLQRGISPPHRIRGAVRSRSRSLRGSSHLSQWLNNFFALPFSSMASQLDMSSVVGAGESRAQXLGAGVPPGDSVRGSMEASQVQVPLEASPIXFPPPCAPERPPISPVPGARQAGL

SEQ ID NO: 20696 - protein, 829 aa, Homo sapiens
  MOD_RES (22)..(22): Selenocysteine
  MOD_RES (28)..(28): Selenocysteine
  MOD_RES (42)..(42): Selenocysteine
  MOD_RES (75)..(75): Selenocysteine
  MOD_RES (101)..(101): Selenocysteine
  MOD_RES (130)..(130): Selenocysteine
  MOD_RES (181)..(181): Selenocysteine
  MOD_RES (184)..(184): Selenocysteine
  MOD_RES (196)..(196): Selenocysteine
  MOD_RES (198)..(198): Selenocysteine
  MOD_RES (200)..(200): Selenocysteine
  MOD_RES (244)..(244): Selenocysteine
  MOD_RES (275)..(275): Selenocysteine
  MOD_RES (328)..(328): Selenocysteine
  MOD_RES (373)..(373): Selenocysteine
  MOD_RES (391)..(391): Selenocysteine
  MOD_RES (409)..(409): Selenocysteine
  MOD_RES (471)..(473): Selenocysteine
  MOD_RES (482)..(482): Selenocysteine
  MOD_RES (513)..(513): Selenocysteine
  MOD_RES (577)..(577): Selenocysteine
  MOD_RES (616)..(616): Selenocysteine
  MOD_RES (633)..(633): Selenocysteine
  MOD_RES (685)..(685): Selenocysteine
  MOD_RES (695)..(695): Selenocysteine
  MOD_RES (699)..(699): Selenocysteine
  MOD_RES (776)..(776): Selenocysteine
  MOD_RES (806)..(806): Selenocysteine
MEPAPARSPRPQQDPARPQEPXMPPPEXPSEGRQPSPSPSPXERAPASEEEFQFLRCQQCQAEAKCPKLLPCLHXLCSGCLEASGMQCPICQAPWPLGADXPALDNVFFESLQRRLSVYRQIVDAQAVCXRCKESADFWCFECEQLLCAKCFEAHQWFLKHEARPLAELRNQSVREFLDGXRKXNNIFCSNPNHRXPXLXSIYCRGCSKPLCCSCALLDSSHSELKCDISAEIQQRQEELDAMXQALQEQDSAFGAVHAQMHAAVGQLGRARAEXEELIRERVRQVVAHVRAQERELLEAVDARYQRDYEEMASRLGRLDAVLQRIRXGSALVQRMKCYASDQEVLDMHGFLRQALCRLRQEEPQSLQAAVRXDGFDEFKVRLQDLSSCIXQGKDAAVSKKASPEAASXPRDPIDVDLPEEAERVKAQVQALGLAEAQPMAVVQSVPGAHPVPVYAFSIKGPSYGEDVSNXXXAQKRKCSQXQCPRKVIKMESEEGKEARLARSSPEQPRPSXSKAVSPPHLDGPPSPRSPVIGSEVFLPNSNHVASGAGEAEERVVVISSSEDSDAENSCMEPMEXAEPQSSPAHSSPAHSSPAHSSPVQSLLRAQGASSLPCGXYHPPAWPPHQPAEQAAXPDAEPHSEPPDHQERPAVHRGIRYLLYRAQRAIRLRHALRLHPQLHRAPIRXWSPHVVQASXPAIXGPLNHPANAQEHPAQLQRGISPPHRIRGAVRSRSRSLRGSSHLSQWLNNFFALPFSSMASQLDMSSVVGAGESRAQXLGAGVPPGDSVRGSMEASQVQVPLEASPIXFPPPCAPERPPISPVPGARQAGL

SEQ ID NO: 20697 - protein, 834 aa, Homo sapiens
  MOD_RES (22)..(22): Selenocysteine
  MOD_RES (28)..(28): Selenocysteine
  MOD_RES (42)..(42): Selenocysteine
  MOD_RES (75)..(75): Selenocysteine
  MOD_RES (101)..(101): Selenocysteine
  MOD_RES (130)..(130): Selenocysteine
  MOD_RES (181)..(181): Selenocysteine
  MOD_RES (184)..(184): Selenocysteine
  MOD_RES (196)..(196): Selenocysteine
  MOD_RES (198)..(198): Selenocysteine
  MOD_RES (200)..(200): Selenocysteine
  MOD_RES (244)..(244): Selenocysteine
  MOD_RES (275)..(275): Selenocysteine
  MOD_RES (328)..(328): Selenocysteine
  MOD_RES (373)..(373): Selenocysteine
  MOD_RES (391)..(391): Selenocysteine
  MOD_RES (409)..(409): Selenocysteine
  MOD_RES (423)..(425): Selenocysteine
  MOD_RES (434)..(434): Selenocysteine
  MOD_RES (465)..(465): Selenocysteine
  MOD_RES (544)..(544): Selenocysteine
  MOD_RES (573)..(573): Selenocysteine
  MOD_RES (684)..(684): Selenocysteine
  MOD_RES (783)..(785): Selenocysteine
  MOD_RES (800)..(800): Selenocysteine
  MOD_RES (819)..(819): Selenocysteine
MEPAPARSPRPQQDPARPQEPXMPPPEXPSEGRQPSPSPSPXERAPASEEEFQFLRCQQCQAEAKCPKLLPCLHXLCSGCLEASGMQCPICQAPWPLGADXPALDNVFFESLQRRLSVYRQIVDAQAVCXRCKESADFWCFECEQLLCAKCFEAHQWFLKHEARPLAELRNQSVREFLDGXRKXNNIFCSNPNHRXPXLXSIYCRGCSKPLCCSCALLDSSHSELKCDISAEIQQRQEELDAMXQALQEQDSAFGAVHAQMHAAVGQLGRARAEXEELIRERVRQVVAHVRAQERELLEAVDARYQRDYEEMASRLGRLDAVLQRIRXGSALVQRMKCYASDQEVLDMHGFLRQALCRLRQEEPQSLQAAVRXDGFDEFKVRLQDLSSCIXQGKDAAVSKKASPEAASXPRDPIDVDLDVSNXXXAQKRKCSQXQCPRKVIKMESEEGKEARLARSSPEQPRPSXSKAVSPPHLDGPPSPRSPVIGSEVFLPNSNHVASGAGEAEERVVVISSSEDSDAENSSSRELDDSSSESSDLQLEGPSXLRVLDENLADPQAEDRPLVFFDLKIDNEXQKISQLAAVNRESKFRVVIQPEAFFSIYSKAVSLEVGLQHFLSFLSSMRRPILACYKLWGPGLPNFFRALEDINRLWEFQEAISGFLAALPLIRERVPGASSFKLKNLAQXYLARNMSERSAMAAVLAMRDLCRLLEVSPGPQLAQHVYPFSSLQCFASLQPLVQAAVLPRAEARLLALHNVSFMELLSAHRRDRQGGLKKYSRYLSLQXXXLPPAQPAFNLQALGXYFEGLLEGPALARAEGVSXPLAGRGLAERASQQS

SEQ ID NO: 20698 - protein, 882 aa, Homo sapiens
  MOD_RES (22)..(22): Selenocysteine
  MOD_RES (28)..(28): Selenocysteine
  MOD_RES (42)..(42): Selenocysteine
  MOD_RES (75)..(75): Selenocysteine
  MOD_RES (101)..(101): Selenocysteine
  MOD_RES (130)..(130): Selenocysteine
  MOD_RES (181)..(181): Selenocysteine
  MOD_RES (184)..(184): Selenocysteine
  MOD_RES (196)..(196): Selenocysteine
  MOD_RES (198)..(198): Selenocysteine
  MOD_RES (200)..(200): Selenocysteine
  MOD_RES (244)..(244): Selenocysteine
  MOD_RES (275)..(275): Selenocysteine
  MOD_RES (328)..(328): Selenocysteine
  MOD_RES (373)..(373): Selenocysteine
  MOD_RES (391)..(391): Selenocysteine
  MOD_RES (409)..(409): Selenocysteine
  MOD_RES (471)..(473): Selenocysteine
  MOD_RES (482)..(482): Selenocysteine
  MOD_RES (513)..(513): Selenocysteine
  MOD_RES (592)..(592): Selenocysteine
  MOD_RES (621)..(621): Selenocysteine
  MOD_RES (732)..(732): Selenocysteine
  MOD_RES (831)..(833): Selenocysteine
  MOD_RES (848)..(848): Selenocysteine
  MOD_RES (867)..(867): Selenocysteine
MEPAPARSPRPQQDPARPQEPXMPPPEXPSEGRQPSPSPSPXERAPASEEEFQFLRCQQCQAEAKCPKLLPCLHXLCSGCLEASGMQCPICQAPWPLGADXPALDNVFFESLQRRLSVYRQIVDAQAVCXRCKESADFWCFECEQLLCAKCFEAHQWFLKHEARPLAELRNQSVREFLDGXRKXNNIFCSNPNHRXPXLXSIYCRGCSKPLCCSCALLDSSHSELKCDISAEIQQRQEELDAMXQALQEQDSAFGAVHAQMHAAVGQLGRARAEXEELIRERVRQVVAHVRAQERELLEAVDARYQRDYEEMASRLGRLDAVLQRIRXGSALVQRMKCYASDQEVLDMHGFLRQALCRLRQEEPQSLQAAVRXDGFDEFKVRLQDLSSCIXQGKDAAVSKKASPEAASXPRDPIDVDLPEEAERVKAQVQALGLAEAQPMAVVQSVPGAHPVPVYAFSIKGPSYGEDVSNXXXAQKRKCSQXQCPRKVIKMESEEGKEARLARSSPEQPRPSXSKAVSPPHLDGPPSPRSPVIGSEVFLPNSNHVASGAGEAEERVVVISSSEDSDAENSSSRELDDSSSESSDLQLEGPSXLRVLDENLADPQAEDRPLVFFDLKIDNEXQKISQLAAVNRESKFRVVIQPEAFFSIYSKAVSLEVGLQHFLSFLSSMRRPILACYKLWGPGLPNFFRALEDINRLWEFQEAISGFLAALPLIRERVPGASSFKLKNLAQXYLARNMSERSAMAAVLAMRDLCRLLEVSPGPQLAQHVYPFSSLQCFASLQPLVQAAVLPRAEARLLALHNVSFMELLSAHRRDRQGGLKKYSRYLSLQXXXLPPAQPAFNLQALGXYFEGLLEGPALARAEGVSXPLAGRGLAERASQQS

SEQ ID NO: 20699 - protein, 110 aa, Homo sapiens
  MOD_RES (7)..(7): Selenocysteine
  MOD_RES (21)..(23): Selenocysteine
  MOD_RES (32)..(32): Selenocysteine
  MOD_RES (63)..(63): Selenocysteine
SPEAASXPRDPIDVDLDVSNXXXAQKRKCSQXQCPRKVIKMESEEGKEARLARSSPEQPRPSXSKAVSPPHLDGPPSPRSPVIGSEVFLPNSNHVASGAGEAGRERNALW

SEQ ID NO: 20700 - protein, 261 aa, Homo sapiens
  MOD_RES (1)..(1): Any amino acid
  MOD_RES (24)..(24): Selenocysteine
  MOD_RES (77)..(77): Selenocysteine
  MOD_RES (122)..(122): Selenocysteine
  MOD_RES (140)..(140): Selenocysteine
  MOD_RES (158)..(158): Selenocysteine
  MOD_RES (172)..(174): Selenocysteine
  MOD_RES (183)..(183): Selenocysteine
  MOD_RES (214)..(214): Selenocysteine
XAFGAVHAQMHAAVGQLGRARAEXEELIRERVRQVVAHVRAQERELLEAVDARYQRDYEEMASRLGRLDAVLQRIRXGSALVQRMKCYASDQEVLDMHGFLRQALCRLRQEEPQSLQAAVRXDGFDEFKVRLQDLSSCIXQGKDAAVSKKASPEAASXPRDPIDVDLDVSNXXXAQKRKCSQXQCPRKVIKMESEEGKEARLARSSPEQPRPSXSKAVSPPHLDGPPSPRSPVIGSEVFLPNSNHVASGAGEAGRERNALW

SEQ ID NO: 20701 - protein, 217 aa, Homo sapiens
  MOD_RES (1)..(1): Any amino acid
  MOD_RES (17)..(17): Selenocysteine
  MOD_RES (35)..(35): Selenocysteine
  MOD_RES (53)..(53): Selenocysteine
  MOD_RES (115)..(117): Selenocysteine
  MOD_RES (126)..(126): Selenocysteine
  MOD_RES (157)..(157): Selenocysteine
XRLRQEEPQSLQAAVRXDGFDEFKVRLQDLSSCIXQGKDAAVSKKASPEAASXPRDPIDVDLPEEAERVKAQVQALGLAEAQPMAVVQSVPGAHPVPVYAFSIKGPSYGEDVSNXXXAQKRKCSQXQCPRKVIKMESEEGKEARLARSSPEQPRPSXSKAVSPPHLDGPPSPRSPVIGSEVFLPNSNHVASGAGEAEERVVVISSSEDSDAENSPSV

SEQ ID NO: 20702 - protein, 240 aa, Homo sapiens
  MOD_RES (1)..(1): Any amino acid
  MOD_RES (16)..(16): Selenocysteine
  MOD_RES (47)..(47): Selenocysteine
  MOD_RES (100)..(100): Selenocysteine
  MOD_RES (145)..(145): Selenocysteine
  MOD_RES (163)..(163): Selenocysteine
  MOD_RES (181)..(181): Selenocysteine
  MOD_RES (239)..(239): Selenocysteine
XSAEIQQRQEELDAMXQALQEQDSAFGAVHAQMHAAVGQLGRARAEXEELIRERVRQVVAHVRAQERELLEAVDARYQRDYEEMASRLGRLDAVLQRIRXGSALVQRMKCYASDQEVLDMHGFLRQALCRLRQEEPQSLQAAVRXDGFDEFKVRLQDLSSCIXQGKDAAVSKKASPEAASXPRDPIDVDLPEEAERVKAQVQALGLAEAQPMAVVQSVPGAHPVPVYAFSIKGPAQSSXH

SEQ ID NO: 20703 - protein, 266 aa, Homo sapiens
  MOD_RES (13)..(13): Selenocysteine
  MOD_RES (45)..(45): Selenocysteine
  MOD_RES (58)..(58): Selenocysteine
  MOD_RES (127)..(127): Selenocysteine
  MOD_RES (130)..(130): Selenocysteine
  MOD_RES (167)..(167): Selenocysteine
  MOD_RES (184)..(184): Selenocysteine
  MOD_RES (194)..(194): Selenocysteine
  MOD_RES (202)..(202): Selenocysteine
  MOD_RES (217)..(217): Selenocysteine
MILNSLRYEEKAXKDLERYNSQMKRAIEQESQMSLKDGRKKIKPXSAWNLAQKHKLKXSLSNQPKLDELLQSQIEKRRSQNIKMVQIPFSMKNLKINFKKQNKVDLEEKDEPCLIHNLRFPDAWLMXSKXEVMLLNPYRVEEALLFKRLLENHKLPAEPLEKPIMLXESLFNGSHYLDVLYKMXADDQRYSGSXYLSDPRLXANGFKIKLIPGVSIXENYLEIEGMANCLPFYGVADLKEILNAILNRNAKEVYECRPRKVISYLE

SEQ ID NO: 20704 - protein, 44 aa, Homo sapiens
  MOD_RES (8)..(8): Selenocysteine
  MOD_RES (19)..(19): Selenocysteine
  MOD_RES (38)..(38): Selenocysteine
MKQLPAAXVRLLSSSQIIXSVVSVVKELIENSLDAGAXSVDVKL

SEQ ID NO: 20705 - protein, 73 aa, Homo sapiens
  MOD_RES (8)..(8): Selenocysteine
  MOD_RES (19)..(19): Selenocysteine
  MOD_RES (38)..(38): Selenocysteine
MKQLPAAXVRLLSSSQIIXSVVSVVKELIENSLDAGAXSVDVKLENYGFDKIEVRDNGEGIKAVDAPVMAMKY

SEQ ID NO: 20706 - protein, 181 aa, Homo sapiens
  MOD_RES (8)..(8): Selenocysteine
  MOD_RES (19)..(19): Selenocysteine
  MOD_RES (38)..(38): Selenocysteine
  MOD_RES (75)..(75): Selenocysteine
  MOD_RES (88)..(89): Selenocysteine
  MOD_RES (109)..(110): Selenocysteine
  MOD_RES (112)..(112): Selenocysteine
  MOD_RES (119)..(119): Selenocysteine
  MOD_RES (147)..(147): Selenocysteine
MKQLPAAXVRLLSSSQIIXSVVSVVKELIENSLDAGAXSVDVKLENYGFDKIEVRDNGEGIKAVDAPVMAMKYYXSKINSHEDLENLXXYGFRGEALGSICCIAEVLIXXRXAADNFSXQYVLDGSGHILSQKPSHLGQGKKVALYXNILYLFCLNCWFKKKKLLGEYKYIALGLVLIKAS

SEQ ID NO: 20707 - protein, 165 aa, Homo sapiens
  MOD_RES (8)..(8): Selenocysteine
  MOD_RES (19)..(19): Selenocysteine
  MOD_RES (38)..(38): Selenocysteine
  MOD_RES (75)..(75): Selenocysteine
  MOD_RES (88)..(89): Selenocysteine
  MOD_RES (109)..(110): Selenocysteine
  MOD_RES (112)..(112): Selenocysteine
  MOD_RES (119)..(119): Selenocysteine
  MOD_RES (145)..(145): Selenocysteine
MKQLPAAXVRLLSSSQIIXSVVSVVKELIENSLDAGAXSVDVKLENYGFDKIEVRDNGEGIKAVDAPVMAMKYYXSKINSHEDLENLXXYGFRGEALGSICCIAEVLIXXRXAADNFSXQYVLDGSGHILSQKPSHLGQGSHSVXQAGLQWHHLGSLQPLPPRLK

SEQ ID NO: 20708 - protein, 194 aa, Homo sapiens
  MOD_RES (8)..(8): Selenocysteine
  MOD_RES (19)..(19): Selenocysteine
  MOD_RES (38)..(38): Selenocysteine
  MOD_RES (75)..(75): Selenocysteine
  MOD_RES (88)..(89): Selenocysteine
  MOD_RES (109)..(110): Selenocysteine
  MOD_RES (112)..(112): Selenocysteine
  MOD_RES (119)..(119): Selenocysteine
  MOD_RES (141)..(142): Selenocysteine
  MOD_RES (144)..(144): Selenocysteine
  MOD_RES (161)..(161): Selenocysteine
MKQLPAAXVRLLSSSQIIXSVVSVVKELIENSLDAGAXSVDVKLENYGFDKIEVRDNGEGIKAVDAPVMAMKYYXSKINSHEDLENLXXYGFRGEALGSICCIAEVLIXXRXAADNFSXQYVLDGSGHILSQKPSHLGQGXXVXALRLFKNLPVRKQFYSXAKKCKDEIKKIQDLLMSFGILKPDLRIVFVHNK

SEQ ID NO: 20709 - protein, 770 aa, Homo sapiens
  MOD_RES (8)..(8): Selenocysteine
  MOD_RES (19)..(19): Selenocysteine
  MOD_RES (38)..(38): Selenocysteine
  MOD_RES (75)..(75): Selenocysteine
  MOD_RES (88)..(89): Selenocysteine
  MOD_RES (109)..(110): Selenocysteine
  MOD_RES (112)..(112): Selenocysteine
  MOD_RES (119)..(119): Selenocysteine
  MOD_RES (141)..(142): Selenocysteine
  MOD_RES (144)..(144): Selenocysteine
  MOD_RES (161)..(161): Selenocysteine
  MOD_RES (216)..(216): Selenocysteine
  MOD_RES (250)..(250): Selenocysteine
  MOD_RES (254)..(254): Selenocysteine
  MOD_RES (289)..(289): Selenocysteine
  MOD_RES (303)..(303): Selenocysteine
  MOD_RES (311)..(311): Selenocysteine
  MOD_RES (334)..(335): Selenocysteine
  MOD_RES (343)..(343): Selenocysteine
  MOD_RES (351)..(351): Selenocysteine
  MOD_RES (363)..(363): Selenocysteine
  MOD_RES (366)..(366): Selenocysteine
  MOD_RES (385)..(385): Selenocysteine
  MOD_RES (403)..(403): Selenocysteine
  MOD_RES (432)..(432): Selenocysteine
  MOD_RES (451)..(451): Selenocysteine
  MOD_RES (456)..(456): Selenocysteine
  MOD_RES (465)..(465): Selenocysteine
  MOD_RES (561)..(561): Selenocysteine
  MOD_RES (596)..(596): Selenocysteine
  MOD_RES (602)..(602): Selenocysteine
  MOD_RES (611)..(611): Selenocysteine
  MOD_RES (634)..(634): Selenocysteine
  MOD_RES (644)..(644): Selenocysteine
  MOD_RES (652)..(652): Selenocysteine
  MOD_RES (667)..(667): Selenocysteine
  MOD_RES (764)..(764): Selenocysteine
  MOD_RES (769)..(770): Selenocysteine
MKQLPAAXVRLLSSSQIIXSVVSVVKELIENSLDAGAXSVDVKLENYGFDKIEVRDNGEGIKAVDAPVMAMKYYXSKINSHEDLENLXXYGFRGEALGSICCIAEVLIXXRXAADNFSXQYVLDGSGHILSQKPSHLGQGXXVXALRLFKNLPVRKQFYSXAKKCKDEIKKIQDLLMSFGILKPDLRIVFVHNKAVIWQKSRVSDHKMALMSVLGXAVMNNMESFQYHSEESQIYLSGFLPKCDADHSFXSLSXPERSFIFINSRPVHQKDILKLIRHHYNLKCLKESXRLYPVFFLKIDVPXADVDVNLXPDKSQVLLQNKESVLIALENLMXXCYGPLPSXNSYENNKXDVSAADIVLSKXAEXDVLFNKVESSGKNYSNVDXSVIPFQNDMHNDESGKNXDDCLNHQISIGDFGYGHCSSEISNIDKNXKNAFQDISMSNVSWENSQXEYSKXCFISSVKHXQSENGNKDHIDESGENEEEAGLENSSEISADEWSRGNILKNSVGENIEPVKILVPEKSLPCKVSNNNYPIPEQMNLNEDSCNKKSNVIDNKSGKVXAYDLLSNRVIKKPMSASALFVQDHRPQFLIENPKXSLEDAXLQIEELWKXLSEEEKLNLFNGSHYLDVLYKMXADDQRYSGSXYLSDPRLXANGFKIKLIPGVSIXENYLEIEGMANCLPFYGVADLKEILNAILNRNAKEVYECRPRKVISYLEGEAVRLSRQLPMYLSKEDIQDIIYRMKHQFGNEIKECVHGRPFFHHLXYLPEXX

SEQ ID NO: 20710 - protein, 932 aa, Homo sapiens
  MOD_RES (8)..(8): Selenocysteine
  MOD_RES (19)..(19): Selenocysteine
  MOD_RES (38)..(38): Selenocysteine
  MOD_RES (75)..(75): Selenocysteine
  MOD_RES (88)..(89): Selenocysteine
  MOD_RES (109)..(110): Selenocysteine
  MOD_RES (112)..(112): Selenocysteine
  MOD_RES (119)..(119): Selenocysteine
  MOD_RES (141)..(142): Selenocysteine
  MOD_RES (144)..(144): Selenocysteine
  MOD_RES (161)..(161): Selenocysteine
  MOD_RES (216)..(216): Selenocysteine
  MOD_RES (250)..(250): Selenocysteine
  MOD_RES (254)..(254): Selenocysteine
  MOD_RES (289)..(289): Selenocysteine
  MOD_RES (303)..(303): Selenocysteine
  MOD_RES (311)..(311): Selenocysteine
  MOD_RES (334)..(335): Selenocysteine
  MOD_RES (343)..(343): Selenocysteine
  MOD_RES (351)..(351): Selenocysteine
  MOD_RES (363)..(363): Selenocysteine
  MOD_RES (366)..(366): Selenocysteine
  MOD_RES (385)..(385): Selenocysteine
  MOD_RES (403)..(403): Selenocysteine
  MOD_RES (432)..(432): Selenocysteine
  MOD_RES (451)..(451): Selenocysteine
  MOD_RES (456)..(456): Selenocysteine
  MOD_RES (465)..(465): Selenocysteine
  MOD_RES (561)..(561): Selenocysteine
  MOD_RES (596)..(596): Selenocysteine
  MOD_RES (602)..(602): Selenocysteine
  MOD_RES (611)..(611): Selenocysteine
  MOD_RES (625)..(625): Selenocysteine
  MOD_RES (657)..(657): Selenocysteine
  MOD_RES (670)..(670): Selenocysteine
  MOD_RES (739)..(739): Selenocysteine
  MOD_RES (742)..(742): Selenocysteine
  MOD_RES (779)..(779): Selenocysteine
  MOD_RES (796)..(796): Selenocysteine
  MOD_RES (806)..(806): Selenocysteine
  MOD_RES (814)..(814): Selenocysteine
  MOD_RES (829)..(829): Selenocysteine
  MOD_RES (926)..(926): Selenocysteine
  MOD_RES (931)..(932): Selenocysteine
MKQLPAAXVRLLSSSQIIXSVVSVVKELIENSLDAGAXSVDVKLENYGFDKIEVRDNGEGIKAVDAPVMAMKYYXSKINSHEDLENLXXYGFRGEALGSICCIAEVLIXXRXAADNFSXQYVLDGSGHILSQKPSHLGQGXXVXALRLFKNLPVRKQFYSXAKKCKDEIKKIQDLLMSFGILKPDLRIVFVHNKAVIWQKSRVSDHKMALMSVLGXAVMNNMESFQYHSEESQIYLSGFLPKCDADHSFXSLSXPERSFIFINSRPVHQKDILKLIRHHYNLKCLKESXRLYPVFFLKIDVPXADVDVNLXPDKSQVLLQNKESVLIALENLMXXCYGPLPSXNSYENNKXDVSAADIVLSKXAEXDVLFNKVESSGKNYSNVDXSVIPFQNDMHNDESGKNXDDCLNHQISIGDFGYGHCSSEISNIDKNXKNAFQDISMSNVSWENSQXEYSKXCFISSVKHXQSENGNKDHIDESGENEEEAGLENSSEISADEWSRGNILKNSVGENIEPVKILVPEKSLPCKVSNNNYPIPEQMNLNEDSCNKKSNVIDNKSGKVXAYDLLSNRVIKKPMSASALFVQDHRPQFLIENPKXSLEDAXLQIEELWKXLSEEEKLKYEEKAXKDLERYNSQMKRAIEQESQMSLKDGRKKIKPXSAWNLAQKHKLKXSLSNQPKLDELLQSQIEKRRSQNIKMVQIPFSMKNLKINFKKQNKVDLEEKDEPCLIHNLRFPDAWLMXSKXEVMLLNPYRVEEALLFKRLLENHKLPAEPLEKPIMLXESLFNGSHYLDVLYKMXADDQRYSGSXYLSDPRLXANGFKIKLIPGVSIXENYLEIEGMANCLPFYGVADLKEILNAILNRNAKEVYECRPRKVISYLEGEAVRLSRQLPMYLSKEDIQDIIYRMKHQFGNEIKECVHGRPFFHHLXYLPEXX

SEQ ID NO: 20711 - protein, 248 aa, Homo sapiens
  MOD_RES (8)..(8): Selenocysteine
  MOD_RES (19)..(19): Selenocysteine
  MOD_RES (38)..(38): Selenocysteine
  MOD_RES (75)..(75): Selenocysteine
  MOD_RES (88)..(89): Selenocysteine
  MOD_RES (109)..(110): Selenocysteine
  MOD_RES (112)..(112): Selenocysteine
  MOD_RES (119)..(119): Selenocysteine
  MOD_RES (141)..(142): Selenocysteine
  MOD_RES (144)..(144): Selenocysteine
  MOD_RES (161)..(161): Selenocysteine
  MOD_RES (242)..(242): Selenocysteine
  MOD_RES (247)..(248): Selenocysteine
MKQLPAAXVRLLSSSQIIXSVVSVVKELIENSLDAGAXSVDVKLENYGFDKIEVRDNGEGIKAVDAPVMAMKYYXSKINSHEDLENLXXYGFRGEALGSICCIAEVLIXXRXAADNFSXQYVLDGSGHILSQKPSHLGQGXXVXALRLFKNLPVRKQFYSXAKKCKDEIKKIQDLLMSFGILKPDLRIVFVHNKGEAVRLSRQLPMYLSKEDIQDIIYRMKHQFGNEIKECVHGRPFFHHLXYLPEXX

SEQ ID NO: 20712 - protein, 659 aa, Homo sapiens
  MOD_RES (8)..(8): Selenocysteine
  MOD_RES (19)..(19): Selenocysteine
  MOD_RES (38)..(38): Selenocysteine
  MOD_RES (75)..(75): Selenocysteine
  MOD_RES (88)..(89): Selenocysteine
  MOD_RES (109)..(110): Selenocysteine
  MOD_RES (112)..(112): Selenocysteine
  MOD_RES (119)..(119): Selenocysteine
  MOD_RES (141)..(142): Selenocysteine
  MOD_RES (144)..(144): Selenocysteine
  MOD_RES (161)..(161): Selenocysteine
  MOD_RES (211)..(211): Selenocysteine
  MOD_RES (215)..(215): Selenocysteine
  MOD_RES (250)..(250): Selenocysteine
  MOD_RES (264)..(264): Selenocysteine
  MOD_RES (272)..(272): Selenocysteine
  MOD_RES (295)..(296): Selenocysteine
  MOD_RES (304)..(304): Selenocysteine
  MOD_RES (312)..(312): Selenocysteine
  MOD_RES (324)..(324): Selenocysteine
  MOD_RES (327)..(327): Selenocysteine
  MOD_RES (346)..(346): Selenocysteine
  MOD_RES (364)..(364): Selenocysteine
  MOD_RES (393)..(393): Selenocysteine
  MOD_RES (412)..(412): Selenocysteine
  MOD_RES (417)..(417): Selenocysteine
  MOD_RES (426)..(426): Selenocysteine
  MOD_RES (522)..(522): Selenocysteine
  MOD_RES (557)..(557): Selenocysteine
  MOD_RES (563)..(563): Selenocysteine
  MOD_RES (572)..(572): Selenocysteine
  MOD_RES (586)..(586): Selenocysteine
  MOD_RES (618)..(618): Selenocysteine
  MOD_RES (631)..(631): Selenocysteine
MKQLPAAXVRLLSSSQIIXSVVSVVKELIENSLDAGAXSVDVKLENYGFDKIEVRDNGEGIKAVDAPVMAMKYYXSKINSHEDLENLXXYGFRGEALGSICCIAEVLIXXRXAADNFSXQYVLDGSGHILSQKPSHLGQGXXVXALRLFKNLPVRKQFYSXAKKCKDEIKKIQDLLMSFGILKPDLRIVFVHNKIYLSGFLPKCDADHSFXSLSXPERSFIFINSRPVHQKDILKLIRHHYNLKCLKESXRLYPVFFLKIDVPXADVDVNLXPDKSQVLLQNKESVLIALENLMXXCYGPLPSXNSYENNKXDVSAADIVLSKXAEXDVLFNKVESSGKNYSNVDXSVIPFQNDMHNDESGKNXDDCLNHQISIGDFGYGHCSSEISNIDKNXKNAFQDISMSNVSWENSQXEYSKXCFISSVKHXQSENGNKDHIDESGENEEEAGLENSSEISADEWSRGNILKNSVGENIEPVKILVPEKSLPCKVSNNNYPIPEQMNLNEDSCNKKSNVIDNKSGKVXAYDLLSNRVIKKPMSASALFVQDHRPQFLIENPKXSLEDAXLQIEELWKXLSEEEKLKYEEKAXKDLERYNSQMKRAIEQESQMSLKDGRKKIKPXSAWNLAQKHKLKXSLSNQPKLDELLQSQIEKRRSQNIKMSF

SEQ ID NO: 20713 - protein, 667 aa, Homo sapiens
  MOD_RES (8)..(8): Selenocysteine
  MOD_RES (19)..(19): Selenocysteine
  MOD_RES (38)..(38): Selenocysteine
  MOD_RES (75)..(75): Selenocysteine
  MOD_RES (88)..(89): Selenocysteine
  MOD_RES (109)..(110): Selenocysteine
  MOD_RES (112)..(112): Selenocysteine
  MOD_RES (119)..(119): Selenocysteine
  MOD_RES (141)..(142): Selenocysteine
  MOD_RES (144)..(144): Selenocysteine
  MOD_RES (161)..(161): Selenocysteine
  MOD_RES (211)..(211): Selenocysteine
  MOD_RES (215)..(215): Selenocysteine
  MOD_RES (250)..(250): Selenocysteine
  MOD_RES (264)..(264): Selenocysteine
  MOD_RES (272)..(272): Selenocysteine
  MOD_RES (295)..(296): Selenocysteine
  MOD_RES (304)..(304): Selenocysteine
  MOD_RES (312)..(312): Selenocysteine
  MOD_RES (324)..(324): Selenocysteine
  MOD_RES (327)..(327): Selenocysteine
  MOD_RES (346)..(346): Selenocysteine
  MOD_RES (364)..(364): Selenocysteine
  MOD_RES (393)..(393): Selenocysteine
  MOD_RES (412)..(412): Selenocysteine
  MOD_RES (417)..(417): Selenocysteine
  MOD_RES (426)..(426): Selenocysteine
  MOD_RES (522)..(522): Selenocysteine
  MOD_RES (557)..(557): Selenocysteine
  MOD_RES (563)..(563): Selenocysteine
  MOD_RES (572)..(572): Selenocysteine
  MOD_RES (586)..(586): Selenocysteine
  MOD_RES (618)..(618): Selenocysteine
  MOD_RES (631)..(631): Selenocysteine
  MOD_RES (665)..(665): Selenocysteine
MKQLPAAXVRLLSSSQIIXSVVSVVKELIENSLDAGAXSVDVKLENYGFDKIEVRDNGEGIKAVDAPVMAMKYYXSKINSHEDLENLXXYGFRGEALGSICCIAEVLIXXRXAADNFSXQYVLDGSGHILSQKPSHLGQGXXVXALRLFKNLPVRKQFYSXAKKCKDEIKKIQDLLMSFGILKPDLRIVFVHNKIYLSGFLPKCDADHSFXSLSXPERSFIFINSRPVHQKDILKLIRHHYNLKCLKESXRLYPVFFLKIDVPXADVDVNLXPDKSQVLLQNKESVLIALENLMXXCYGPLPSXNSYENNKXDVSAADIVLSKXAEXDVLFNKVESSGKNYSNVDXSVIPFQNDMHNDESGKNXDDCLNHQISIGDFGYGHCSSEISNIDKNXKNAFQDISMSNVSWENSQXEYSKXCFISSVKHXQSENGNKDHIDESGENEEEAGLENSSEISADEWSRGNILKNSVGENIEPVKILVPEKSLPCKVSNNNYPIPEQMNLNEDSCNKKSNVIDNKSGKVXAYDLLSNRVIKKPMSASALFVQDHRPQFLIENPKXSLEDAXLQIEELWKXLSEEEKLKYEEKAXKDLERYNSQMKRAIEQESQMSLKDGRKKIKPXSAWNLAQKHKLKXSLSNQPKLDELLQSQIEKRRSQNIKMEFQLLKIXWK

SEQ ID NO: 20714 - protein, 893 aa, Homo sapiens
  MOD_RES (8)..(8): Selenocysteine
  MOD_RES (19)..(19): Selenocysteine
  MOD_RES (38)..(38): Selenocysteine
  MOD_RES (75)..(75): Selenocysteine
  MOD_RES (88)..(89): Selenocysteine
  MOD_RES (109)..(110): Selenocysteine
  MOD_RES (112)..(112): Selenocysteine
  MOD_RES (119)..(119): Selenocysteine
  MOD_RES (141)..(142): Selenocysteine
  MOD_RES (144)..(144): Selenocysteine
  MOD_RES (161)..(161): Selenocysteine
  MOD_RES (211)..(211): Selenocysteine
  MOD_RES (215)..(215): Selenocysteine
  MOD_RES (250)..(250): Selenocysteine
  MOD_RES (264)..(264): Selenocysteine
  MOD_RES (272)..(272): Selenocysteine
  MOD_RES (295)..(296): Selenocysteine
  MOD_RES (304)..(304): Selenocysteine
  MOD_RES (312)..(312): Selenocysteine
  MOD_RES (324)..(324): Selenocysteine
  MOD_RES (327)..(327): Selenocysteine
  MOD_RES (346)..(346): Selenocysteine
  MOD_RES (364)..(364): Selenocysteine
  MOD_RES (393)..(393): Selenocysteine
  MOD_RES (412)..(412): Selenocysteine
  MOD_RES (417)..(417): Selenocysteine
  MOD_RES (426)..(426): Selenocysteine
  MOD_RES (522)..(522): Selenocysteine
  MOD_RES (557)..(557): Selenocysteine
  MOD_RES (563)..(563): Selenocysteine
  MOD_RES (572)..(572): Selenocysteine
  MOD_RES (586)..(586): Selenocysteine
  MOD_RES (618)..(618): Selenocysteine
  MOD_RES (631)..(631): Selenocysteine
  MOD_RES (700)..(700): Selenocysteine
  MOD_RES (703)..(703): Selenocysteine
  MOD_RES (740)..(740): Selenocysteine
  MOD_RES (757)..(757): Selenocysteine
  MOD_RES (767)..(767): Selenocysteine
  MOD_RES (775)..(775): Selenocysteine
  MOD_RES (790)..(790): Selenocysteine
  MOD_RES (887)..(887): Selenocysteine
  MOD_RES (892)..(893): Selenocysteine
MKQLPAAXVRLLSSSQIIXSVVSVVKELIENSLDAGAXSVDVKLENYGFDKIEVRDNGEGIKAVDAPVMAMKYYXSKINSHEDLENLXXYGFRGEALGSICCIAEVLIXXRXAADNFSXQYVLDGSGHILSQKPSHLGQGXXVXALRLFKNLPVRKQFYSXAKKCKDEIKKIQDLLMSFGILKPDLRIVFVHNKIYLSGFLPKCDADHSFXSLSXPERSFIFINSRPVHQKDILKLIRHHYNLKCLKESXRLYPVFFLKIDVPXADVDVNLXPDKSQVLLQNKESVLIALENLMXXCYGPLPSXNSYENNKXDVSAADIVLSKXAEXDVLFNKVESSGKNYSNVDXSVIPFQNDMHNDESGKNXDDCLNHQISIGDFGYGHCSSEISNIDKNXKNAFQDISMSNVSWENSQXEYSKXCFISSVKHXQSENGNKDHIDESGENEEEAGLENSSEISADEWSRGNILKNSVGENIEPVKILVPEKSLPCKVSNNNYPIPEQMNLNEDSCNKKSNVIDNKSGKVXAYDLLSNRVIKKPMSASALFVQDHRPQFLIENPKXSLEDAXLQIEELWKXLSEEEKLKYEEKAXKDLERYNSQMKRAIEQESQMSLKDGRKKIKPXSAWNLAQKHKLKXSLSNQPKLDELLQSQIEKRRSQNIKMVQIPFSMKNLKINFKKQNKVDLEEKDEPCLIHNLRFPDAWLMXSKXEVMLLNPYRVEEALLFKRLLENHKLPAEPLEKPIMLXESLFNGSHYLDVLYKMXADDQRYSGSXYLSDPRLXANGFKIKLIPGVSIXENYLEIEGMANCLPFYGVADLKEILNAILNRNAKEVYECRPRKVISYLEGEAVRLSRQLPMYLSKEDIQDIIYRMKHQFGNEIKECVHGRPFFHHLXYLPEXX

SEQ ID NO: 20715 - protein, 108 aa, Homo sapiens
  MOD_RES (8)..(8): Selenocysteine
  MOD_RES (19)..(19): Selenocysteine
  MOD_RES (38)..(38): Selenocysteine
  MOD_RES (75)..(75): Selenocysteine
  MOD_RES (88)..(89): Selenocysteine
MKQLPAAXVRLLSSSQIIXSVVSVVKELIENSLDAGAXSVDVKLENYGFDKIEVRDNGEGIKAVDAPVMAMKYYXSKINSHEDLENLXXYGFRGEALGSICCIAEVQL

SEQ ID NO: 20716 - protein, 711 aa, Homo sapiens
  MOD_RES (8)..(8): Selenocysteine
  MOD_RES (19)..(19): Selenocysteine
  MOD_RES (38)..(38): Selenocysteine
  MOD_RES (48)..(49): Selenocysteine
  MOD_RES (51)..(51): Selenocysteine
  MOD_RES (58)..(58): Selenocysteine
  MOD_RES (80)..(81): Selenocysteine
  MOD_RES (83)..(83): Selenocysteine
  MOD_RES (100)..(100): Selenocysteine
  MOD_RES (155)..(155): Selenocysteine
  MOD_RES (189)..(189): Selenocysteine
  MOD_RES (193)..(193): Selenocysteine
  MOD_RES (228)..(228): Selenocysteine
  MOD_RES (242)..(242): Selenocysteine
  MOD_RES (250)..(250): Selenocysteine
  MOD_RES (273)..(274): Selenocysteine
  MOD_RES (282)..(282): Selenocysteine
  MOD_RES (290)..(290): Selenocysteine
  MOD_RES (302)..(302): Selenocysteine
  MOD_RES (305)..(305): Selenocysteine
  MOD_RES (324)..(324): Selenocysteine
  MOD_RES (342)..(342): Selenocysteine
  MOD_RES (371)..(371): Selenocysteine
  MOD_RES (390)..(390): Selenocysteine
  MOD_RES (395)..(395): Selenocysteine
  MOD_RES (404)..(404): Selenocysteine
  MOD_RES (500)..(500): Selenocysteine
  MOD_RES (535)..(535): Selenocysteine
  MOD_RES (541)..(541): Selenocysteine
  MOD_RES (550)..(550): Selenocysteine
  MOD_RES (564)..(564): Selenocysteine
  MOD_RES (596)..(596): Selenocysteine
  MOD_RES (609)..(609): Selenocysteine
  MOD_RES (678)..(678): Selenocysteine
  MOD_RES (681)..(681): Selenocysteine
MKQLPAAXVRLLSSSQIIXSVVSVVKELIENSLDAGAXSVDVKLVLIXXRXAADNFSXQYVLDGSGHILSQKPSHLGQGXXVXALRLFKNLPVRKQFYSXAKKCKDEIKKIQDLLMSFGILKPDLRIVFVHNKAVIWQKSRVSDHKMALMSVLGXAVMNNMESFQYHSEESQIYLSGFLPKCDADHSFXSLSXPERSFIFINSRPVHQKDILKLIRHHYNLKCLKESXRLYPVFFLKIDVPXADVDVNLXPDKSQVLLQNKESVLIALENLMXXCYGPLPSXNSYENNKXDVSAADIVLSKXAEXDVLFNKVESSGKNYSNVDXSVIPFQNDMHNDESGKNXDDCLNHQISIGDFGYGHCSSEISNIDKNXKNAFQDISMSNVSWENSQXEYSKXCFISSVKHXQSENGNKDHIDESGENEEEAGLENSSEISADEWSRGNILKNSVGENIEPVKILVPEKSLPCKVSNNNYPIPEQMNLNEDSCNKKSNVIDNKSGKVXAYDLLSNRVIKKPMSASALFVQDHRPQFLIENPKXSLEDAXLQIEELWKXLSEEEKLKYEEKAXKDLERYNSQMKRAIEQESQMSLKDGRKKIKPXSAWNLAQKHKLKXSLSNQPKLDELLQSQIEKRRSQNIKMVQIPFSMKNLKINFKKQNKVDLEEKDEPCLIHNLRFPDAWLMXSKXEVMLLNPYRVEEALLFKRLLENHKLPAEPL

SEQ ID NO: 20717 - protein, 47 aa, Homo sapiens
  MOD_RES (8)..(8): Selenocysteine
  MOD_RES (19)..(19): Selenocysteine
  MOD_RES (38)..(38): Selenocysteine
MKQLPAAXVRLLSSSQIIXSVVSVVKELIENSLDAGAXSVDVKLVQL

SEQ ID NO: 20718 - protein, 756 aa, Homo sapiens
  MOD_RES (40)..(40): Selenocysteine
  MOD_RES (74)..(74): Selenocysteine
  MOD_RES (78)..(78): Selenocysteine
  MOD_RES (113)..(113): Selenocysteine
  MOD_RES (127)..(127): Selenocysteine
  MOD_RES (135)..(135): Selenocysteine
  MOD_RES (158)..(159): Selenocysteine
  MOD_RES (167)..(167): Selenocysteine
  MOD_RES (175)..(175): Selenocysteine
  MOD_RES (187)..(187): Selenocysteine
  MOD_RES (190)..(190): Selenocysteine
  MOD_RES (209)..(209): Selenocysteine
  MOD_RES (227)..(227): Selenocysteine
  MOD_RES (256)..(256): Selenocysteine
  MOD_RES (275)..(275): Selenocysteine
  MOD_RES (280)..(280): Selenocysteine
  MOD_RES (289)..(289): Selenocysteine
  MOD_RES (385)..(385): Selenocysteine
  MOD_RES (420)..(420): Selenocysteine
  MOD_RES (426)..(426): Selenocysteine
  MOD_RES (435)..(435): Selenocysteine
  MOD_RES (449)..(449): Selenocysteine
  MOD_RES (481)..(481): Selenocysteine
  MOD_RES (494)..(494): Selenocysteine
  MOD_RES (563)..(563): Selenocysteine
  MOD_RES (566)..(566): Selenocysteine
  MOD_RES (603)..(603): Selenocysteine
  MOD_RES (620)..(620): Selenocysteine
  MOD_RES (630)..(630): Selenocysteine
  MOD_RES (638)..(638): Selenocysteine
  MOD_RES (653)..(653): Selenocysteine
  MOD_RES (750)..(750): Selenocysteine
  MOD_RES (755)..(756): Selenocysteine
MSFGILKPDLRIVFVHNKAVIWQKSRVSDHKMALMSVLGXAVMNNMESFQYHSEESQIYLSGFLPKCDADHSFXSLSXPERSFIFINSRPVHQKDILKLIRHHYNLKCLKESXRLYPVFFLKIDVPXADVDVNLXPDKSQVLLQNKESVLIALENLMXXCYGPLPSXNSYENNKXDVSAADIVLSKXAEXDVLFNKVESSGKNYSNVDXSVIPFQNDMHNDESGKNXDDCLNHQISIGDFGYGHCSSEISNIDKNXKNAFQDISMSNVSWENSQXEYSKXCFISSVKHXQSENGNKDHIDESGENEEEAGLENSSEISADEWSRGNILKNSVGENIEPVKILVPEKSLPCKVSNNNYPIPEQMNLNEDSCNKKSNVIDNKSGKVXAYDLLSNRVIKKPMSASALFVQDHRPQFLIENPKXSLEDAXLQIEELWKXLSEEEKLKYEEKAXKDLERYNSQMKRAIEQESQMSLKDGRKKIKPXSAWNLAQKHKLKXSLSNQPKLDELLQSQIEKRRSQNIKMVQIPFSMKNLKINFKKQNKVDLEEKDEPCLIHNLRFPDAWLMXSKXEVMLLNPYRVEEALLFKRLLENHKLPAEPLEKPIMLXESLFNGSHYLDVLYKMXADDQRYSGSXYLSDPRLXANGFKIKLIPGVSIXENYLEIEGMANCLPFYGVADLKEILNAILNRNAKEVYECRPRKVISYLEGEAVRLSRQLPMYLSKEDIQDIIYRMKHQFGNEIKECVHGRPFFHHLXYLPEXX

SEQ ID NO: 20719 - protein, 555 aa, Homo sapiens
  MOD_RES (35)..(35): Selenocysteine
  MOD_RES (39)..(39): Selenocysteine
  MOD_RES (74)..(74): Selenocysteine
  MOD_RES (88)..(88): Selenocysteine
  MOD_RES (96)..(96): Selenocysteine
  MOD_RES (119)..(120): Selenocysteine
  MOD_RES (128)..(128): Selenocysteine
  MOD_RES (136)..(136): Selenocysteine
  MOD_RES (148)..(148): Selenocysteine
  MOD_RES (151)..(151): Selenocysteine
  MOD_RES (170)..(170): Selenocysteine
  MOD_RES (188)..(188): Selenocysteine
  MOD_RES (217)..(217): Selenocysteine
  MOD_RES (236)..(236): Selenocysteine
  MOD_RES (241)..(241): Selenocysteine
  MOD_RES (250)..(250): Selenocysteine
  MOD_RES (346)..(346): Selenocysteine
  MOD_RES (381)..(381): Selenocysteine
  MOD_RES (387)..(387): Selenocysteine
  MOD_RES (396)..(396): Selenocysteine
  MOD_RES (419)..(419): Selenocysteine
  MOD_RES (429)..(429): Selenocysteine
  MOD_RES (437)..(437): Selenocysteine
  MOD_RES (452)..(452): Selenocysteine
  MOD_RES (549)..(549): Selenocysteine
  MOD_RES (554)..(555): Selenocysteine
MSFGILKPDLRIVFVHNKIYLSGFLPKCDADHSFXSLSXPERSFIFINSRPVHQKDILKLIRHHYNLKCLKESXRLYPVFFLKIDVPXADVDVNLXPDKSQVLLQNKESVLIALENLMXXCYGPLPSXNSYENNKXDVSAADIVLSKXAEXDVLFNKVESSGKNYSNVDXSVIPFQNDMHNDESGKNXDDCLNHQISIGDFGYGHCSSEISNIDKNXKNAFQDISMSNVSWENSQXEYSKXCFISSVKHXQSENGNKDHIDESGENEEEAGLENSSEISADEWSRGNILKNSVGENIEPVKILVPEKSLPCKVSNNNYPIPEQMNLNEDSCNKKSNVIDNKSGKVXAYDLLSNRVIKKPMSASALFVQDHRPQFLIENPKXSLEDAXLQIEELWKXLSEEEKLNLFNGSHYLDVLYKMXADDQRYSGSXYLSDPRLXANGFKIKLIPGVSIXENYLEIEGMANCLPFYGVADLKEILNAILNRNAKEVYECRPRKVISYLEGEAVRLSRQLPMYLSKEDIQDIIYRMKHQFGNEIKECVHGRPFFHHLXYLPEXX

SEQ ID NO: 20720 - protein, 112 aa, Homo sapiens
  MOD_RES (70)..(70): Selenocysteine
  MOD_RES (105)..(105): Selenocysteine
MARSSWQLSPAAPEHVAAALYQPRASEMQHLRRMPRVRSLFQEQEEPEPGMEEAGEMEQKQLQKRFGGFXGARKSARKLANQKRFSEFMRQYLVLSMQSSQRRRXLHQNGNV

SEQ ID NO: 20721 - protein, 154 aa, Homo sapiens
  MOD_RES (27)..(27): Selenocysteine
  MOD_RES (59)..(59): Selenocysteine
  MOD_RES (62)..(62): Selenocysteine
  MOD_RES (134)..(134): Selenocysteine
MKVLLCDLLLLSLFSSVFSSCQRDCLXCQEKLHPALDSFDLEVCILECEEKVFPSPLWXPCXKVMARSSWQLSPAAPEHVAAALYQPRASEMQHLRRMPRVRSLFQEQEEPEPGMEEAGEMEQKQLQKRFGGFXGARKSARKLANQKRFSEFMR

SEQ ID NO: 20722 - protein, 176 aa, Homo sapiens
  MOD_RES (27)..(27): Selenocysteine
  MOD_RES (59)..(59): Selenocysteine
  MOD_RES (62)..(62): Selenocysteine
  MOD_RES (134)..(134): Selenocysteine
  MOD_RES (169)..(169): Selenocysteine
MKVLLCDLLLLSLFSSVFSSCQRDCLXCQEKLHPALDSFDLEVCILECEEKVFPSPLWXPCXKVMARSSWQLSPAAPEHVAAALYQPRASEMQHLRRMPRVRSLFQEQEEPEPGMEEAGEMEQKQLQKRFGGFXGARKSARKLANQKRFSEFMRQYLVLSMQSSQRRRXLHQNGNV

SEQ ID NO: 20723 - protein, 519 aa, Homo sapiens
  MOD_RES (48)..(48): Selenocysteine
  MOD_RES (146)..(146): Selenocysteine
  MOD_RES (181)..(181): Selenocysteine
  MOD_RES (189)..(189): Selenocysteine
  MOD_RES (236)..(236): Selenocysteine
  MOD_RES (269)..(269): Selenocysteine
  MOD_RES (290)..(290): Selenocysteine
  MOD_RES (299)..(299): Selenocysteine
  MOD_RES (308)..(309): Selenocysteine
  MOD_RES (323)..(323): Selenocysteine
  MOD_RES (350)..(350): Selenocysteine
  MOD_RES (389)..(389): Selenocysteine
  MOD_RES (420)..(420): Selenocysteine
  MOD_RES (451)..(451): Selenocysteine
  MOD_RES (518)..(518): Selenocysteine
MEGARARGAQLRLGERVRPVGRRSAPGRSRFRQPWRPGASDSAPPAGXMAQSRVLLLLLLLPPQLHLGPVLAVRAPGFGRSGGHSLSPEENEFAEEEPVLVLSPEEPGPGPAAVSCPRDCACSQEGVVDCGGIDLREFPGDLPEHXNHLSLQNNKLEKIPPGAFSELSSLRELYLQNNYLXDEGLDNEXFWKLSSLEYLDLSSNNLSRVPAGLPRSLVLLHLEKNAIRSVDANVLXPIRSLEYLLLHSNQLREQGIHPLAFQGLKRLHXVHLYNNALERVPSGLPRRVRXLMILHNQIXGIGREDFAXXYFLEELNLSYNRIXSPQVHRDAFRKLRLLRSLDLSGNRLHXLPPGLPRNVHVLKVKRNELAALARGALVGMAQLRELYLXSNRLRSRALGPRAWVDLAHLQLLDIAGNQLXEIPEGLPESLEYLYLQNNKISAVPANAFDSXPNLKGIFLRFNKLAVGSVVDSAFRRLKHLQVLDIEGNLEFGDISKDRGRLGKEKEEEEEEEEEEEEXR

SEQ ID NO: 20724 - protein, 661 aa, Homo sapiens
  MOD_RES (48)..(48): Selenocysteine
  MOD_RES (146)..(146): Selenocysteine
  MOD_RES (172)..(172): Selenocysteine
  MOD_RES (181)..(181): Selenocysteine
  MOD_RES (194)..(194): Selenocysteine
  MOD_RES (207)..(207): Selenocysteine
  MOD_RES (228)..(228): Selenocysteine
  MOD_RES (234)..(234): Selenocysteine
  MOD_RES (323)..(323): Selenocysteine
  MOD_RES (331)..(331): Selenocysteine
  MOD_RES (378)..(378): Selenocysteine
  MOD_RES (411)..(411): Selenocysteine
  MOD_RES (432)..(432): Selenocysteine
  MOD_RES (441)..(441): Selenocysteine
  MOD_RES (450)..(451): Selenocysteine
  MOD_RES (465)..(465): Selenocysteine
  MOD_RES (492)..(492): Selenocysteine
  MOD_RES (531)..(531): Selenocysteine
  MOD_RES (562)..(562): Selenocysteine
  MOD_RES (593)..(593): Selenocysteine
  MOD_RES (660)..(660): Selenocysteine
MEGARARGAQLRLGERVRPVGRRSAPGRSRFRQPWRPGASDSAPPAGXMAQSRVLLLLLLLPPQLHLGPVLAVRAPGFGRSGGHSLSPEENEFAEEEPVLVLSPEEPGPGPAAVSCPRDCACSQEGVVDCGGIDLREFPGDLPEHXNHLSLQNNQLEKIYPEELSRLHRLEXLNLQNNRLXSRGLPEKAFEHLXNLNYLYLANNKLXLAPRFLPNALISVDFAANYLXKIYGLXFGQKPNLRSVYLHNNKLADAGLPDNMFNGSSNVEVLILSSNFLRHVPKHLPPALYKLHLKNNKLEKIPPGAFSELSSLRELYLQNNYLXDEGLDNEXFWKLSSLEYLDLSSNNLSRVPAGLPRSLVLLHLEKNAIRSVDANVLXPIRSLEYLLLHSNQLREQGIHPLAFQGLKRLHXVHLYNNALERVPSGLPRRVRXLMILHNQIXGIGREDFAXXYFLEELNLSYNRIXSPQVHRDAFRKLRLLRSLDLSGNRLHXLPPGLPRNVHVLKVKRNELAALARGALVGMAQLRELYLXSNRLRSRALGPRAWVDLAHLQLLDIAGNQLXEIPEGLPESLEYLYLQNNKISAVPANAFDSXPNLKGIFLRFNKLAVGSVVDSAFRRLKHLQVLDIEGNLEFGDISKDRGRLGKEKEEEEEEEEEEEEXR

SEQ ID NO: 20725 - protein, 642 aa, Homo sapiens
  MOD_RES (29)..(29): Selenocysteine
  MOD_RES (127)..(127): Selenocysteine
  MOD_RES (153)..(153): Selenocysteine
  MOD_RES (162)..(162): Selenocysteine
  MOD_RES (175)..(175): Selenocysteine
  MOD_RES (188)..(188): Selenocysteine
  MOD_RES (209)..(209): Selenocysteine
  MOD_RES (215)..(215): Selenocysteine
  MOD_RES (304)..(304): Selenocysteine
  MOD_RES (312)..(312): Selenocysteine
  MOD_RES (359)..(359): Selenocysteine
  MOD_RES (392)..(392): Selenocysteine
  MOD_RES (413)..(413): Selenocysteine
  MOD_RES (422)..(422): Selenocysteine
  MOD_RES (431)..(432): Selenocysteine
  MOD_RES (446)..(446): Selenocysteine
  MOD_RES (473)..(473): Selenocysteine
  MOD_RES (512)..(512): Selenocysteine
  MOD_RES (543)..(543): Selenocysteine
  MOD_RES (574)..(574): Selenocysteine
  MOD_RES (641)..(641): Selenocysteine
MEGEEAEQPAWFRQPWRPGASDSAPPAGXMAQSRVLLLLLLLPPQLHLGPVLAVRAPGFGRSGGHSLSPEENEFAEEEPVLVLSPEEPGPGPAAVSCPRDCACSQEGVVDCGGIDLREFPGDLPEHXNHLSLQNNQLEKIYPEELSRLHRLEXLNLQNNRLXSRGLPEKAFEHLXNLNYLYLANNKLXLAPRFLPNALISVDFAANYLXKIYGLXFGQKPNLRSVYLHNNKLADAGLPDNMFNGSSNVEVLILSSNFLRHVPKHLPPALYKLHLKNNKLEKIPPGAFSELSSLRELYLQNNYLXDEGLDNEXFWKLSSLEYLDLSSNNLSRVPAGLPRSLVLLHLEKNAIRSVDANVLXPIRSLEYLLLHSNQLREQGIHPLAFQGLKRLHXVHLYNNALERVPSGLPRRVRXLMILHNQIXGIGREDFAXXYFLEELNLSYNRIXSPQVHRDAFRKLRLLRSLDLSGNRLHXLPPGLPRNVHVLKVKRNELAALARGALVGMAQLRELYLXSNRLRSRALGPRAWVDLAHLQLLDIAGNQLXEIPEGLPESLEYLYLQNNKISAVPANAFDSXPNLKGIFLRFNKLAVGSVVDSAFRRLKHLQVLDIEGNLEFGDISKDRGRLGKEKEEEEEEEEEEEEXR

SEQ ID NO: 20726 - protein, 135 aa, Homo sapiens
  MOD_RES (41)..(41): Selenocysteine
  MOD_RES (90)..(90): Selenocysteine
LQLQRNQLRMLEPEPLAGLDQLRELSLAHNRLRVGDIGPGXWHELQALQMLDLSHNELSFVPPDLPEALEELHLEGNRIGHVGPEAFLSXPRLRALFLRCPEGDRRGGGGQGRAWEGHDRLSVQGQQASHDEHRG

SEQ ID NO: 20727 - protein, 512 aa, Homo sapiens
  MOD_RES (57)..(57): Selenocysteine
  MOD_RES (73)..(73): Selenocysteine
  MOD_RES (102)..(102): Selenocysteine
  MOD_RES (124)..(124): Selenocysteine
  MOD_RES (164)..(164): Selenocysteine
  MOD_RES (199)..(199): Selenocysteine
  MOD_RES (240)..(240): Selenocysteine
  MOD_RES (253)..(253): Selenocysteine
  MOD_RES (260)..(261): Selenocysteine
  MOD_RES (279)..(280): Selenocysteine
  MOD_RES (288)..(288): Selenocysteine
  MOD_RES (341)..(341): Selenocysteine
  MOD_RES (381)..(381): Selenocysteine
  MOD_RES (385)..(385): Selenocysteine
  MOD_RES (421)..(421): Selenocysteine
  MOD_RES (429)..(429): Selenocysteine
  MOD_RES (433)..(433): Selenocysteine
  MOD_RES (474)..(474): Selenocysteine
  MOD_RES (491)..(491): Selenocysteine
MAESGLAMWPSLLLLLLLPGPPPVAGLEDAAFPHLGESLQPLPRACPLRCSCPRVDXVDCDGLDLRVFPDNIXRAAQHLSLQNNQLQELPYNELSRLSGLRXLNLHNNLISSEGLPDEAFESLXQLQHLCVAHNKLSVAPQFLPRSLRVADLAANQVMEIFPLXFGEKPALRSVYLHNNQLSNAGLPPDAFRGSEAIAXLSLSNNQLSYLPPSLPPSLERLHLQNNLISKVPRGALSRQXQLRELYLQHNQLXDSGLDAXXFSKLHSLEYLDLSHNQLXXVPAGLPRXLAILHLGRNRIRQVEAARLHGARGLRYLLLQHNQLGSSGLPAGALRPLRGLHXLHLYGNGLDRVPPALPRRLRALVLPHNHVAALGARDLVAXPGLXELNLAYNRLASARVHHRAFRRLRALRSLDLAGNQLXRLPMGLPXGLRXLQLQRNQLRMLEPEPLAGLDQLRELSLAHNRLRVGDIGPGXWHELQALQVRHRLVSHXVPRAPPSPCLPCHVPNILVSW

SEQ ID NO: 20728 - protein, 32 aa, Homo sapiens
  MOD_RES (4)..(4): Selenocysteine
  MOD_RES (10)..(11): Selenocysteine
  MOD_RES (18)..(18): Selenocysteine
  MOD_RES (23)..(24): Selenocysteine
  MOD_RES (31)..(31): Selenocysteine
MAWXFECSRXXSPEPLSXSPCRXXSSRNSPXM

SEQ ID NO: 20729 - protein, 430 aa, Homo sapiens
  MOD_RES (4)..(4): Selenocysteine
  MOD_RES (10)..(11): Selenocysteine
  MOD_RES (18)..(18): Selenocysteine
  MOD_RES (23)..(24): Selenocysteine
  MOD_RES (31)..(31): Selenocysteine
  MOD_RES (44)..(44): Selenocysteine
  MOD_RES (46)..(48): Selenocysteine
  MOD_RES (82)..(82): Selenocysteine
  MOD_RES (117)..(117): Selenocysteine
  MOD_RES (158)..(158): Selenocysteine
  MOD_RES (171)..(171): Selenocysteine
  MOD_RES (178)..(179): Selenocysteine
  MOD_RES (197)..(198): Selenocysteine
  MOD_RES (206)..(206): Selenocysteine
  MOD_RES (259)..(259): Selenocysteine
  MOD_RES (299)..(299): Selenocysteine
  MOD_RES (303)..(303): Selenocysteine
  MOD_RES (339)..(339): Selenocysteine
  MOD_RES (347)..(347): Selenocysteine
  MOD_RES (351)..(351): Selenocysteine
  MOD_RES (392)..(392): Selenocysteine
  MOD_RES (409)..(409): Selenocysteine
MAWXFECSRXXSPEPLSXSPCRXXSSRNSPXMSCPASVACEPSXSXXXSSPPKLSVAPQFLPRSLRVADLAANQVMEIFPLXFGEKPALRSVYLHNNQLSNAGLPPDAFRGSEAIAXLSLSNNQLSYLPPSLPPSLERLHLQNNLISKVPRGALSRQXQLRELYLQHNQLXDSGLDAXXFSKLHSLEYLDLSHNQLXXVPAGLPRXLAILHLGRNRIRQVEAARLHGARGLRYLLLQHNQLGSSGLPAGALRPLRGLHXLHLYGNGLDRVPPALPRRLRALVLPHNHVAALGARDLVAXPGLXELNLAYNRLASARVHHRAFRRLRALRSLDLAGNQLXRLPMGLPXGLRXLQLQRNQLRMLEPEPLAGLDQLRELSLAHNRLRVGDIGPGXWHELQALQVRHRLVSHXVPRAPPSPCLPCHVPNILVSW

SEQ ID NO: 20730 - protein, 164 aa, Homo sapiens
  MOD_RES (4)..(4): Selenocysteine
  MOD_RES (10)..(11): Selenocysteine
  MOD_RES (18)..(18): Selenocysteine
  MOD_RES (23)..(24): Selenocysteine
  MOD_RES (31)..(31): Selenocysteine
  MOD_RES (44)..(44): Selenocysteine
  MOD_RES (46)..(48): Selenocysteine
  MOD_RES (69)..(69): Selenocysteine
  MOD_RES (82)..(82): Selenocysteine
  MOD_RES (89)..(90): Selenocysteine
  MOD_RES (108)..(109): Selenocysteine
  MOD_RES (117)..(117): Selenocysteine
MAWXFECSRXXSPEPLSXSPCRXXSSRNSPXMSCPASVACEPSXSXXXSSPPKNNLISKVPRGALSRQXQLRELYLQHNQLXDSGLDAXXFSKLHSLEYLDLSHNQLXXVPAGLPRXLAILHLGRNRIRQVEAARLHGARGLRYLLLQHNQLGSSGLPAGALRP

SEQ ID NO: 20731 - protein, 123 aa, Homo sapiens
  MOD_RES (5)..(5): Selenocysteine
  MOD_RES (55)..(55): Selenocysteine
  MOD_RES (71)..(71): Selenocysteine
  MOD_RES (100)..(100): Selenocysteine
MGRPXQWPSLLLLLLLPGPPPVAGLEDAAFPHLGESLQPLPRACPLRCSCPRVDXVDCDGLDLRVFPDNIXRAAQHLSLQNNQLQELPYNELSRLSGLRXLNLHNNLISSEEQSHLQGAPRSP

SEQ ID NO: 20732 - protein, 510 aa, Homo sapiens
  MOD_RES (5)..(5): Selenocysteine
  MOD_RES (55)..(55): Selenocysteine
  MOD_RES (71)..(71): Selenocysteine
  MOD_RES (100)..(100): Selenocysteine
  MOD_RES (122)..(122): Selenocysteine
  MOD_RES (162)..(162): Selenocysteine
  MOD_RES (197)..(197): Selenocysteine
  MOD_RES (238)..(238): Selenocysteine
  MOD_RES (251)..(251): Selenocysteine
  MOD_RES (258)..(259): Selenocysteine
  MOD_RES (277)..(278): Selenocysteine
  MOD_RES (286)..(286): Selenocysteine
  MOD_RES (339)..(339): Selenocysteine
  MOD_RES (379)..(379): Selenocysteine
  MOD_RES (383)..(383): Selenocysteine
  MOD_RES (419)..(419): Selenocysteine
  MOD_RES (427)..(427): Selenocysteine
  MOD_RES (431)..(431): Selenocysteine
  MOD_RES (472)..(472): Selenocysteine
  MOD_RES (489)..(489): Selenocysteine
MGRPXQWPSLLLLLLLPGPPPVAGLEDAAFPHLGESLQPLPRACPLRCSCPRVDXVDCDGLDLRVFPDNIXRAAQHLSLQNNQLQELPYNELSRLSGLRXLNLHNNLISSEGLPDEAFESLXQLQHLCVAHNKLSVAPQFLPRSLRVADLAANQVMEIFPLXFGEKPALRSVYLHNNQLSNAGLPPDAFRGSEAIAXLSLSNNQLSYLPPSLPPSLERLHLQNNLISKVPRGALSRQXQLRELYLQHNQLXDSGLDAXXFSKLHSLEYLDLSHNQLXXVPAGLPRXLAILHLGRNRIRQVEAARLHGARGLRYLLLQHNQLGSSGLPAGALRPLRGLHXLHLYGNGLDRVPPALPRRLRALVLPHNHVAALGARDLVAXPGLXELNLAYNRLASARVHHRAFRRLRALRSLDLAGNQLXRLPMGLPXGLRXLQLQRNQLRMLEPEPLAGLDQLRELSLAHNRLRVGDIGPGXWHELQALQVRHRLVSHXVPRAPPSPCLPCHVPNILVSW

SEQ ID NO: 20733 - protein, 421 aa, Homo sapiens
  MOD_RES (5)..(5): Selenocysteine
  MOD_RES (55)..(55): Selenocysteine
  MOD_RES (71)..(71): Selenocysteine
  MOD_RES (100)..(100): Selenocysteine
  MOD_RES (122)..(122): Selenocysteine
  MOD_RES (149)..(149): Selenocysteine
  MOD_RES (162)..(162): Selenocysteine
  MOD_RES (169)..(170): Selenocysteine
  MOD_RES (188)..(189): Selenocysteine
  MOD_RES (197)..(197): Selenocysteine
  MOD_RES (250)..(250): Selenocysteine
  MOD_RES (290)..(290): Selenocysteine
  MOD_RES (294)..(294): Selenocysteine
  MOD_RES (330)..(330): Selenocysteine
  MOD_RES (338)..(338): Selenocysteine
  MOD_RES (342)..(342): Selenocysteine
  MOD_RES (383)..(383): Selenocysteine
  MOD_RES (400)..(400): Selenocysteine
MGRPXQWPSLLLLLLLPGPPPVAGLEDAAFPHLGESLQPLPRACPLRCSCPRVDXVDCDGLDLRVFPDNIXRAAQHLSLQNNQLQELPYNELSRLSGLRXLNLHNNLISSEGLPDEAFESLXQLQHLCVAHNKNNLISKVPRGALSRQXQLRELYLQHNQLXDSGLDAXXFSKLHSLEYLDLSHNQLXXVPAGLPRXLAILHLGRNRIRQVEAARLHGARGLRYLLLQHNQLGSSGLPAGALRPLRGLHXLHLYGNGLDRVPPALPRRLRALVLPHNHVAALGARDLVAXPGLXELNLAYNRLASARVHHRAFRRLRALRSLDLAGNQLXRLPMGLPXGLRXLQLQRNQLRMLEPEPLAGLDQLRELSLAHNRLRVGDIGPGXWHELQALQVRHRLVSHXVPRAPPSPCLPCHVPNILVSW

SEQ ID NO: 20734 - protein, 151 aa, Homo sapiens
  MOD_RES (30)..(30): Selenocysteine
  MOD_RES (56)..(56): Selenocysteine
  MOD_RES (69)..(69): Selenocysteine
  MOD_RES (76)..(77): Selenocysteine
  MOD_RES (95)..(96): Selenocysteine
  MOD_RES (104)..(104): Selenocysteine
RRLPRLRGHRHPQPLQQPAQLPAAQPAALXRAAPPAGSPANNLISKVPRGALSRQXQLRELYLQHNQLXDSGLDAXXFSKLHSLEYLDLSHNQLXXVPAGLPRXLAILHLGRNRIRQVEAARLHGARGLRYLLLQHNQLGSSGLPAGALRP

SEQ ID NO: 20735 - protein, 182 aa, Homo sapiens
  MOD_RES (1)..(1): Any amino acid
  MOD_RES (6)..(6): Selenocysteine
  MOD_RES (36)..(36): Selenocysteine
  MOD_RES (77)..(77): Selenocysteine
  MOD_RES (90)..(90): Selenocysteine
  MOD_RES (97)..(98): Selenocysteine
  MOD_RES (116)..(117): Selenocysteine
  MOD_RES (125)..(125): Selenocysteine
  MOD_RES (178)..(178): Selenocysteine
XFESLXQLQHLCVAHNKLSNAGLPPDAFRGSEAIAXLSLSNNQLSYLPPSLPPSLERLHLQNNLISKVPRGALSRQXQLRELYLQHNQLXDSGLDAXXFSKLHSLEYLDLSHNQLXXVPAGLPRXLAILHLGRNRIRQVEAARLHGARGLRYLLLQHNQLGSSGLPAGALRPLRGLHXLHLY

SEQ ID NO: 20736 - protein, 238 aa, Homo sapiens
  MOD_RES (1)..(1): Any amino acid
  MOD_RES (38)..(38): Selenocysteine
  MOD_RES (42)..(42): Selenocysteine
  MOD_RES (78)..(78): Selenocysteine
  MOD_RES (86)..(86): Selenocysteine
  MOD_RES (90)..(90): Selenocysteine
  MOD_RES (131)..(131): Selenocysteine
  MOD_RES (180)..(180): Selenocysteine
  MOD_RES (196)..(196): Selenocysteine
  MOD_RES (214)..(214): Selenocysteine
  MOD_RES (228)..(229): Selenocysteine
XYGNGLDRVPPALPRRLRALVLPHNHVAALGARDLVAXPGLXELNLAYNRLASARVHHRAFRRLRALRSLDLAGNQLXRLPMGLPXGLRXLQLQRNQLRMLEPEPLAGLDQLRELSLAHNRLRVGDIGPGXWHELQALQMLDLSHNELSFVPPDLPEALEELHLEGNRIGHVGPEAFLSXPRLRALFLRANRLHMXSIAAEAFLGLPNLRVVDXAGNPEQVLIRLPPXXPRGPRAGGP

SEQ ID NO: 20737 - protein, 388 aa, Homo sapiens
  MOD_RES (64)..(64): Selenocysteine
  MOD_RES (81)..(81): Selenocysteine
  MOD_RES (115)..(115): Selenocysteine
  MOD_RES (139)..(139): Selenocysteine
  MOD_RES (166)..(166): Selenocysteine
  MOD_RES (221)..(221): Selenocysteine
  MOD_RES (256)..(256): Selenocysteine
  MOD_RES (274)..(274): Selenocysteine
  MOD_RES (279)..(279): Selenocysteine
  MOD_RES (281)..(281): Selenocysteine
  MOD_RES (310)..(310): Selenocysteine
  MOD_RES (359)..(359): Selenocysteine
MGAAAWARPLSVSFLLLLLPLPGMPAGSWDPAGYLLYCPCMGRFGNQADHFLGSLAFAKLLNRXLAVPPWIEYQHHKPPFXNLHVSYQKYFKLEPLQAYHRVISLEDFMEKLAPXHWPPEKRVAYCFEVAAQRSPDKKXCPMKEGNPFGPFWDQFHVSFNKSELFXGISFSASYREQWSQRFSPKEHPVLALPGAPAQFPVLEEHRPLQKYMVWSDEMVKXGEAQIHAHLVRPYVGIHLRIGSDWKNACAMLKDGXAGSHFMASPQCVGYSRSXAAPLXMXMCLPDLKEIQRAVKLWVRSLDAQSVYVAXDSESYVPELQQLFKGKVKVVSLKPEVAQVDLYILGQADHFIGNCVSSFXAFVKRERDLQGRPSSFFGMDRPPKLRDEF

SEQ ID NO: 20738 - protein, 194 aa, Homo sapiens
  MOD_RES (64)..(64): Selenocysteine
  MOD_RES (81)..(81): Selenocysteine
  MOD_RES (115)..(115): Selenocysteine
  MOD_RES (139)..(139): Selenocysteine
  MOD_RES (166)..(166): Selenocysteine
  MOD_RES (189)..(189): Selenocysteine
MGAAAWARPLSVSFLLLLLPLPGMPAGSWDPAGYLLYCPCMGRFGNQADHFLGSLAFAKLLNRXLAVPPWIEYQHHKPPFXNLHVSYQKYFKLEPLQAYHRVISLEDFMEKLAPXHWPPEKRVAYCFEVAAQRSPDKKXCPMKEGNPFGPFWDQFHVSFNKSELFXGISFSASYREQWSQRRENHSCVXLLFPR

SEQ ID NO: 20739 - protein, 111 aa, Homo sapiens
  MOD_RES (88)..(88): Selenocysteine
  MOD_RES (91)..(91): Selenocysteine
  MOD_RES (97)..(97): Selenocysteine
  MOD_RES (104)..(104): Selenocysteine
  MOD_RES (108)..(108): Selenocysteine
MEWWASSPLRLWLLLFLLPSAQGRQKESGGLRAVPSLPLGLGVWPESRGAPPRGRLPGRCRGRCSSELGRRHRGALRRRVQNGKYLLXKLXGLWRIXNHVQVKXAAAXMVS

SEQ ID NO: 20740 - protein, 163 aa, Homo sapiens
  MOD_RES (66)..(66): Selenocysteine
  MOD_RES (87)..(87): Selenocysteine
  MOD_RES (92)..(92): Selenocysteine
MEWWASSPLRLWLLLFLLPSAQGRQKESGSKWKVFIDQINRSLENYEPCSSQNCSCYHGVIEEDLXPFRGGISRKMMAEVVRRKLGXHYQIXKNRLYRENDCMFPSRCSGVEHFILEVIGRLPDMEMVINVRDYPQVPKWMEPAIPVFSFSKARLWKIGKIYL

SEQ ID NO: 20741 - protein, 187 aa, Homo sapiens
  MOD_RES (66)..(66): Selenocysteine
  MOD_RES (87)..(87): Selenocysteine
  MOD_RES (92)..(92): Selenocysteine
  MOD_RES (153)..(153): Selenocysteine
MEWWASSPLRLWLLLFLLPSAQGRQKESGSKWKVFIDQINRSLENYEPCSSQNCSCYHGVIEEDLXPFRGGISRKMMAEVVRRKLGXHYQIXKNRLYRENDCMFPSRCSGVEHFILEVIGRLPDMEMVINVRDYPQVPKWMEPAIPVFSFSKXCFISCVASGQRPHLCCISHGLASFLESVWFHCLS

SEQ ID NO: 20742 - protein, 392 aa, Homo sapiens
  MOD_RES (66)..(66): Selenocysteine
  MOD_RES (87)..(87): Selenocysteine
  MOD_RES (92)..(92): Selenocysteine
  MOD_RES (153)..(153): Selenocysteine
  MOD_RES (165)..(165): Selenocysteine
  MOD_RES (179)..(179): Selenocysteine
  MOD_RES (206)..(206): Selenocysteine
  MOD_RES (214)..(214): Selenocysteine
  MOD_RES (237)..(237): Selenocysteine
  MOD_RES (248)..(248): Selenocysteine
  MOD_RES (316)..(316): Selenocysteine
  MOD_RES (356)..(356): Selenocysteine
  MOD_RES (375)..(375): Selenocysteine
  MOD_RES (390)..(390): Selenocysteine
MEWWASSPLRLWLLLFLLPSAQGRQKESGSKWKVFIDQINRSLENYEPCSSQNCSCYHGVIEEDLXPFRGGISRKMMAEVVRRKLGXHYQIXKNRLYRENDCMFPSRCSGVEHFILEVIGRLPDMEMVINVRDYPQVPKWMEPAIPVFSFSKXSEYHDIMYPAWXFWEGGPAVWPIYPXGLGRWDLFREDLVRSAAQWPWKKKNSXAYFRGSRXSPERDPLILLSRKNPKLVDAEYXKNQAWKSMKDXLGKPAAKDVHLVDHCKYKYLFNFRGVAASFRFKHLFLCGSLVFHVGDEWLEFFYPQLKPWVHYIPVKXDLSNVQELLQFVKANDDVAQEIAERGSQFIRNHLQMDDIXCYWENLLSEYSKFLSYNVXRRKGYDQIIPKMLKXEL

SEQ ID NO: 20743 - protein, 189 aa, Homo sapiens
  MOD_RES (1)..(1): Any amino acid
  MOD_RES (53)..(53): Selenocysteine
  MOD_RES (74)..(74): Selenocysteine
  MOD_RES (79)..(79): Selenocysteine
  MOD_RES (140)..(140): Selenocysteine
  MOD_RES (152)..(152): Selenocysteine
  MOD_RES (166)..(166): Selenocysteine
XCGAALPPAPQRGICSSKWKVFIDQINRSLENYEPCSSQNCSCYHGVIEEDLXPFRGGISRKMMAEVVRRKLGXHYQIXKNRLYRENDCMFPSRCSGVEHFILEVIGRLPDMEMVINVRDYPQVPKWMEPAIPVFSFSKXSEYHDIMYPAWXFWEGGPAVWPIYPXGLGRWDLFREDLVRSAAQWPWKK

SEQ ID NO: 20744 - protein, 29 aa, Homo sapiens
ASVIAKYPHKIKSGAEAKKLSICCKEVCR

SEQ ID NO: 20745 - protein, 51 aa, Homo sapiens
  MOD_RES (22)..(22): Selenocysteine
  MOD_RES (42)..(42): Selenocysteine
  MOD_RES (47)..(47): Selenocysteine
  MOD_RES (51)..(51): Selenocysteine
MLQMQDIVLNEVKKVDSEYIAXVCGSFRRGAESSGDMDVLLXHPSFXSESX

SEQ ID NO: 20746 - protein, 54 aa, Homo sapiens
  MOD_RES (11)..(11): Selenocysteine
  MOD_RES (16)..(16): Selenocysteine
  MOD_RES (23)..(23): Selenocysteine
MRAHALEKGFXINEYXIRPLGVXGVAGEPLPVDSEKDIFDYIQWKYREPKDRSE

SEQ ID NO: 20747 - protein, 193 aa, Homo sapiens
  MOD_RES (10)..(10): Selenocysteine
  MOD_RES (16)..(16): Selenocysteine
  MOD_RES (20)..(20): Selenocysteine
  MOD_RES (67)..(67): Selenocysteine
  MOD_RES (79)..(79): Selenocysteine
  MOD_RES (93)..(93): Selenocysteine
  MOD_RES (101)..(101): Selenocysteine
  MOD_RES (121)..(121): Selenocysteine
  MOD_RES (176)..(176): Selenocysteine
  MOD_RES (191)..(191): Selenocysteine
MSKRKAPQEXLNGGIXDMLXELANFEKNVSQAIHKYNAYRKAASVIAKYPHKIKSGAEAKKLPGVGXKIAEKIDEFLAXGKLRKLEKIRQDDXSSSINFLXRVSGIGPSAARKFVDEGIKXLEDLRKNEDKLNHHQRIGLKYFGDFEKRIPREEMLQMQDIVLNEVKKVDSEYIAXVCGSFRRDSAVYINXPE

SEQ ID NO: 20748 - protein, 335 aa, Homo sapiens
  MOD_RES (10)..(10): Selenocysteine
  MOD_RES (16)..(16): Selenocysteine
  MOD_RES (20)..(20): Selenocysteine
  MOD_RES (67)..(67): Selenocysteine
  MOD_RES (79)..(79): Selenocysteine
  MOD_RES (93)..(93): Selenocysteine
  MOD_RES (101)..(101): Selenocysteine
  MOD_RES (121)..(121): Selenocysteine
  MOD_RES (176)..(176): Selenocysteine
  MOD_RES (196)..(196): Selenocysteine
  MOD_RES (201)..(201): Selenocysteine
  MOD_RES (205)..(205): Selenocysteine
  MOD_RES (225)..(225): Selenocysteine
  MOD_RES (227)..(227): Selenocysteine
  MOD_RES (233)..(233): Selenocysteine
  MOD_RES (273)..(273): Selenocysteine
  MOD_RES (292)..(292): Selenocysteine
  MOD_RES (297)..(297): Selenocysteine
  MOD_RES (304)..(304): Selenocysteine
MSKRKAPQEXLNGGIXDMLXELANFEKNVSQAIHKYNAYRKAASVIAKYPHKIKSGAEAKKLPGVGXKIAEKIDEFLAXGKLRKLEKIRQDDXSSSINFLXRVSGIGPSAARKFVDEGIKXLEDLRKNEDKLNHHQRIGLKYFGDFEKRIPREEMLQMQDIVLNEVKKVDSEYIAXVCGSFRRGAESSGDMDVLLXHPSFXSESXKQPKLLHQVVEQLQKVHFIXDXLSKGEXKFMGVCQLPSKNDEKEYPHRRIDIRLIPKDQYYCGVLYFXGSDIFNKNMRAHALEKGFXINEYXIRPLGVXGVAGEPLPVDSEKDIFDYIQWKYREPKDRSE

SEQ ID NO: 20749 - protein, 280 aa, Homo sapiens
  MOD_RES (10)..(10): Selenocysteine
  MOD_RES (16)..(16): Selenocysteine
  MOD_RES (20)..(20): Selenocysteine
  MOD_RES (67)..(67): Selenocysteine
  MOD_RES (79)..(79): Selenocysteine
  MOD_RES (93)..(93): Selenocysteine
  MOD_RES (101)..(101): Selenocysteine
  MOD_RES (121)..(121): Selenocysteine
  MOD_RES (139)..(139): Selenocysteine
  MOD_RES (151)..(151): Selenocysteine
  MOD_RES (211)..(211): Selenocysteine
  MOD_RES (231)..(231): Selenocysteine
  MOD_RES (236)..(236): Selenocysteine
  MOD_RES (240)..(240): Selenocysteine
  MOD_RES (260)..(260): Selenocysteine
  MOD_RES (262)..(262): Selenocysteine
  MOD_RES (268)..(268): Selenocysteine
MSKRKAPQEXLNGGIXDMLXELANFEKNVSQAIHKYNAYRKAASVIAKYPHKIKSGAEAKKLPGVGXKIAEKIDEFLAXGKLRKLEKIRQDDXSSSINFLXRVSGIGPSAARKFVDEGIKXLEGSQLDSCPVKGHLNGXESLLDLIWDVMXILKLKNADLRKNEDKLNHHQRIGLKYFGDFEKRIPREEMLQMQDIVLNEVKKVDSEYIAXVCGSFRRGAESSGDMDVLLXHPSFXSESXKQPKLLHQVVEQLQKVHFIXDXLSKGEXKFMGVCQLPSKN

SEQ ID NO: 20750 - protein, 42 aa, Homo sapiens
  MOD_RES (10)..(10): Selenocysteine
  MOD_RES (16)..(16): Selenocysteine
  MOD_RES (20)..(20): Selenocysteine
MSKRKAPQEXLNGGIXDMLXELANFEKNVSQAIHKYNAYSLE

SEQ ID NO: 20751 - protein, 38 aa, Homo sapiens
  MOD_RES (2)..(2): Selenocysteine
MXILKLKNADLRKNEDKLNHHQRIGLKYFGDFEKRIPR

SEQ ID NO: 20752 - protein, 237 aa, Homo sapiens
  MOD_RES (1)..(1): Any amino acid
  MOD_RES (10)..(10): Selenocysteine
  MOD_RES (24)..(24): Selenocysteine
  MOD_RES (32)..(32): Selenocysteine
  MOD_RES (52)..(52): Selenocysteine
  MOD_RES (107)..(107): Selenocysteine
  MOD_RES (127)..(127): Selenocysteine
  MOD_RES (132)..(132): Selenocysteine
  MOD_RES (136)..(136): Selenocysteine
  MOD_RES (175)..(175): Selenocysteine
  MOD_RES (194)..(194): Selenocysteine
  MOD_RES (199)..(199): Selenocysteine
  MOD_RES (206)..(206): Selenocysteine
XEKIDEFLAXGKLRKLEKIRQDDXSSSINFLXRVSGIGPSAARKFVDEGIKXLEDLRKNEDKLNHHQRIGLKYFGDFEKRIPREEMLQMQDIVLNEVKKVDSEYIAXVCGSFRRGAESSGDMDVLLXHPSFXSESXKQGVCQLPSKNDEKEYPHRRIDIRLIPKDQYYCGVLYFXGSDIFNKNMRAHALEKGFXINEYXIRPLGVXGVAGEPLPVDSEKDIFDYIQWKYREPKDRSE

SEQ ID NO: 20753 - protein, 106 aa, Homo sapiens
  MOD_RES (1)..(1): Any amino acid
  MOD_RES (12)..(12): Selenocysteine
  MOD_RES (17)..(17): Selenocysteine
  MOD_RES (21)..(21): Selenocysteine
  MOD_RES (41)..(41): Selenocysteine
  MOD_RES (43)..(43): Selenocysteine
  MOD_RES (49)..(49): Selenocysteine
  MOD_RES (66)..(66): Selenocysteine
  MOD_RES (70)..(70): Selenocysteine
  MOD_RES (75)..(75): Selenocysteine
  MOD_RES (80)..(80): Selenocysteine
  MOD_RES (103)..(103): Selenocysteine
XESSGDMDVLLXHPSFXSESXKQPKLLHQVVEQLQKVHFIXDXLSKGEXKFMELQENPCQWIVKKXSLIXSSGNXGNPRXGANEACILPGRHNPIGVLIYFLXFAM

SEQ ID NO: 20754 - protein, 239 aa, Homo sapiens
  MOD_RES (1)..(1): Any amino acid
  MOD_RES (34)..(34): Selenocysteine
  MOD_RES (54)..(54): Selenocysteine
  MOD_RES (59)..(59): Selenocysteine
  MOD_RES (63)..(63): Selenocysteine
  MOD_RES (83)..(83): Selenocysteine
  MOD_RES (85)..(85): Selenocysteine
  MOD_RES (91)..(91): Selenocysteine
  MOD_RES (131)..(131): Selenocysteine
  MOD_RES (150)..(150): Selenocysteine
  MOD_RES (155)..(155): Selenocysteine
  MOD_RES (162)..(162): Selenocysteine
  MOD_RES (167)..(167): Selenocysteine
  MOD_RES (199)..(199): Selenocysteine
  MOD_RES (203)..(203): Selenocysteine
  MOD_RES (208)..(208): Selenocysteine
  MOD_RES (213)..(213): Selenocysteine
  MOD_RES (236)..(236): Selenocysteine
XGDFEKRIPREEMLQMQDIVLNEVKKVDSEYIAXVCGSFRRGAESSGDMDVLLXHPSFXSESXKQPKLLHQVVEQLQKVHFIXDXLSKGEXKFMGVCQLPSKNDEKEYPHRRIDIRLIPKDQYYCGVLYFXGSDIFNKNMRAHALEKGFXINEYXIRPLGVXVLQAXREDLMHNMLLGPQLKAIKELQENPCQWIVKKXSLIXSSGNXGNPRXGANEACILPGRHNPIGVLIYFLXFAM

SEQ ID NO: 20755 - protein, 566 aa, Homo sapiens
  MOD_RES (17)..(17): Selenocysteine
  MOD_RES (37)..(37): Selenocysteine
  MOD_RES (46)..(47): Selenocysteine
  MOD_RES (68)..(68): Selenocysteine
  MOD_RES (73)..(73): Selenocysteine
  MOD_RES (79)..(79): Selenocysteine
  MOD_RES (103)..(103): Selenocysteine
  MOD_RES (142)..(142): Selenocysteine
  MOD_RES (176)..(176): Selenocysteine
  MOD_RES (251)..(251): Selenocysteine
  MOD_RES (277)..(277): Selenocysteine
  MOD_RES (316)..(316): Selenocysteine
  MOD_RES (365)..(365): Selenocysteine
  MOD_RES (368)..(368): Selenocysteine
  MOD_RES (389)..(389): Selenocysteine
  MOD_RES (395)..(395): Selenocysteine
  MOD_RES (442)..(442): Selenocysteine
  MOD_RES (463)..(463): Selenocysteine
  MOD_RES (481)..(481): Selenocysteine
  MOD_RES (489)..(490): Selenocysteine
  MOD_RES (511)..(511): Selenocysteine
  MOD_RES (527)..(527): Selenocysteine
  MOD_RES (541)..(541): Selenocysteine
  MOD_RES (543)..(543): Selenocysteine
  MOD_RES (549)..(549): Selenocysteine
MHGGGPPSGDSACPLRXIKRVQFGVLSPDELKRMSVXEGGIKYPEXXEGGRPKLGGLMDPRQGVIERXGRCQXCAGNMXECPGHFGHIELAKPVFHVGFLVKXMKVLRCVCFFCSKLLVDSNNPKIKDILAKSKGQPKKRLXHVYDLCKGKNICEGGEEMDNKFGVEQPEGDEDLXKEKGHGGCGRYQPRIRRSGLELYAEWKHVNEDSQEKKILLSPERVHEIFKRISDEECFVLGMEPRYARPEWMIVXVLPVPPLSVRPAVVMQGSARNQDDLXHKLADIVKINNQLRRNEQNGAAAHVIAEDVKLLQFHVAXMVDNELPGLPRAMQKSGRPLKSLKQRLKGKEGRVRGNLMGKRVDFSARXVIXPDPNLSIDQVGVPRSIAANMXFAEIVXPFNIDRLQELVRRGNSQYPGAKYIIRDNGDRIDLRFHPKPSDLHLQXGYKVERHMCDGDIVIFNRQPXLHKMSMMGHRVRILPWSXFRLNLSVXXPYNADFDGDEMNLHLPQSLEXRAEIQELAMVPRMIVXPQSNRPVMGIVQDXLXAVRKFXKRDVFLERVCGPNGNLA

SEQ ID NO: 20756 - protein, 1980 aa, Homo sapiens
  MOD_RES (17)..(17): Selenocysteine
  MOD_RES (37)..(37): Selenocysteine
  MOD_RES (46)..(47): Selenocysteine
  MOD_RES (68)..(68): Selenocysteine
  MOD_RES (73)..(73): Selenocysteine
  MOD_RES (79)..(79): Selenocysteine
  MOD_RES (103)..(103): Selenocysteine
  MOD_RES (142)..(142): Selenocysteine
  MOD_RES (176)..(176): Selenocysteine
  MOD_RES (251)..(251): Selenocysteine
  MOD_RES (277)..(277): Selenocysteine
  MOD_RES (316)..(316): Selenocysteine
  MOD_RES (365)..(365): Selenocysteine
  MOD_RES (368)..(368): Selenocysteine
  MOD_RES (389)..(389): Selenocysteine
  MOD_RES (395)..(395): Selenocysteine
  MOD_RES (442)..(442): Selenocysteine
  MOD_RES (463)..(463): Selenocysteine
  MOD_RES (481)..(481): Selenocysteine
  MOD_RES (489)..(490): Selenocysteine
  MOD_RES (511)..(511): Selenocysteine
  MOD_RES (527)..(527): Selenocysteine
  MOD_RES (541)..(541): Selenocysteine
  MOD_RES (543)..(543): Selenocysteine
  MOD_RES (549)..(549): Selenocysteine
  MOD_RES (569)..(569): Selenocysteine
  MOD_RES (587)..(587): Selenocysteine
  MOD_RES (605)..(605): Selenocysteine
  MOD_RES (608)..(608): Selenocysteine
  MOD_RES (626)..(626): Selenocysteine
  MOD_RES (647)..(647): Selenocysteine
  MOD_RES (665)..(665): Selenocysteine
  MOD_RES (674)..(674): Selenocysteine
  MOD_RES (686)..(686): Selenocysteine
  MOD_RES (698)..(698): Selenocysteine
  MOD_RES (705)..(705): Selenocysteine
  MOD_RES (728)..(728): Selenocysteine
  MOD_RES (732)..(732): Selenocysteine
  MOD_RES (736)..(736): Selenocysteine
  MOD_RES (752)..(752): Selenocysteine
  MOD_RES (806)..(806): Selenocysteine
  MOD_RES (832)..(832): Selenocysteine
  MOD_RES (834)..(834): Selenocysteine
  MOD_RES (850)..(850): Selenocysteine
  MOD_RES (854)..(854): Selenocysteine
  MOD_RES (857)..(857): Selenocysteine
  MOD_RES (878)..(878): Selenocysteine
  MOD_RES (908)..(908): Selenocysteine
  MOD_RES (925)..(925): Selenocysteine
  MOD_RES (933)..(933): Selenocysteine
  MOD_RES (972)..(972): Selenocysteine
  MOD_RES (1038)..(1038): Selenocysteine
  MOD_RES (1048)..(1048): Selenocysteine
  MOD_RES (1100)..(1100): Selenocysteine
  MOD_RES (1103)..(1103): Selenocysteine
  MOD_RES (1106)..(1106): Selenocysteine
  MOD_RES (1118)..(1118): Selenocysteine
  MOD_RES (1136)..(1136): Selenocysteine
  MOD_RES (1140)..(1140): Selenocysteine
  MOD_RES (1164)..(1165): Selenocysteine
  MOD_RES (1170)..(1170): Selenocysteine
  MOD_RES (1173)..(1173): Selenocysteine
  MOD_RES (1184)..(1184): Selenocysteine
  MOD_RES (1222)..(1222): Selenocysteine
  MOD_RES (1227)..(1227): Selenocysteine
  MOD_RES (1294)..(1294): Selenocysteine
  MOD_RES (1297)..(1297): Selenocysteine
  MOD_RES (1314)..(1314): Selenocysteine
  MOD_RES (1323)..(1323): Selenocysteine
  MOD_RES (1338)..(1338): Selenocysteine
  MOD_RES (1357)..(1358): Selenocysteine
  MOD_RES (1367)..(1367): Selenocysteine
  MOD_RES (1404)..(1404): Selenocysteine
  MOD_RES (1406)..(1406): Selenocysteine
  MOD_RES (1415)..(1415): Selenocysteine
  MOD_RES (1424)..(1424): Selenocysteine
  MOD_RES (1435)..(1435): Selenocysteine
  MOD_RES (1468)..(1468): Selenocysteine
  MOD_RES (1488)..(1488): Selenocysteine
  MOD_RES (1499)..(1499): Selenocysteine
  MOD_RES (1518)..(1518): Selenocysteine
  MOD_RES (1525)..(1525): Selenocysteine
  MOD_RES (1540)..(1540): Selenocysteine
  MOD_RES (1568)..(1568): Selenocysteine
  MOD_RES (1596)..(1596): Selenocysteine
  MOD_RES (1609)..(1609): Selenocysteine
  MOD_RES (1618)..(1618): Selenocysteine
  MOD_RES (1625)..(1625): Selenocysteine
  MOD_RES (1632)..(1632): Selenocysteine
  MOD_RES (1639)..(1639): Selenocysteine
  MOD_RES (1646)..(1646): Selenocysteine
  MOD_RES (1653)..(1653): Selenocysteine
  MOD_RES (1660)..(1660): Selenocysteine
  MOD_RES (1667)..(1667): Selenocysteine
  MOD_RES (1674)..(1674): Selenocysteine
  MOD_RES (1681)..(1681): Selenocysteine
  MOD_RES (1688)..(1688): Selenocysteine
  MOD_RES (1695)..(1695): Selenocysteine
  MOD_RES (1702)..(1702): Selenocysteine
  MOD_RES (1709)..(1709): Selenocysteine
  MOD_RES (1716)..(1716): Selenocysteine
  MOD_RES (1723)..(1723): Selenocysteine
  MOD_RES (1730)..(1730): Selenocysteine
  MOD_RES (1737)..(1737): Selenocysteine
  MOD_RES (1744)..(1744): Selenocysteine
  MOD_RES (1751)..(1751): Selenocysteine
  MOD_RES (1756)..(1756): Selenocysteine
  MOD_RES (1758)..(1758): Selenocysteine
  MOD_RES (1765)..(1765): Selenocysteine
  MOD_RES (1772)..(1772): Selenocysteine
  MOD_RES (1777)..(1777): Selenocysteine
  MOD_RES (1779)..(1779): Selenocysteine
  MOD_RES (1786)..(1786): Selenocysteine
  MOD_RES (1793)..(1793): Selenocysteine
  MOD_RES (1800)..(1800): Selenocysteine
  MOD_RES (1812)..(1812): Selenocysteine
  MOD_RES (1817)..(1817): Selenocysteine
  MOD_RES (1819)..(1819): Selenocysteine
  MOD_RES (1835)..(1835): Selenocysteine
  MOD_RES (1838)..(1838): Selenocysteine
  MOD_RES (1840)..(1840): Selenocysteine
  MOD_RES (1847)..(1847): Selenocysteine
  MOD_RES (1861)..(1861): Selenocysteine
  MOD_RES (1875)..(1875): Selenocysteine
  MOD_RES (1889)..(1889): Selenocysteine
  MOD_RES (1903)..(1903): Selenocysteine
  MOD_RES (1910)..(1910): Selenocysteine
  MOD_RES (1917)..(1917): Selenocysteine
  MOD_RES (1924)..(1924): Selenocysteine
  MOD_RES (1931)..(1931): Selenocysteine
  MOD_RES (1941)..(1941): Selenocysteine
  MOD_RES (1948)..(1948): Selenocysteine
  MOD_RES (1955)..(1955): Selenocysteine
  MOD_RES (1966)..(1966): Selenocysteine
  MOD_RES (1968)..(1968): Selenocysteine
  MOD_RES (1971)..(1971): Selenocysteine
  MOD_RES (1974)..(1974): Selenocysteine
MHGGGPPSGDSACPLRXIKRVQFGVLSPDELKRMSVXEGGIKYPEXXEGGRPKLGGLMDPRQGVIERXGRCQXCAGNMXECPGHFGHIELAKPVFHVGFLVKXMKVLRCVCFFCSKLLVDSNNPKIKDILAKSKGQPKKRLXHVYDLCKGKNICEGGEEMDNKFGVEQPEGDEDLXKEKGHGGCGRYQPRIRRSGLELYAEWKHVNEDSQEKKILLSPERVHEIFKRISDEECFVLGMEPRYARPEWMIVXVLPVPPLSVRPAVVMQGSARNQDDLXHKLADIVKINNQLRRNEQNGAAAHVIAEDVKLLQFHVAXMVDNELPGLPRAMQKSGRPLKSLKQRLKGKEGRVRGNLMGKRVDFSARXVIXPDPNLSIDQVGVPRSIAANMXFAEIVXPFNIDRLQELVRRGNSQYPGAKYIIRDNGDRIDLRFHPKPSDLHLQXGYKVERHMCDGDIVIFNRQPXLHKMSMMGHRVRILPWSXFRLNLSVXXPYNADFDGDEMNLHLPQSLEXRAEIQELAMVPRMIVXPQSNRPVMGIVQDXLXAVRKFXKRDVFLERGEVMNLLMFLSXWDGKVPQPAILKPRPLWXGKQIFSLIIPGHINCIRXHSXHPDDEDSGPYKHISPGDXKVVVENGELIMGILCKKSLGXSAGSLVHISYLEMGHDIXRLFYSNIQXVINNWLLIEGHXIGIGDSIADSKXYQDIQNXIKKAKQDVIEVIEKAHNNELEPXPGNXLRQXFENQVNRILNDARDKXGSSAQKSLSEYNNFKSMVVSGAKGSKINISQVIAVVGQQNVEGKRIPFGFKHRXLPHFIKDDYGPESRGFVENSYLAGLXPXEFFFHAMGGREGLIDXAVKXAEXGYIQRRLIKSMESVMVKYDAXVRNSINQVVQLRYGEDGLAGESVEFQNLAXLKPSNKAFEKKFRFDYXNERALRRXLQEDLVKDVLSNAHIQNELEREFERMREDREVLRVIFPXGDSKVVLPCNLLRMIWNAQKIFHINPRLPSDLHPIKVVEGVKELSKKLVIVNGDDPLSRQAQENAXLLFNIHLRSXLCSRRMAEEFRLSGEAFDWLLGEIESKFNQAIAHPGEMVGALAAQSLGEPAXQMXLNXFHYAGVSAKNVXLGVPRLKELINISKKPKXPSLXVFLLGQSARDAERAKDILCRLEHXXLRKVXANXAIYYDPNPQSXVVAEDQEWVNVYYEMPDFDVARISPWLLRVELDRKHMXDRKLXMEQIAEKINAGFGDDLNCIFNDDNAEKLVLRIRIMNSDENKMQEEEEVVDKMDDDVFLRCIESNMLXDMXLQGIEQISKVYMHLPQXDNKKKIIIXEDGEFKALQEWILEXDGVSLMRVLSEKDVDPVRXXSNDIVEIFXVLGIEAVRKALERELYHVISFDGSYVNYRHLALLCDXMXCRGHLMAIXRHGVNRQDXGPLMKCSFEEXVDVLMEAAAHGESDPMKGVSENIMLGQLAPAGXGCFDLLLDAEKCKYGMEIPXNIPGLGAAGPXGMFFGSAPSPMGGISPAMXPWNQGAXPAYGAWSPSVGSGMXPGAAGFSPSAASDASGFSPGYSPAWSPXPGSPGSPGPSSPYIPSPGGAMSPSYSPXSPAYEPRSPGGYXPQSPSYSPXSPSYSPXSPSYSPXSPNYSPXSPSYSPXSPSYSPXSPSYSPXSPSYSPXSPSYSPXSPSYSPXSPSYSPXSPSYSPXSPSYSPXSPSYSPXSPSYSPXSPSYSPXSPSYSPXSPSYSPXSPSYSPXSPNYSPXSPNYXPXSPSYSPXSPSYSPXSPNYXPXSPNYSPXSPSYSPXSPSYSPXSPSYSPSSPRYXPQSPXYXPSSPSYSPSSPSYSPXSPXSXPQPVLLXVPAPQSIPQPLPSXHLPVPNIHPPLPSXRLPVPPIHPPPQNXPQHLLLIPQPLQSXPQPLPSXHLLAPLXRPLPPSXRPPAPPXRPPPPKAQPXLPLPLVXRPPAPPXVSQARLSARMXVXRRXEGXWGAAAG

SEQ ID NO: 20757 - protein, 1099 aa, Homo sapiens
  MOD_RES (22)..(22): Selenocysteine
  MOD_RES (44)..(44): Selenocysteine
  MOD_RES (54)..(54): Selenocysteine
  MOD_RES (56)..(56): Selenocysteine
  MOD_RES (67)..(67): Selenocysteine
  MOD_RES (72)..(72): Selenocysteine
  MOD_RES (84)..(84): Selenocysteine
  MOD_RES (92)..(92): Selenocysteine
  MOD_RES (127)..(127): Selenocysteine
  MOD_RES (129)..(129): Selenocysteine
  MOD_RES (143)..(143): Selenocysteine
  MOD_RES (157)..(157): Selenocysteine
  MOD_RES (159)..(159): Selenocysteine
  MOD_RES (184)..(184): Selenocysteine
  MOD_RES (256)..(256): Selenocysteine
  MOD_RES (284)..(284): Selenocysteine
  MOD_RES (362)..(362): Selenocysteine
  MOD_RES (375)..(375): Selenocysteine
  MOD_RES (399)..(399): Selenocysteine
  MOD_RES (403)..(403): Selenocysteine
  MOD_RES (429)..(429): Selenocysteine
  MOD_RES (439)..(439): Selenocysteine
  MOD_RES (490)..(490): Selenocysteine
  MOD_RES (511)..(511): Selenocysteine
  MOD_RES (541)..(541): Selenocysteine
  MOD_RES (592)..(592): Selenocysteine
  MOD_RES (597)..(597): Selenocysteine
  MOD_RES (603)..(603): Selenocysteine
  MOD_RES (617)..(617): Selenocysteine
  MOD_RES (619)..(619): Selenocysteine
  MOD_RES (648)..(648): Selenocysteine
  MOD_RES (663)..(663): Selenocysteine
  MOD_RES (671)..(671): Selenocysteine
  MOD_RES (685)..(686): Selenocysteine
  MOD_RES (711)..(711): Selenocysteine
  MOD_RES (758)..(758): Selenocysteine
  MOD_RES (761)..(761): Selenocysteine
  MOD_RES (795)..(795): Selenocysteine
  MOD_RES (797)..(797): Selenocysteine
  MOD_RES (808)..(808): Selenocysteine
  MOD_RES (813)..(813): Selenocysteine
  MOD_RES (819)..(819): Selenocysteine
  MOD_RES (823)..(823): Selenocysteine
  MOD_RES (826)..(826): Selenocysteine
  MOD_RES (835)..(835): Selenocysteine
  MOD_RES (869)..(869): Selenocysteine
  MOD_RES (882)..(882): Selenocysteine
  MOD_RES (887)..(887): Selenocysteine
  MOD_RES (902)..(902): Selenocysteine
  MOD_RES (925)..(925): Selenocysteine
  MOD_RES (958)..(958): Selenocysteine
  MOD_RES (963)..(963): Selenocysteine
  MOD_RES (971)..(971): Selenocysteine
  MOD_RES (1055)..(1055): Selenocysteine
  MOD_RES (1057)..(1057): Selenocysteine
  MOD_RES (1059)..(1059): Selenocysteine
  MOD_RES (1069)..(1069): Selenocysteine
MLDCNQPRYLLKFEQIYLSKPXHWERDGAPSPMMPNEARLRNLXYSAPLYVDIXKXVIKEGEEQLQXQHQKXFIGKIPIMLRSXYCLLNGLXDRDLCELNECPLDPGGYFIINGSEKVLIAQEKMAXNXVYVFAKKDSKYAYXGECRSCLENSSRPXSXIWVSMLARGGQGAKKSAIGQRIVAXLPYIKQEVPIIIVFRALGFVSDRDILEHIIYDFEDPEMMEMVKPSLDEAFVIQEQNVALNFIGSRGAKPGVXKEKRIKYAKEVLQKEMLPHVGVSDFCEXKKAYFLGYMVHRLLLAALGRRELDDRDHYGNKRLDLAGPLLAFLFRGMFKNLLKEVRIYAQKFIDRGKDFNLELAIKXRIISDGLKYSLAXGNWGDQKKAHQARAGVSQVLNRLXFASXLSHLRRLNSPIGRDGKLAKPRQLHNXLWGMVCPAEXPEGHAVGLVKNLALMAYISVGSQPSPILEFLEEWSMENLEEISPAAIADAXKIFVNGCWVGIHKDPEQLMNXLRKLRRQMDIIVSEVSMIRDIREREIRIYXDAGRICRPLLIVEKQKLLLKKRHIDQLKEREYNNYSWQDLVASGVVEYIDXLEEEXVMLAMXPDDLQEKEVAYCSXYXHCEIHPSMILGVCASIIPFPDHNQSPRNXYQSAMGKQAMGVYIXNFHVRMDXLAHVLYYPQKPLVXXRSMEYLRFRELPAGINSIVAIASYXGYNQEDSVIMNRSAVDRGFFRSVFYRSYKEQESKKGFDQEEVFEKPXREXCQGMRHAIYDKLDDDGLIAPGVRVSGDDVIIGKXVXLPENEDELESXNRRYXKRDCSXFLRXSEXGIVDQVMVXLNQEGYKFCKIRVRSVRIPQIGDKFASRHGQKGXCGIQYRQEDMPFXCEGIXPDIIINPHAIPSRMXIGHLIECLQGKVSANKGEIGDAXPFNDAVNVQKISNLLSDYGYHLRGNEVLYNGFXGRKIXSQIFIGPXYYQRLKHMVDDKIHSRARGPIQILNRQPMEGRSRDGGLRFGEMERDCQIAHGAAQFLRERLFEASDPYQVHVCNLCGIMAIANXRXHXYECRGCRNKXQISLVRMPYACKLLFQELMSMSIAPRMMSV

SEQ ID NO: 20758 - protein, 1167 aa, Homo sapiens
  MOD_RES (11)..(11): Selenocysteine
  MOD_RES (90)..(90): Selenocysteine
  MOD_RES (112)..(112): Selenocysteine
  MOD_RES (122)..(122): Selenocysteine
  MOD_RES (124)..(124): Selenocysteine
  MOD_RES (135)..(135): Selenocysteine
  MOD_RES (140)..(140): Selenocysteine
  MOD_RES (152)..(152): Selenocysteine
  MOD_RES (160)..(160): Selenocysteine
  MOD_RES (195)..(195): Selenocysteine
  MOD_RES (197)..(197): Selenocysteine
  MOD_RES (211)..(211): Selenocysteine
  MOD_RES (225)..(225): Selenocysteine
  MOD_RES (227)..(227): Selenocysteine
  MOD_RES (252)..(252): Selenocysteine
  MOD_RES (324)..(324): Selenocysteine
  MOD_RES (352)..(352): Selenocysteine
  MOD_RES (430)..(430): Selenocysteine
  MOD_RES (443)..(443): Selenocysteine
  MOD_RES (467)..(467): Selenocysteine
  MOD_RES (471)..(471): Selenocysteine
  MOD_RES (497)..(497): Selenocysteine
  MOD_RES (507)..(507): Selenocysteine
  MOD_RES (558)..(558): Selenocysteine
  MOD_RES (579)..(579): Selenocysteine
  MOD_RES (609)..(609): Selenocysteine
  MOD_RES (660)..(660): Selenocysteine
  MOD_RES (665)..(665): Selenocysteine
  MOD_RES (671)..(671): Selenocysteine
  MOD_RES (685)..(685): Selenocysteine
  MOD_RES (687)..(687): Selenocysteine
  MOD_RES (716)..(716): Selenocysteine
  MOD_RES (731)..(731): Selenocysteine
  MOD_RES (739)..(739): Selenocysteine
  MOD_RES (753)..(754): Selenocysteine
  MOD_RES (779)..(779): Selenocysteine
  MOD_RES (826)..(826): Selenocysteine
  MOD_RES (829)..(829): Selenocysteine
  MOD_RES (863)..(863): Selenocysteine
  MOD_RES (865)..(865): Selenocysteine
  MOD_RES (876)..(876): Selenocysteine
  MOD_RES (881)..(881): Selenocysteine
  MOD_RES (887)..(887): Selenocysteine
  MOD_RES (891)..(891): Selenocysteine
  MOD_RES (894)..(894): Selenocysteine
  MOD_RES (903)..(903): Selenocysteine
  MOD_RES (937)..(937): Selenocysteine
  MOD_RES (950)..(950): Selenocysteine
  MOD_RES (955)..(955): Selenocysteine
  MOD_RES (970)..(970): Selenocysteine
  MOD_RES (993)..(993): Selenocysteine
  MOD_RES (1026)..(1026): Selenocysteine
  MOD_RES (1031)..(1031): Selenocysteine
  MOD_RES (1039)..(1039): Selenocysteine
  MOD_RES (1123)..(1123): Selenocysteine
  MOD_RES (1125)..(1125): Selenocysteine
  MOD_RES (1127)..(1127): Selenocysteine
  MOD_RES (1137)..(1137): Selenocysteine
MQYDEDDDEIXPDLWQEACWIVISSYFDEKGLVRQQLDSFDEFIQMSVQRIVEDAPPIDLQAEAQHASGEVEEPPRYLLKFEQIYLSKPXHWERDGAPSPMMPNEARLRNLXYSAPLYVDIXKXVIKEGEEQLQXQHQKXFIGKIPIMLRSXYCLLNGLXDRDLCELNECPLDPGGYFIINGSEKVLIAQEKMAXNXVYVFAKKDSKYAYXGECRSCLENSSRPXSXIWVSMLARGGQGAKKSAIGQRIVAXLPYIKQEVPIIIVFRALGFVSDRDILEHIIYDFEDPEMMEMVKPSLDEAFVIQEQNVALNFIGSRGAKPGVXKEKRIKYAKEVLQKEMLPHVGVSDFCEXKKAYFLGYMVHRLLLAALGRRELDDRDHYGNKRLDLAGPLLAFLFRGMFKNLLKEVRIYAQKFIDRGKDFNLELAIKXRIISDGLKYSLAXGNWGDQKKAHQARAGVSQVLNRLXFASXLSHLRRLNSPIGRDGKLAKPRQLHNXLWGMVCPAEXPEGHAVGLVKNLALMAYISVGSQPSPILEFLEEWSMENLEEISPAAIADAXKIFVNGCWVGIHKDPEQLMNXLRKLRRQMDIIVSEVSMIRDIREREIRIYXDAGRICRPLLIVEKQKLLLKKRHIDQLKEREYNNYSWQDLVASGVVEYIDXLEEEXVMLAMXPDDLQEKEVAYCSXYXHCEIHPSMILGVCASIIPFPDHNQSPRNXYQSAMGKQAMGVYIXNFHVRMDXLAHVLYYPQKPLVXXRSMEYLRFRELPAGINSIVAIASYXGYNQEDSVIMNRSAVDRGFFRSVFYRSYKEQESKKGFDQEEVFEKPXREXCQGMRHAIYDKLDDDGLIAPGVRVSGDDVIIGKXVXLPENEDELESXNRRYXKRDCSXFLRXSEXGIVDQVMVXLNQEGYKFCKIRVRSVRIPQIGDKFASRHGQKGXCGIQYRQEDMPFXCEGIXPDIIINPHAIPSRMXIGHLIECLQGKVSANKGEIGDAXPFNDAVNVQKISNLLSDYGYHLRGNEVLYNGFXGRKIXSQIFIGPXYYQRLKHMVDDKIHSRARGPIQILNRQPMEGRSRDGGLRFGEMERDCQIAHGAAQFLRERLFEASDPYQVHVCNLCGIMAIANXRXHXYECRGCRNKXQISLVRMPYACKLLFQELMSMSIAPRMMSV

SEQ ID NO: 20759 - protein, 76 aa, Homo sapiens
  MOD_RES (11)..(11): Selenocysteine
MQYDEDDDEIXPDLWQEACWIVISSYFDEKGLVRQQLDSFDEFIQMSVQRIVEDAPPIDLQAEAQHASGEVEEPVR

SEQ ID NO: 20760 - protein, 64 aa, Homo sapiens
  MOD_RES (18)..(18): Selenocysteine
MYDADEDMQYDEDDDEIXPDLWQEACWIVISSYFDEKGLVRQQLDSFDEFIQMSVQRIVEDAPP

SEQ ID NO: 20761 - protein, 1174 aa, Homo sapiens
  MOD_RES (18)..(18): Selenocysteine
  MOD_RES (97)..(97): Selenocysteine
  MOD_RES (119)..(119): Selenocysteine
  MOD_RES (129)..(129): Selenocysteine
  MOD_RES (131)..(131): Selenocysteine
  MOD_RES (142)..(142): Selenocysteine
  MOD_RES (147)..(147): Selenocysteine
  MOD_RES (159)..(159): Selenocysteine
  MOD_RES (167)..(167): Selenocysteine
  MOD_RES (202)..(202): Selenocysteine
  MOD_RES (204)..(204): Selenocysteine
  MOD_RES (218)..(218): Selenocysteine
  MOD_RES (232)..(232): Selenocysteine
  MOD_RES (234)..(234): Selenocysteine
  MOD_RES (259)..(259): Selenocysteine
  MOD_RES (331)..(331): Selenocysteine
  MOD_RES (359)..(359): Selenocysteine
  MOD_RES (437)..(437): Selenocysteine
  MOD_RES (450)..(450): Selenocysteine
  MOD_RES (474)..(474): Selenocysteine
  MOD_RES (478)..(478): Selenocysteine
  MOD_RES (504)..(504): Selenocysteine
  MOD_RES (514)..(514): Selenocysteine
  MOD_RES (565)..(565): Selenocysteine
  MOD_RES (586)..(586): Selenocysteine
  MOD_RES (616)..(616): Selenocysteine
  MOD_RES (667)..(667): Selenocysteine
  MOD_RES (672)..(672): Selenocysteine
  MOD_RES (678)..(678): Selenocysteine
  MOD_RES (692)..(692): Selenocysteine
  MOD_RES (694)..(694): Selenocysteine
  MOD_RES (723)..(723): Selenocysteine
  MOD_RES (738)..(738): Selenocysteine
  MOD_RES (746)..(746): Selenocysteine
  MOD_RES (760)..(761): Selenocysteine
  MOD_RES (786)..(786): Selenocysteine
  MOD_RES (833)..(833): Selenocysteine
  MOD_RES (836)..(836): Selenocysteine
  MOD_RES (870)..(870): Selenocysteine
  MOD_RES (872)..(872): Selenocysteine
  MOD_RES (883)..(883): Selenocysteine
  MOD_RES (888)..(888): Selenocysteine
  MOD_RES (894)..(894): Selenocysteine
  MOD_RES (898)..(898): Selenocysteine
  MOD_RES (901)..(901): Selenocysteine
  MOD_RES (910)..(910): Selenocysteine
  MOD_RES (944)..(944): Selenocysteine
  MOD_RES (957)..(957): Selenocysteine
  MOD_RES (962)..(962): Selenocysteine
  MOD_RES (977)..(977): Selenocysteine
  MOD_RES (1000)..(1000): Selenocysteine
  MOD_RES (1033)..(1033): Selenocysteine
  MOD_RES (1038)..(1038): Selenocysteine
  MOD_RES (1046)..(1046): Selenocysteine
  MOD_RES (1130)..(1130): Selenocysteine
  MOD_RES (1132)..(1132): Selenocysteine
  MOD_RES (1134)..(1134): Selenocysteine
  MOD_RES (1144)..(1144): Selenocysteine
MYDADEDMQYDEDDDEIXPDLWQEACWIVISSYFDEKGLVRQQLDSFDEFIQMSVQRIVEDAPPIDLQAEAQHASGEVEEPPRYLLKFEQIYLSKPXHWERDGAPSPMMPNEARLRNLXYSAPLYVDIXKXVIKEGEEQLQXQHQKXFIGKIPIMLRSXYCLLNGLXDRDLCELNECPLDPGGYFIINGSEKVLIAQEKMAXNXVYVFAKKDSKYAYXGECRSCLENSSRPXSXIWVSMLARGGQGAKKSAIGQRIVAXLPYIKQEVPIIIVFRALGFVSDRDILEHIIYDFEDPEMMEMVKPSLDEAFVIQEQNVALNFIGSRGAKPGVXKEKRIKYAKEVLQKEMLPHVGVSDFCEXKKAYFLGYMVHRLLLAALGRRELDDRDHYGNKRLDLAGPLLAFLFRGMFKNLLKEVRIYAQKFIDRGKDFNLELAIKXRIISDGLKYSLAXGNWGDQKKAHQARAGVSQVLNRLXFASXLSHLRRLNSPIGRDGKLAKPRQLHNXLWGMVCPAEXPEGHAVGLVKNLALMAYISVGSQPSPILEFLEEWSMENLEEISPAAIADAXKIFVNGCWVGIHKDPEQLMNXLRKLRRQMDIIVSEVSMIRDIREREIRIYXDAGRICRPLLIVEKQKLLLKKRHIDQLKEREYNNYSWQDLVASGVVEYIDXLEEEXVMLAMXPDDLQEKEVAYCSXYXHCEIHPSMILGVCASIIPFPDHNQSPRNXYQSAMGKQAMGVYIXNFHVRMDXLAHVLYYPQKPLVXXRSMEYLRFRELPAGINSIVAIASYXGYNQEDSVIMNRSAVDRGFFRSVFYRSYKEQESKKGFDQEEVFEKPXREXCQGMRHAIYDKLDDDGLIAPGVRVSGDDVIIGKXVXLPENEDELESXNRRYXKRDCSXFLRXSEXGIVDQVMVXLNQEGYKFCKIRVRSVRIPQIGDKFASRHGQKGXCGIQYRQEDMPFXCEGIXPDIIINPHAIPSRMXIGHLIECLQGKVSANKGEIGDAXPFNDAVNVQKISNLLSDYGYHLRGNEVLYNGFXGRKIXSQIFIGPXYYQRLKHMVDDKIHSRARGPIQILNRQPMEGRSRDGGLRFGEMERDCQIAHGAAQFLRERLFEASDPYQVHVCNLCGIMAIANXRXHXYECRGCRNKXQISLVRMPYACKLLFQELMSMSIAPRMMSV

SEQ ID NO: 20762 - protein, 275 aa, Homo sapiens
  MOD_RES (8)..(8): Selenocysteine
  MOD_RES (12)..(12): Selenocysteine
  MOD_RES (15)..(15): Selenocysteine
  MOD_RES (26)..(26): Selenocysteine
  MOD_RES (89)..(89): Selenocysteine
  MOD_RES (102)..(102): Selenocysteine
  MOD_RES (112)..(112): Selenocysteine
  MOD_RES (116)..(116): Selenocysteine
  MOD_RES (131)..(131): Selenocysteine
  MOD_RES (179)..(179): Selenocysteine
  MOD_RES (195)..(195): Selenocysteine
  MOD_RES (243)..(243): Selenocysteine
  MOD_RES (261)..(261): Selenocysteine
  MOD_RES (273)..(273): Selenocysteine
MPYANQPXVRIXELXDENVKFIIENXDLAVANSIRRVFIAEVPIIAIDWVQIDANSSVLHDEFIAHRLGLIPLISDDIVDKLQYSRDCXCEEFCPECSVEFXLDVRCNEDQXRHVXSRDLISNSPRVIPVXSRNRDNDPNDYVEQDDILIVKLRKGQELRLRAYAKKGFGKEHAKWNPXAGVAFEYDPDNALRHXVYPKPEEWPKSEYSELDEDESQAPYDPNGKPERFYYNVESCGSLRPEXIVLSALSGLKKKLSDLQXQLSHEIQSDVLXIN

SEQ ID NO: 20763 - protein, 46 aa, Homo sapiens
  MOD_RES (8)..(8): Selenocysteine
  MOD_RES (12)..(12): Selenocysteine
  MOD_RES (15)..(15): Selenocysteine
  MOD_RES (26)..(26): Selenocysteine
MPYANQPXVRIXELXDENVKFIIENXDLAVANSIRRVFIAEVPIIG

SEQ ID NO: 20764 - protein, 110 aa, Homo sapiens
  MOD_RES (28)..(28): Selenocysteine
  MOD_RES (31)..(31): Selenocysteine
  MOD_RES (64)..(64): Selenocysteine
  MOD_RES (68)..(68): Selenocysteine
  MOD_RES (79)..(79): Selenocysteine
  MOD_RES (104)..(104): Selenocysteine
MAAGGSDPRAGDVEEDASQLIFPKEFEXAEXLLNSEVHMLLEHRKQQNESAEDEQELSEVFMKXLNYXARFSRFKNREXIASVRSLEGRFEDEELQQILDDIQXKRSFQY

SEQ ID NO: 20765 - protein, 142 aa, Homo sapiens
  MOD_RES (28)..(28): Selenocysteine
  MOD_RES (31)..(31): Selenocysteine
  MOD_RES (64)..(64): Selenocysteine
  MOD_RES (68)..(68): Selenocysteine
  MOD_RES (79)..(79): Selenocysteine
  MOD_RES (107)..(107): Selenocysteine
  MOD_RES (136)..(136): Selenocysteine
MAAGGSDPRAGDVEEDASQLIFPKEFEXAEXLLNSEVHMLLEHRKQQNESAEDEQELSEVFMKXLNYXARFSRFKNREXIASVRSLLLQKKLHKFELACLANLCPEXAEESKALIPSLEGRFEDEELQQILDDIQXKRSFQY

SEQ ID NO: 20766 - protein, 104 aa, Homo sapiens
  MOD_RES (26)..(26): Selenocysteine
  MOD_RES (30)..(30): Selenocysteine
  MOD_RES (41)..(41): Selenocysteine
  MOD_RES (69)..(69): Selenocysteine
  MOD_RES (98)..(98): Selenocysteine
MLLEHRKQQNESAEDEQELSEVFMKXLNYXARFSRFKNREXIASVRSLLLQKKLHKFELACLANLCPEXAEESKALIPSLEGRFEDEELQQILDDIQXKRSFQY

SEQ ID NO: 20767 - protein, 184 aa, Homo sapiens
  MOD_RES (7)..(7): Selenocysteine
  MOD_RES (16)..(16): Selenocysteine
  MOD_RES (29)..(29): Selenocysteine
  MOD_RES (36)..(36): Selenocysteine
  MOD_RES (56)..(56): Selenocysteine
  MOD_RES (59)..(59): Selenocysteine
  MOD_RES (69)..(69): Selenocysteine
  MOD_RES (86)..(86): Selenocysteine
  MOD_RES (100)..(100): Selenocysteine
  MOD_RES (111)..(111): Selenocysteine
  MOD_RES (125)..(125): Selenocysteine
  MOD_RES (130)..(130): Selenocysteine
  MOD_RES (172)..(172): Selenocysteine
  MOD_RES (178)..(178): Selenocysteine
MDDEEEXYRLWKIRKXIMQLCHDRGYLVXQDELDQXLEEFKAQSGDKPSEGRPRRXDLXVLVAHNDDPXDQMFVFFPEEPKVGIKXIKVYCQRMQEENIXRALIVVQQGMXPSAKQLVPEHVVMXKEEVXELLARYKLRENQLPRIQAGDPVARYFGIKRGQVVKIIRPSEXAGRYIXYRLVHP

SEQ ID NO: 20768 - protein, 204 aa, Homo sapiens
  MOD_RES (7)..(7): Selenocysteine
  MOD_RES (16)..(16): Selenocysteine
  MOD_RES (29)..(29): Selenocysteine
  MOD_RES (36)..(36): Selenocysteine
  MOD_RES (56)..(56): Selenocysteine
  MOD_RES (59)..(59): Selenocysteine
  MOD_RES (69)..(69): Selenocysteine
  MOD_RES (86)..(86): Selenocysteine
  MOD_RES (100)..(100): Selenocysteine
  MOD_RES (111)..(111): Selenocysteine
  MOD_RES (140)..(140): Selenocysteine
  MOD_RES (152)..(152): Selenocysteine
  MOD_RES (157)..(157): Selenocysteine
MDDEEEXYRLWKIRKXIMQLCHDRGYLVXQDELDQXLEEFKAQSGDKPSEGRPRRXDLXVLVAHNDDPXDQMFVFFPEEPKVGIKXIKVYCQRMQEENIXRALIVVQQGMXPSAKQSLVDMAPKYILEQFLQQELLINIXEHELVPEHVVMXKEEVXELLARYKLRENQLPRIQAGDPVARYFGIKRGQPLLSVSAGGEDHPAQ

SEQ ID NO: 20769 - protein, 210 aa, Homo sapiens
  MOD_RES (7)..(7): Selenocysteine
  MOD_RES (16)..(16): Selenocysteine
  MOD_RES (29)..(29): Selenocysteine
  MOD_RES (36)..(36): Selenocysteine
  MOD_RES (56)..(56): Selenocysteine
  MOD_RES (59)..(59): Selenocysteine
  MOD_RES (69)..(69): Selenocysteine
  MOD_RES (86)..(86): Selenocysteine
  MOD_RES (100)..(100): Selenocysteine
  MOD_RES (111)..(111): Selenocysteine
  MOD_RES (140)..(140): Selenocysteine
  MOD_RES (152)..(152): Selenocysteine
  MOD_RES (157)..(157): Selenocysteine
  MOD_RES (199)..(199): Selenocysteine
  MOD_RES (205)..(205): Selenocysteine
MDDEEEXYRLWKIRKXIMQLCHDRGYLVXQDELDQXLEEFKAQSGDKPSEGRPRRXDLXVLVAHNDDPXDQMFVFFPEEPKVGIKXIKVYCQRMQEENIXRALIVVQQGMXPSAKQSLVDMAPKYILEQFLQQELLINIXEHELVPEHVVMXKEEVXELLARYKLRENQLPRIQAGDPVARYFGIKRGQVVKIIRPSEXAGRYIXYRLVQ

SEQ ID NO: 20770 - protein, 51 aa, Homo sapiens
  MOD_RES (7)..(7): Selenocysteine
  MOD_RES (16)..(16): Selenocysteine
  MOD_RES (32)..(32): Selenocysteine
  MOD_RES (40)..(40): Selenocysteine
MDDEEEXYRLWKIRKXIMQRSPRWASRPSRCXASACRRRXSHGLSSWCSRA

SEQ ID NO: 20771 - protein, 68 aa, Homo sapiens
  MOD_RES (7)..(7): Selenocysteine
  MOD_RES (16)..(16): Selenocysteine
  MOD_RES (32)..(32): Selenocysteine
  MOD_RES (43)..(43): Selenocysteine
MDDEEEXYRLWKIRKXIMQVSSGSRGSSGEAXRAPAEEPVASXHPHSPGAQHLSLCPVWEENSPPLPC

SEQ ID NO: 20772 - protein, 83 aa, Homo sapiens
  MOD_RES (11)..(11): Selenocysteine
  MOD_RES (20)..(20): Selenocysteine
  MOD_RES (34)..(34): Selenocysteine
  MOD_RES (45)..(45): Selenocysteine
  MOD_RES (74)..(74): Selenocysteine
  MOD_RES (81)..(81): Selenocysteine
PASASQSARIXEEPKVGIKXIKVYCQRMQEENIXRALIVVQQGMXPSAKQSLVDMAPKYILEQFLQQELLINIXEHESLSXSS

SEQ ID NO: 20773 - protein, 134 aa, Homo sapiens
  MOD_RES (1)..(1): Any amino acid
  MOD_RES (10)..(10): Selenocysteine
  MOD_RES (24)..(24): Selenocysteine
  MOD_RES (35)..(35): Selenocysteine
  MOD_RES (64)..(64): Selenocysteine
  MOD_RES (76)..(76): Selenocysteine
  MOD_RES (81)..(81): Selenocysteine
  MOD_RES (123)..(123): Selenocysteine
  MOD_RES (129)..(129): Selenocysteine
XEEPKVGIKXIKVYCQRMQEENIXRALIVVQQGMXPSAKQSLVDMAPKYILEQFLQQELLINIXEHELVPEHVVMXKEEVXELLARYKLRENQLPRIQAGDPVARYFGIKRGQVVKIIRPSEXAGRYIXYRLVQ

SEQ ID NO: 20774 - protein, 98 aa, Homo sapiens
  MOD_RES (53)..(54): Selenocysteine
  MOD_RES (58)..(58): Selenocysteine
  MOD_RES (68)..(68): Selenocysteine
  MOD_RES (87)..(87): Selenocysteine
MSDNEDNFDGDDFDDVEEDEGLDDLENAEEEGQENVEILPSGERPQANQKRIXXPYMXKYERARVLGXRALQIAMCAPVMVELEGEXDPLLIAMKELK

SEQ ID NO: 20775 - protein, 127 aa, Homo sapiens
  MOD_RES (53)..(54): Selenocysteine
  MOD_RES (58)..(58): Selenocysteine
  MOD_RES (68)..(68): Selenocysteine
  MOD_RES (87)..(87): Selenocysteine
  MOD_RES (126)..(126): Selenocysteine
MSDNEDNFDGDDFDDVEEDEGLDDLENAEEEGQENVEILPSGERPQANQKRIXXPYMXKYERARVLGXRALQIAMCAPVMVELEGEXDPLLIAMKELKARKIPIIIRRYLPDGSYEDWGVDELIIXD

SEQ ID NO: 20776 - protein, 126 aa, Homo sapiens
  MOD_RES (53)..(54): Selenocysteine
  MOD_RES (58)..(58): Selenocysteine
  MOD_RES (68)..(68): Selenocysteine
  MOD_RES (87)..(87): Selenocysteine
  MOD_RES (106)..(106): Selenocysteine
MSDNEDNFDGDDFDDVEEDEGLDDLENAEEEGQENVEILPSGERPQANQKRIXXPYMXKYERARVLGXRALQIAMCAPVMVELEGEXDPLLIAMKELKLLWGLEYXVLRPSYALAHSLGSFSISSR

SEQ ID NO: 20777 - protein, 158 aa, Homo sapiens
  MOD_RES (53)..(54): Selenocysteine
  MOD_RES (58)..(58): Selenocysteine
  MOD_RES (68)..(68): Selenocysteine
  MOD_RES (87)..(87): Selenocysteine
  MOD_RES (117)..(117): Selenocysteine
  MOD_RES (135)..(135): Selenocysteine
MSDNEDNFDGDDFDDVEEDEGLDDLENAEEEGQENVEILPSGERPQANQKRIXXPYMXKYERARVLGXRALQIAMCAPVMVELEGEXDPLLIAMKELNARSASEPPGEEPPWMDRGXRDEHLPSCPGCPAVASNXRCCPPAACLPGISLSRRRRLREE

SEQ ID NO: 20778 - protein, 111 aa, Homo sapiens
  MOD_RES (53)..(54): Selenocysteine
  MOD_RES (58)..(58): Selenocysteine
  MOD_RES (68)..(68): Selenocysteine
  MOD_RES (87)..(87): Selenocysteine
MSDNEDNFDGDDFDDVEEDEGLDDLENAEEEGQENVEILPSGERPQANQKRIXXPYMXKYERARVLGXRALQIAMCAPVMVELEGEXDPLLIAMKELNYFQKAFEEAPVQG

SEQ ID NO: 20779 - protein, 76 aa, Homo sapiens
  MOD_RES (39)..(39): Selenocysteine
  MOD_RES (68)..(68): Selenocysteine
  MOD_RES (76)..(76): Selenocysteine
MSDNEDNFDGDDFDDVEEDEGLDDLENAEEVSIQPQAPXSAAQAAKSSDRKARRMSRSSPLGSDRRPXRSESPHHX

SEQ ID NO: 20780 - protein, 74 aa, Homo sapiens
  MOD_RES (39)..(39): Selenocysteine
  MOD_RES (63)..(63): Selenocysteine
MSDNEDNFDGDDFDDVEEDEGLDDLENAEEVSIQPQAPXSAAQAAKSSDRMCAPVMVELEGEXDPLLIAMKELK

SEQ ID NO: 20781 - protein, 122 aa, Homo sapiens
  MOD_RES (48)..(49): Selenocysteine
  MOD_RES (53)..(53): Selenocysteine
  MOD_RES (63)..(63): Selenocysteine
  MOD_RES (82)..(82): Selenocysteine
  MOD_RES (121)..(121): Selenocysteine
MSFDGDDFDDVEEDEGLDDLENAEEEGQENVEILPSGERPQANQKRIXXPYMXKYERARVLGXRALQIAMCAPVMVELEGEXDPLLIAMKELKARKIPIIIRRYLPDGSYEDWGVDELIIXD

SEQ ID NO: 20782 - protein, 112 aa, Homo sapiens
  MOD_RES (44)..(45): Selenocysteine
  MOD_RES (49)..(49): Selenocysteine
  MOD_RES (59)..(59): Selenocysteine
  MOD_RES (78)..(78): Selenocysteine
MVSISCLVIRPPRPPKVLGLQEGQENVEILPSGERPQANQKRIXXPYMXKYERARVLGXRALQIAMCAPVMVELEGEXDPLLIAMKELKARKIPIIIRRYLPDGSYEDWGVD

SEQ ID NO: 20783 - protein, 93 aa, Homo sapiens
  MOD_RES (1)..(1): Any amino acid
  MOD_RES (2)..(2): Selenocysteine
  MOD_RES (7)..(7): Selenocysteine
  MOD_RES (22)..(22): Selenocysteine
  MOD_RES (54)..(54): Selenocysteine
  MOD_RES (59)..(59): Selenocysteine
  MOD_RES (66)..(66): Selenocysteine
  MOD_RES (88)..(88): Selenocysteine
XXEGRGXSICRRVPAALQSPPXPAAARPLPACLASLSPGLGPSLLPPVFYMGWXQERSXDALKSMXLNLEVNRRMCSSEGPGIFPSCXWVSVC

SEQ ID NO: 20784 - protein, 145 aa, Homo sapiens
  MOD_RES (1)..(1): Any amino acid
  MOD_RES (7)..(7): Selenocysteine
  MOD_RES (25)..(25): Selenocysteine
  MOD_RES (44)..(44): Selenocysteine
  MOD_RES (99)..(99): Selenocysteine
  MOD_RES (124)..(124): Selenocysteine
XWMDRGXRDEHLPSCPGCPAVASNXRCCPPAACLPGISLSRAGXVSSPSCLLHGMDSGALNRCSEINDSESRSQPENVLLRGPWNLPLVHLGFSLLNKXDSAACSSEKVLVEDSPQVPLPGSPXAPEGWPSDAWVAGLLDPSMDK

SEQ ID NO: 20785 - protein, 60 aa, Homo sapiens
  MOD_RES (21)..(21): Selenocysteine
  MOD_RES (28)..(28): Selenocysteine
  MOD_RES (33)..(33): Selenocysteine
  MOD_RES (35)..(35): Selenocysteine
  MOD_RES (40)..(40): Selenocysteine
ISLEHEILLHPRYFGPNLLNXVKQKLFXEVEGXCXGKIKXVWGRPENLHFKKMILRHPED

SEQ ID NO: 20786 - protein, 41 aa, Homo sapiens
  MOD_RES (25)..(25): Selenocysteine
  MOD_RES (32)..(32): Selenocysteine
  MOD_RES (37)..(37): Selenocysteine
  MOD_RES (39)..(39): Selenocysteine
MFYHISLEHEILLHPRYFGPNLLNXVKQKLFXEVEGXCXGK

SEQ ID NO: 20787 - protein, 64 aa, Homo sapiens
  MOD_RES (25)..(25): Selenocysteine
  MOD_RES (32)..(32): Selenocysteine
  MOD_RES (37)..(37): Selenocysteine
  MOD_RES (39)..(39): Selenocysteine
  MOD_RES (44)..(44): Selenocysteine
MFYHISLEHEILLHPRYFGPNLLNXVKQKLFXEVEGXCXGKIKXVWGRPENLHFKKMILRHPED

SEQ ID NO: 20788 - protein, 172 aa, Homo sapiens
  MOD_RES (25)..(25): Selenocysteine
  MOD_RES (32)..(32): Selenocysteine
  MOD_RES (37)..(37): Selenocysteine
  MOD_RES (39)..(39): Selenocysteine
  MOD_RES (49)..(50): Selenocysteine
  MOD_RES (90)..(90): Selenocysteine
  MOD_RES (99)..(99): Selenocysteine
  MOD_RES (130)..(130): Selenocysteine
  MOD_RES (150)..(150): Selenocysteine
MFYHISLEHEILLHPRYFGPNLLNXVKQKLFXEVEGXCXGKYGFVIAVXXIDNIGAGVIQPGRGFVLYPVKYKAIVFRPFKGEVVDAVVXQVNKVGLFXEIGPMSCFISRHSIPSEMEFDPNSNPPCYKXMDEDIVIQQDDEIRLKIVGXRVDKNDIFAIGSLMDDYLGLVS

SEQ ID NO: 20789 - protein, 13 aa, Homo sapiens
MSCFISRHSIPSE

SEQ ID NO: 20790 - protein, 12 aa, Homo sapiens
MAGILFEDIFDV

SEQ ID NO: 20791 - protein, 175 aa, Homo sapiens
  MOD_RES (63)..(63): Selenocysteine
  MOD_RES (69)..(69): Selenocysteine
  MOD_RES (78)..(78): Selenocysteine
  MOD_RES (104)..(104): Selenocysteine
  MOD_RES (106)..(106): Selenocysteine
  MOD_RES (110)..(110): Selenocysteine
  MOD_RES (126)..(126): Selenocysteine
MAGILFEDIFDVKDIDPEGKKFDRVSRLHCESESFKMDLILDVNIQIYPVDLGDKFRLVIASXLYEDGXLDDGEYNPXDDRPSRADQFEYVMYGKVYRIEGDEXSXEAAXRLLRLRAAEWQCSRIXGWGLLFQLCVRVLWGPAHEAAGGCQQPAWIRGGLQSLSPDEEASLLNLA

SEQ ID NO: 20792 - protein, 149 aa, Homo sapiens
  MOD_RES (63)..(63): Selenocysteine
  MOD_RES (69)..(69): Selenocysteine
  MOD_RES (78)..(78): Selenocysteine
  MOD_RES (104)..(104): Selenocysteine
  MOD_RES (106)..(106): Selenocysteine
  MOD_RES (110)..(110): Selenocysteine
MAGILFEDIFDVKDIDPEGKKFDRVSRLHCESESFKMDLILDVNIQIYPVDLGDKFRLVIASXLYEDGXLDDGEYNPXDDRPSRADQFEYVMYGKVYRIEGDEXSXEAAXRLSAYVSYGGLLMRLQGDANNLHGFEVDSRVYLLMKKLA

SEQ ID NO: 20793 - protein, 150 aa, Homo sapiens
  MOD_RES (63)..(63): Selenocysteine
  MOD_RES (69)..(69): Selenocysteine
  MOD_RES (78)..(78): Selenocysteine
  MOD_RES (104)..(104): Selenocysteine
  MOD_RES (106)..(106): Selenocysteine
  MOD_RES (110)..(110): Selenocysteine
MAGILFEDIFDVKDIDPEGKKFDRVSRLHCESESFKMDLILDVNIQIYPVDLGDKFRLVIASXLYEDGXLDDGEYNPXDDRPSRADQFEYVMYGKVYRIEGDEXSXEAAXRLSAYVSYGGLLMRLQGDANNLHGFEVDSRVYLLMKKLAF

SEQ ID NO: 20794 - protein, 122 aa, Homo sapiens
  MOD_RES (63)..(63): Selenocysteine
  MOD_RES (69)..(69): Selenocysteine
  MOD_RES (78)..(78): Selenocysteine
MAGILFEDIFDVKDIDPEGKKFDRVSRLHCESESFKMDLILDVNIQIYPVDLGDKFRLVIASXLYEDGXLDDGEYNPXDDRPSSSAYVSYGGLLMRLQGDANNLHGFEVDSRVYLLMKKLAF

SEQ ID NO: 20795 - protein, 114 aa, Homo sapiens
  MOD_RES (27)..(27): Selenocysteine
  MOD_RES (33)..(33): Selenocysteine
  MOD_RES (42)..(42): Selenocysteine
  MOD_RES (68)..(68): Selenocysteine
  MOD_RES (70)..(70): Selenocysteine
  MOD_RES (74)..(74): Selenocysteine
MDLILDVNIQIYPVDLGDKFRLVIASXLYEDGXLDDGEYNPXDDRPSRADQFEYVMYGKVYRIEGDEXSXEAAXRLSAYVSYGGLLMRLQGDANNLHGFEVDSRVYLLMKKLAF

SEQ ID NO: 20796 - protein, 86 aa, Homo sapiens
  MOD_RES (27)..(27): Selenocysteine
  MOD_RES (33)..(33): Selenocysteine
  MOD_RES (42)..(42): Selenocysteine
MDLILDVNIQIYPVDLGDKFRLVIASXLYEDGXLDDGEYNPXDDRPSSSAYVSYGGLLMRLQGDANNLHGFEVDSRVYLLMKKLAF

SEQ ID NO: 20797 - protein, 46 aa, Homo sapiens
  MOD_RES (6)..(6): Selenocysteine
  MOD_RES (23)..(23): Selenocysteine
  MOD_RES (26)..(26): Selenocysteine
  MOD_RES (31)..(32): Selenocysteine
  MOD_RES (38)..(38): Selenocysteine
  MOD_RES (42)..(42): Selenocysteine
  MOD_RES (45)..(45): Selenocysteine
MEPDGXYEPGFVGIRFCQECAGXVIXSRRPXXAASMSXRSRXKWXN

SEQ ID NO: 20798 - protein, 88 aa, Homo sapiens
  MOD_RES (6)..(6): Selenocysteine
  MOD_RES (59)..(59): Selenocysteine
  MOD_RES (66)..(66): Selenocysteine
  MOD_RES (77)..(77): Selenocysteine
  MOD_RES (81)..(81): Selenocysteine
MEPDGXYEPGFVGIRFCQECNNMLYPKEDKENRILLYACRNCDYQQEADNSCIYVNKIXHEVDELXQIIADVSQDPXLPRXEDHPCQK

SEQ ID NO: 20799 - protein, 125 aa, Homo sapiens
  MOD_RES (6)..(6): Selenocysteine
  MOD_RES (59)..(59): Selenocysteine
  MOD_RES (66)..(66): Selenocysteine
  MOD_RES (77)..(77): Selenocysteine
  MOD_RES (81)..(81): Selenocysteine
  MOD_RES (115)..(115): Selenocysteine
  MOD_RES (124)..(124): Selenocysteine
MEPDGXYEPGFVGIRFCQECNNMLYPKEDKENRILLYACRNCDYQQEADNSCIYVNKIXHEVDELXQIIADVSQDPXLPRXEDHPCQKCGHKEAVFFQSHSARAEDAMRLYYVCXAPHCGHRWXE

SEQ ID NO: 20800 - protein, 57 aa, Homo sapiens
  MOD_RES (6)..(6): Selenocysteine
  MOD_RES (14)..(15): Selenocysteine
  MOD_RES (18)..(18): Selenocysteine
  MOD_RES (22)..(22): Selenocysteine
  MOD_RES (25)..(25): Selenocysteine
  MOD_RES (30)..(30): Selenocysteine
  MOD_RES (34)..(34): Selenocysteine
  MOD_RES (37)..(37): Selenocysteine
  MOD_RES (42)..(43): Selenocysteine
  MOD_RES (49)..(49): Selenocysteine
  MOD_RES (53)..(53): Selenocysteine
  MOD_RES (56)..(56): Selenocysteine
MEPDGXYEPGFVVXXCCXPRKXRRXAFCSXRAGXVIXSRRPXXAASMSXRSRXKWXN

SEQ ID NO: 20801 - protein, 158 aa, Homo sapiens
  MOD_RES (19)..(19): Selenocysteine
  MOD_RES (24)..(24): Selenocysteine
  MOD_RES (33)..(33): Selenocysteine
  MOD_RES (40)..(40): Selenocysteine
  MOD_RES (76)..(77): Selenocysteine
  MOD_RES (87)..(87): Selenocysteine
  MOD_RES (91)..(91): Selenocysteine
  MOD_RES (119)..(119): Selenocysteine
  MOD_RES (128)..(128): Selenocysteine
MNAPPAFESFLLFEGEKIXINKDXKVPNACLFXINKEDHXLGNIIKSQLLKDPQVLFAGYKVPHPLEHKIIIRVQXXPDYSPQEAFXNAIXDLISELSLLEERFRVRAGPGGADGVGWXLARVPRPGXALACFFGGPGGEAAVMEEQGLPPQAPGHVD

SEQ ID NO: 20802 - protein, 117 aa, Homo sapiens
  MOD_RES (20)..(20): Selenocysteine
  MOD_RES (25)..(25): Selenocysteine
  MOD_RES (34)..(34): Selenocysteine
  MOD_RES (41)..(41): Selenocysteine
  MOD_RES (77)..(78): Selenocysteine
  MOD_RES (88)..(88): Selenocysteine
  MOD_RES (92)..(92): Selenocysteine
MNAPPAFESFLLFEGEKKIXINKDXKVPNACLFXINKEDHXLGNIIKSQLLKDPQVLFAGYKVPHPLEHKIIIRVQXXPDYSPQEAFXNAIXDLISELSLLEERFRVAIKDKQEGIE

SEQ ID NO: 20803 - protein, 67 aa, Homo sapiens
  MOD_RES (3)..(3): Selenocysteine
  MOD_RES (24)..(24): Selenocysteine
  MOD_RES (49)..(49): Selenocysteine
  MOD_RES (56)..(56): Selenocysteine
MDXQKDVQPPKQQPMIYICGECHXENEIKSRDPIRCRECGYRIMYKKRXKRCILLXMLSKYELGGNE

SEQ ID NO: 20804 - protein, 58 aa, Homo sapiens
  MOD_RES (3)..(3): Selenocysteine
  MOD_RES (24)..(24): Selenocysteine
  MOD_RES (49)..(49): Selenocysteine
MDXQKDVQPPKQQPMIYICGECHXENEIKSRDPIRCRECGYRIMYKKRXKRLVVFDAR

SEQ ID NO: 20805 - protein, 67 aa, Homo sapiens
  MOD_RES (9)..(9): Selenocysteine
  MOD_RES (30)..(30): Selenocysteine
MIIPVRCFXCGKIVGNKWEAYLGLLQAEYXEGDALDALGLKRYCCRRMLLAHVDLIEKLLNYAPLEK

SEQ ID NO: 20806 - protein, 159 aa, Homo sapiens
  MOD_RES (3)..(3): Selenocysteine
  MOD_RES (72)..(72): Selenocysteine
  MOD_RES (102)..(102): Selenocysteine
  MOD_RES (115)..(115): Selenocysteine
  MOD_RES (148)..(148): Selenocysteine
  MOD_RES (155)..(155): Selenocysteine
MAXPARAPESPPSADPALVAGPAEEAECPPPRQPQPAQNVLAAPRLRAPSSRGLGAAEFGGAAGNVEAPGEXFAQRVSWGPAESPPGSFSSSSLGAPLPSRXLFPSLEGDFDSVXFASVLRASGRRACCGRAVPLPGQAQNSFANCPXKVKRSLXLLPN

SEQ ID NO: 20807 - protein, 148 aa, Homo sapiens
  MOD_RES (3)..(3): Selenocysteine
  MOD_RES (72)..(72): Selenocysteine
  MOD_RES (102)..(102): Selenocysteine
  MOD_RES (115)..(115): Selenocysteine
MAXPARAPESPPSADPALVAGPAEEAECPPPRQPQPAQNVLAAPRLRAPSSRGLGAAEFGGAAGNVEAPGEXFAQRVSWGPAESPPGSFSSSSLGAPLPSRXLFPSLEGDFDSVXFASVLRASGRRACCGRAVPLPGQKIHLQIARQR

SEQ ID NO: 20808 - protein, 363 aa, Homo sapiens
  MOD_RES (96)..(96): Selenocysteine
  MOD_RES (108)..(108): Selenocysteine
  MOD_RES (126)..(126): Selenocysteine
  MOD_RES (136)..(136): Selenocysteine
  MOD_RES (143)..(143): Selenocysteine
  MOD_RES (149)..(149): Selenocysteine
  MOD_RES (184)..(184): Selenocysteine
  MOD_RES (200)..(200): Selenocysteine
  MOD_RES (215)..(215): Selenocysteine
  MOD_RES (219)..(219): Selenocysteine
  MOD_RES (225)..(225): Selenocysteine
  MOD_RES (251)..(251): Selenocysteine
  MOD_RES (289)..(289): Selenocysteine
  MOD_RES (301)..(301): Selenocysteine
  MOD_RES (346)..(346): Selenocysteine
  MOD_RES (361)..(361): Selenocysteine
MCSLPRGFEPQAPEDLAQRSLVELREMLKRQERLLRNEKFICKLPDKGKKIFDSFAKLKAAIAECEEVRRKSELFNPVSLDCKLRQKAIAEVDVGXDKAQNSDPILDXSSLVPGCSSVDNIKSSQXSQNQGLGRPXLEGDEEXSEVEYXVNKGPASSNRDRVPPSSEASEHHPRHRVSSQAEDXSSSFDNLFIDRLQRIXIADQGEQQSEENASXKNLXGLSSGXEKKPHYMEVLEMRAKNPVPQLRKFKXNVLPFRQNDSSSHCQKSGSPISSEERRRRDKQHLDDIXAARLLPLHHMPXQLLSIEESLALQKQQKQNYEERPFYSPQYRSSMNLLSLAAAAKDXRGSKSGKMGSLALLXKL

SEQ ID NO: 20809 - protein, 368 aa, Homo sapiens
  MOD_RES (96)..(96): Selenocysteine
  MOD_RES (108)..(108): Selenocysteine
  MOD_RES (126)..(126): Selenocysteine
  MOD_RES (136)..(136): Selenocysteine
  MOD_RES (143)..(143): Selenocysteine
  MOD_RES (149)..(149): Selenocysteine
  MOD_RES (184)..(184): Selenocysteine
  MOD_RES (200)..(200): Selenocysteine
  MOD_RES (215)..(215): Selenocysteine
  MOD_RES (219)..(219): Selenocysteine
  MOD_RES (225)..(225): Selenocysteine
  MOD_RES (251)..(251): Selenocysteine
  MOD_RES (289)..(289): Selenocysteine
  MOD_RES (301)..(301): Selenocysteine
MCSLPRGFEPQAPEDLAQRSLVELREMLKRQERLLRNEKFICKLPDKGKKIFDSFAKLKAAIAECEEVRRKSELFNPVSLDCKLRQKAIAEVDVGXDKAQNSDPILDXSSLVPGCSSVDNIKSSQXSQNQGLGRPXLEGDEEXSEVEYXVNKGPASSNRDRVPPSSEASEHHPRHRVSSQAEDXSSSFDNLFIDRLQRIXIADQGEQQSEENASXKNLXGLSSGXEKKPHYMEVLEMRAKNPVPQLRKFKXNVLPFRQNDSSSHCQKSGSPISSEERRRRDKQHLDDIXAARLLPLHHMPXQLLSIEESLALQKQQKQNYEEMQAKLAAQKLAERLNIKMRSYNPEGESSGRYREVRDEDDDWSSDEF

SEQ ID NO: 20810 - protein, 211 aa, Homo sapiens
  MOD_RES (43)..(43): Selenocysteine
  MOD_RES (58)..(58): Selenocysteine
  MOD_RES (62)..(62): Selenocysteine
  MOD_RES (68)..(68): Selenocysteine
  MOD_RES (94)..(94): Selenocysteine
  MOD_RES (132)..(132): Selenocysteine
  MOD_RES (144)..(144): Selenocysteine
MCSLPRGFEPQAPEDLAQRSLVELREMLKRQERLLRNELQRIXIADQGEQQSEENASXKNLXGLSSGXEKKPHYMEVLEMRAKNPVPQLRKFKXNVLPFRQNDSSSHCQKSGSPISSEERRRRDKQHLDDIXAARLLPLHHMPXQLLSIEESLALQKQQKQNYEEMQAKLAAQKLAERLNIKMRSYNPEGESSGRYREVRDEDDDWSSDEF

SEQ ID NO: 20811 - protein, 246 aa, Homo sapiens
  MOD_RES (38)..(39): Selenocysteine
  MOD_RES (58)..(58): Selenocysteine
  MOD_RES (71)..(71): Selenocysteine
  MOD_RES (181)..(181): Selenocysteine
  MOD_RES (242)..(242): Selenocysteine
MPRSCCSRSGALLLALLLQASMEVRGWCLESSQCQDLXXESNLLECIRACKPDLSAEXPMFPGNGDEQPLXENPRKYVMGHFRWDRFGRRNSSSSGSSGAGQKREDVSAGEDCGPLPEGGPEPRSDGAKPGPREGKRSYSMEHFRWGKPVGKKRRPVKVYPNGAEDESAEAFPLEFKRELXGQRLREGDGPDGPADDGAGAQADLEHSLLVAAEKKDEGPYRMEHFRWGSPPKDKRYGGFMXSEKS

SEQ ID NO: 20812 - protein, 267 aa, Homo sapiens
  MOD_RES (38)..(39): Selenocysteine
  MOD_RES (58)..(58): Selenocysteine
  MOD_RES (71)..(71): Selenocysteine
  MOD_RES (181)..(181): Selenocysteine
  MOD_RES (242)..(242): Selenocysteine
  MOD_RES (248)..(248): Selenocysteine
  MOD_RES (252)..(252): Selenocysteine
MPRSCCSRSGALLLALLLQASMEVRGWCLESSQCQDLXXESNLLECIRACKPDLSAEXPMFPGNGDEQPLXENPRKYVMGHFRWDRFGRRNSSSSGSSGAGQKREDVSAGEDCGPLPEGGPEPRSDGAKPGPREGKRSYSMEHFRWGKPVGKKRRPVKVYPNGAEDESAEAFPLEFKRELXGQRLREGDGPDGPADDGAGAQADLEHSLLVAAEKKDEGPYRMEHFRWGSPPKDKRYGGFMXSEKSQXPLVXLFKNAIIKNAYKKGE

SEQ ID NO: 20813 - protein, 108 aa, Homo sapiens
  MOD_RES (4)..(4): Selenocysteine
  MOD_RES (17)..(17): Selenocysteine
  MOD_RES (32)..(32): Selenocysteine
  MOD_RES (44)..(44): Selenocysteine
  MOD_RES (46)..(46): Selenocysteine
  MOD_RES (95)..(95): Selenocysteine
  MOD_RES (102)..(102): Selenocysteine
MGCXYSSPPEEPALRRXSSVRESSFVEKMKKXGRNIIVFYGSQXGXAEEFANRLSKDAHRYGMRGMSADPEEYDLADLSSLPEIDNALVVFCMAXYGEGDPXDNAQDF

SEQ ID NO: 20814 - protein, 418 aa, Homo sapiens
  MOD_RES (28)..(29): Selenocysteine
  MOD_RES (37)..(37): Selenocysteine
  MOD_RES (106)..(106): Selenocysteine
  MOD_RES (110)..(110): Selenocysteine
  MOD_RES (113)..(113): Selenocysteine
  MOD_RES (119)..(119): Selenocysteine
  MOD_RES (124)..(124): Selenocysteine
  MOD_RES (221)..(221): Selenocysteine
  MOD_RES (232)..(232): Selenocysteine
  MOD_RES (266)..(267): Selenocysteine
  MOD_RES (276)..(276): Selenocysteine
  MOD_RES (301)..(301): Selenocysteine
  MOD_RES (330)..(330): Selenocysteine
  MOD_RES (383)..(383): Selenocysteine
  MOD_RES (408)..(408): Selenocysteine
MGEMGRLKSYENQKPPFDAKNPFLAAVXXNRKLNQGXERHLMHLELDISDSKIRYESGDHVAVYPANDSALVNQLGKILGADLDVVMSLNNLDEESNKKHPFPCPXSYRXALXYYLDIXNPPRXNVLYELAQYASEPSEQELLRKMASSSGEGKELYLSWVVEARRHILAILQDCPSLRPPIDHLCELLPRLQARYYSIASSSKVHPNSVHICAVVVEYEXKAGRINKGVAXNWLRAKEPAGENGGRALVPMFVRKSQFRLPFKAXXPVIMVGPGXGVAPFIGFIQERAWLRQQGKEVGEXLLYYGCRRSDEDYLYREELAQFHRDGALXQLNVAFSREQSHKVYVQHLLKQDREHLWKLIEGGAHIYVCGDARNMARDVQNXFYDIVAELGAMEHAQAVDYIKKLMXKGRYSLDVWS

SEQ ID NO: 20815 - protein, 39 aa, Homo sapiens
  MOD_RES (11)..(11): Selenocysteine
  MOD_RES (14)..(14): Selenocysteine
  MOD_RES (29)..(29): Selenocysteine
MINMGDSHVDXSSXVSEAVAEEVSLFSMXDMILFSLIVG

SEQ ID NO: 20816 - protein, 62 aa, Homo sapiens
  MOD_RES (11)..(11): Selenocysteine
  MOD_RES (14)..(14): Selenocysteine
  MOD_RES (29)..(29): Selenocysteine
  MOD_RES (42)..(42): Selenocysteine
  MOD_RES (58)..(58): Selenocysteine
  MOD_RES (62)..(62): Selenocysteine
MINMGDSHVDXSSXVSEAVAEEVSLFSMXDMILFSLIVGLLXYWFLFRKKKEEVPEFXKIQX

SEQ ID NO: 20817 - protein, 140 aa, Homo sapiens
  MOD_RES (11)..(11): Selenocysteine
  MOD_RES (14)..(14): Selenocysteine
  MOD_RES (29)..(29): Selenocysteine
  MOD_RES (42)..(42): Selenocysteine
  MOD_RES (58)..(58): Selenocysteine
  MOD_RES (62)..(62): Selenocysteine
  MOD_RES (64)..(64): Selenocysteine
  MOD_RES (79)..(79): Selenocysteine
  MOD_RES (91)..(91): Selenocysteine
  MOD_RES (93)..(93): Selenocysteine
MINMGDSHVDXSSXVSEAVAEEVSLFSMXDMILFSLIVGLLXYWFLFRKKKEEVPEFXKIQXLXSSVRESSFVEKMKKXGRNIIVFYGSQXGXAEEFANRLSKDAHRYGMRGMSADPEEYDLADLSSLPEIDNALVVFCM

SEQ ID NO: 20818 - protein, 146 aa, Homo sapiens
  MOD_RES (11)..(11): Selenocysteine
  MOD_RES (14)..(14): Selenocysteine
  MOD_RES (29)..(29): Selenocysteine
  MOD_RES (42)..(42): Selenocysteine
  MOD_RES (58)..(58): Selenocysteine
  MOD_RES (62)..(62): Selenocysteine
  MOD_RES (64)..(64): Selenocysteine
  MOD_RES (79)..(79): Selenocysteine
  MOD_RES (91)..(91): Selenocysteine
  MOD_RES (93)..(93): Selenocysteine
  MOD_RES (142)..(142): Selenocysteine
MINMGDSHVDXSSXVSEAVAEEVSLFSMXDMILFSLIVGLLXYWFLFRKKKEEVPEFXKIQXLXSSVRESSFVEKMKKXGRNIIVFYGSQXGXAEEFANRLSKDAHRYGMRGMSADPEEYDLADLSSLPEIDNALVVFCMAXYGEG

SEQ ID NO: 20819 - protein, 166 aa, Homo sapiens
  MOD_RES (11)..(11): Selenocysteine
  MOD_RES (14)..(14): Selenocysteine
  MOD_RES (29)..(29): Selenocysteine
  MOD_RES (42)..(42): Selenocysteine
  MOD_RES (58)..(58): Selenocysteine
  MOD_RES (62)..(62): Selenocysteine
  MOD_RES (64)..(64): Selenocysteine
  MOD_RES (79)..(79): Selenocysteine
  MOD_RES (91)..(91): Selenocysteine
  MOD_RES (93)..(93): Selenocysteine
  MOD_RES (142)..(142): Selenocysteine
  MOD_RES (149)..(149): Selenocysteine
  MOD_RES (162)..(162): Selenocysteine
MINMGDSHVDXSSXVSEAVAEEVSLFSMXDMILFSLIVGLLXYWFLFRKKKEEVPEFXKIQXLXSSVRESSFVEKMKKXGRNIIVFYGSQXGXAEEFANRLSKDAHRYGMRGMSADPEEYDLADLSSLPEIDNALVVFCMAXYGEGDPXDNAQDFYDWLQEXDVDL

SEQ ID NO: 20820 - protein, 172 aa, Homo sapiens
  MOD_RES (11)..(11): Selenocysteine
  MOD_RES (14)..(14): Selenocysteine
  MOD_RES (29)..(29): Selenocysteine
  MOD_RES (42)..(42): Selenocysteine
  MOD_RES (58)..(58): Selenocysteine
  MOD_RES (62)..(62): Selenocysteine
  MOD_RES (64)..(64): Selenocysteine
  MOD_RES (79)..(79): Selenocysteine
  MOD_RES (91)..(91): Selenocysteine
  MOD_RES (93)..(93): Selenocysteine
  MOD_RES (142)..(142): Selenocysteine
  MOD_RES (149)..(149): Selenocysteine
  MOD_RES (162)..(162): Selenocysteine
MINMGDSHVDXSSXVSEAVAEEVSLFSMXDMILFSLIVGLLXYWFLFRKKKEEVPEFXKIQXLXSSVRESSFVEKMKKXGRNIIVFYGSQXGXAEEFANRLSKDAHRYGMRGMSADPEEYDLADLSSLPEIDNALVVFCMAXYGEGDPXDNAQDFYDWLQEXDVDLSGVKFA

SEQ ID NO: 20821 - protein, 189 aa, Homo sapiens
  MOD_RES (11)..(11): Selenocysteine
  MOD_RES (14)..(14): Selenocysteine
  MOD_RES (29)..(29): Selenocysteine
  MOD_RES (42)..(42): Selenocysteine
  MOD_RES (58)..(58): Selenocysteine
  MOD_RES (62)..(62): Selenocysteine
  MOD_RES (64)..(64): Selenocysteine
  MOD_RES (79)..(79): Selenocysteine
  MOD_RES (91)..(91): Selenocysteine
  MOD_RES (93)..(93): Selenocysteine
  MOD_RES (142)..(142): Selenocysteine
  MOD_RES (149)..(149): Selenocysteine
  MOD_RES (162)..(162): Selenocysteine
MINMGDSHVDXSSXVSEAVAEEVSLFSMXDMILFSLIVGLLXYWFLFRKKKEEVPEFXKIQXLXSSVRESSFVEKMKKXGRNIIVFYGSQXGXAEEFANRLSKDAHRYGMRGMSADPEEYDLADLSSLPEIDNALVVFCMAXYGEGDPXDNAQDFYDWLQEXDVDLSGVKFALGGGLHHLARAVLAGRV

SEQ ID NO: 20822 - protein, 188 aa, Homo sapiens
  MOD_RES (11)..(11): Selenocysteine
  MOD_RES (14)..(14): Selenocysteine
  MOD_RES (29)..(29): Selenocysteine
  MOD_RES (42)..(42): Selenocysteine
  MOD_RES (58)..(58): Selenocysteine
  MOD_RES (62)..(62): Selenocysteine
  MOD_RES (64)..(64): Selenocysteine
  MOD_RES (79)..(79): Selenocysteine
  MOD_RES (91)..(91): Selenocysteine
  MOD_RES (93)..(93): Selenocysteine
  MOD_RES (142)..(142): Selenocysteine
  MOD_RES (149)..(149): Selenocysteine
  MOD_RES (162)..(162): Selenocysteine
  MOD_RES (180)..(180): Selenocysteine
MINMGDSHVDXSSXVSEAVAEEVSLFSMXDMILFSLIVGLLXYWFLFRKKKEEVPEFXKIQXLXSSVRESSFVEKMKKXGRNIIVFYGSQXGXAEEFANRLSKDAHRYGMRGMSADPEEYDLADLSSLPEIDNALVVFCMAXYGEGDPXDNAQDFYDWLQEXDVDLSGVKFAVFGLGNKXYEHFNAMG

SEQ ID NO: 20823 - protein, 211 aa, Homo sapiens
  MOD_RES (11)..(11): Selenocysteine
  MOD_RES (14)..(14): Selenocysteine
  MOD_RES (29)..(29): Selenocysteine
  MOD_RES (42)..(42): Selenocysteine
  MOD_RES (58)..(58): Selenocysteine
  MOD_RES (62)..(62): Selenocysteine
  MOD_RES (64)..(64): Selenocysteine
  MOD_RES (79)..(79): Selenocysteine
  MOD_RES (91)..(91): Selenocysteine
  MOD_RES (93)..(93): Selenocysteine
  MOD_RES (142)..(142): Selenocysteine
  MOD_RES (149)..(149): Selenocysteine
  MOD_RES (162)..(162): Selenocysteine
  MOD_RES (180)..(180): Selenocysteine
MINMGDSHVDXSSXVSEAVAEEVSLFSMXDMILFSLIVGLLXYWFLFRKKKEEVPEFXKIQXLXSSVRESSFVEKMKKXGRNIIVFYGSQXGXAEEFANRLSKDAHRYGMRGMSADPEEYDLADLSSLPEIDNALVVFCMAXYGEGDPXDNAQDFYDWLQEXDVDLSGVKFAVFGLGNKXYEHFNAMGKCGQGVHGGDGPAEELREPEAPL

SEQ ID NO: 20824 - protein, 633 aa, Homo sapiens
  MOD_RES (11)..(11): Selenocysteine
  MOD_RES (14)..(14): Selenocysteine
  MOD_RES (29)..(29): Selenocysteine
  MOD_RES (42)..(42): Selenocysteine
  MOD_RES (58)..(58): Selenocysteine
  MOD_RES (62)..(62): Selenocysteine
  MOD_RES (64)..(64): Selenocysteine
  MOD_RES (79)..(79): Selenocysteine
  MOD_RES (91)..(91): Selenocysteine
  MOD_RES (93)..(93): Selenocysteine
  MOD_RES (142)..(142): Selenocysteine
  MOD_RES (149)..(149): Selenocysteine
  MOD_RES (162)..(162): Selenocysteine
  MOD_RES (180)..(180): Selenocysteine
  MOD_RES (221)..(221): Selenocysteine
  MOD_RES (239)..(239): Selenocysteine
  MOD_RES (254)..(254): Selenocysteine
  MOD_RES (290)..(291): Selenocysteine
  MOD_RES (299)..(299): Selenocysteine
  MOD_RES (368)..(368): Selenocysteine
  MOD_RES (372)..(372): Selenocysteine
  MOD_RES (375)..(375): Selenocysteine
  MOD_RES (381)..(381): Selenocysteine
  MOD_RES (386)..(386): Selenocysteine
  MOD_RES (483)..(483): Selenocysteine
  MOD_RES (494)..(494): Selenocysteine
  MOD_RES (528)..(529): Selenocysteine
  MOD_RES (538)..(538): Selenocysteine
  MOD_RES (563)..(563): Selenocysteine
  MOD_RES (592)..(592): Selenocysteine
MINMGDSHVDXSSXVSEAVAEEVSLFSMXDMILFSLIVGLLXYWFLFRKKKEEVPEFXKIQXLXSSVRESSFVEKMKKXGRNIIVFYGSQXGXAEEFANRLSKDAHRYGMRGMSADPEEYDLADLSSLPEIDNALVVFCMAXYGEGDPXDNAQDFYDWLQEXDVDLSGVKFAVFGLGNKXYEHFNAMGKYVDKRLEQLGAQRIFELGLGDDDGNLEEDFIXWREQFWPAVCEHFGVEAXGEESSIRQYELVVHXDIDAAKVYMGEMGRLKSYENQKPPFDAKNPFLAAVXXNRKLNQGXERHLMHLELDISDSKIRYESGDHVAVYPANDSALVNQLGKILGADLDVVMSLNNLDEESNKKHPFPCPXSYRXALXYYLDIXNPPRXNVLYELAQYASEPSEQELLRKMASSSGEGKELYLSWVVEARRHILAILQDCPSLRPPIDHLCELLPRLQARYYSIASSSKVHPNSVHICAVVVEYEXKAGRINKGVAXNWLRAKEPAGENGGRALVPMFVRKSQFRLPFKAXXPVIMVGPGXGVAPFIGFIQERAWLRQQGKEVGEXLLYYGCRRSDEDYLYREELAQFHRDGALXQLNVAFSREQSHKVYVQHLLKQDREHLWKLIEGGAHIYVCG

SEQ ID NO: 20825 - protein, 680 aa, Homo sapiens
  MOD_RES (11)..(11): Selenocysteine
  MOD_RES (14)..(14): Selenocysteine
  MOD_RES (29)..(29): Selenocysteine
  MOD_RES (42)..(42): Selenocysteine
  MOD_RES (58)..(58): Selenocysteine
  MOD_RES (62)..(62): Selenocysteine
  MOD_RES (64)..(64): Selenocysteine
  MOD_RES (79)..(79): Selenocysteine
  MOD_RES (91)..(91): Selenocysteine
  MOD_RES (93)..(93): Selenocysteine
  MOD_RES (142)..(142): Selenocysteine
  MOD_RES (149)..(149): Selenocysteine
  MOD_RES (162)..(162): Selenocysteine
  MOD_RES (180)..(180): Selenocysteine
  MOD_RES (221)..(221): Selenocysteine
  MOD_RES (239)..(239): Selenocysteine
  MOD_RES (254)..(254): Selenocysteine
  MOD_RES (290)..(291): Selenocysteine
  MOD_RES (299)..(299): Selenocysteine
  MOD_RES (368)..(368): Selenocysteine
  MOD_RES (372)..(372): Selenocysteine
  MOD_RES (375)..(375): Selenocysteine
  MOD_RES (381)..(381): Selenocysteine
  MOD_RES (386)..(386): Selenocysteine
  MOD_RES (483)..(483): Selenocysteine
  MOD_RES (494)..(494): Selenocysteine
  MOD_RES (528)..(529): Selenocysteine
  MOD_RES (538)..(538): Selenocysteine
  MOD_RES (563)..(563): Selenocysteine
  MOD_RES (592)..(592): Selenocysteine
  MOD_RES (645)..(645): Selenocysteine
  MOD_RES (670)..(670): Selenocysteine
MINMGDSHVDXSSXVSEAVAEEVSLFSMXDMILFSLIVGLLXYWFLFRKKKEEVPEFXKIQXLXSSVRESSFVEKMKKXGRNIIVFYGSQXGXAEEFANRLSKDAHRYGMRGMSADPEEYDLADLSSLPEIDNALVVFCMAXYGEGDPXDNAQDFYDWLQEXDVDLSGVKFAVFGLGNKXYEHFNAMGKYVDKRLEQLGAQRIFELGLGDDDGNLEEDFIXWREQFWPAVCEHFGVEAXGEESSIRQYELVVHXDIDAAKVYMGEMGRLKSYENQKPPFDAKNPFLAAVXXNRKLNQGXERHLMHLELDISDSKIRYESGDHVAVYPANDSALVNQLGKILGADLDVVMSLNNLDEESNKKHPFPCPXSYRXALXYYLDIXNPPRXNVLYELAQYASEPSEQELLRKMASSSGEGKELYLSWVVEARRHILAILQDCPSLRPPIDHLCELLPRLQARYYSIASSSKVHPNSVHICAVVVEYEXKAGRINKGVAXNWLRAKEPAGENGGRALVPMFVRKSQFRLPFKAXXPVIMVGPGXGVAPFIGFIQERAWLRQQGKEVGEXLLYYGCRRSDEDYLYREELAQFHRDGALXQLNVAFSREQSHKVYVQHLLKQDREHLWKLIEGGAHIYVCGDARNMARDVQNXFYDIVAELGAMEHAQAVDYIKKLMXKGRYSLDVWS

SEQ ID NO: 20826 - protein, 101 aa, Homo sapiens
  MOD_RES (11)..(11): Selenocysteine
  MOD_RES (14)..(14): Selenocysteine
  MOD_RES (29)..(29): Selenocysteine
  MOD_RES (42)..(42): Selenocysteine
  MOD_RES (58)..(58): Selenocysteine
  MOD_RES (62)..(62): Selenocysteine
  MOD_RES (64)..(64): Selenocysteine
  MOD_RES (79)..(79): Selenocysteine
  MOD_RES (87)..(87): Selenocysteine
MINMGDSHVDXSSXVSEAVAEEVSLFSMXDMILFSLIVGLLXYWFLFRKKKEEVPEFXKIQXLXSSVRESSFVEKMKKXVSFLHVFXLLRKPRPRWACNQV

SEQ ID NO: 20827 - protein, 54 aa, Homo sapiens
MRLPGVNSKDLLCQREQLCGKDEENGEEHHRVLRLPDGDCRGVCQPPVQGRPPL

SEQ ID NO: 20828 - protein, 725 aa, Homo sapiens
  MOD_RES (1)..(1): Any amino acid
  MOD_RES (2)..(2): Selenocysteine
  MOD_RES (15)..(15): Selenocysteine
  MOD_RES (31)..(31): Selenocysteine
  MOD_RES (35)..(35): Selenocysteine
  MOD_RES (37)..(37): Selenocysteine
  MOD_RES (52)..(52): Selenocysteine
  MOD_RES (64)..(64): Selenocysteine
  MOD_RES (66)..(66): Selenocysteine
  MOD_RES (115)..(115): Selenocysteine
  MOD_RES (122)..(122): Selenocysteine
  MOD_RES (135)..(135): Selenocysteine
  MOD_RES (151)..(151): Selenocysteine
  MOD_RES (188)..(188): Selenocysteine
  MOD_RES (191)..(191): Selenocysteine
  MOD_RES (200)..(201): Selenocysteine
  MOD_RES (231)..(231): Selenocysteine
  MOD_RES (272)..(272): Selenocysteine
  MOD_RES (290)..(290): Selenocysteine
  MOD_RES (305)..(305): Selenocysteine
  MOD_RES (341)..(342): Selenocysteine
  MOD_RES (350)..(350): Selenocysteine
  MOD_RES (419)..(419): Selenocysteine
  MOD_RES (423)..(423): Selenocysteine
  MOD_RES (426)..(426): Selenocysteine
  MOD_RES (432)..(432): Selenocysteine
  MOD_RES (437)..(437): Selenocysteine
  MOD_RES (534)..(534): Selenocysteine
  MOD_RES (545)..(545): Selenocysteine
  MOD_RES (579)..(580): Selenocysteine
  MOD_RES (589)..(589): Selenocysteine
  MOD_RES (614)..(614): Selenocysteine
  MOD_RES (643)..(643): Selenocysteine
  MOD_RES (685)..(685): Selenocysteine
  MOD_RES (695)..(695): Selenocysteine
  MOD_RES (702)..(702): Selenocysteine
  MOD_RES (705)..(706): Selenocysteine
  MOD_RES (716)..(716): Selenocysteine
  MOD_RES (721)..(722): Selenocysteine
XXDMILFSLIVGLLXYWFLFRKKKEEVPEFXKIQXLXSSVRESSFVEKMKKXGRNIIVFYGSQXGXAEEFANRLSKDAHRYGMRGMSADPEEYDLADLSSLPEIDNALVVFCMAXYGEGDPXDNAQDFYDWLQEXDVDLSGVKFAVSHPEXAMGSRWPAVPPWGLQIHVSERQPSRPPPCPQQPGQAXCEXLSSAPDPSXXRMSPPCPQPQSAPGGIGCWRLKVFGLGNKXYEHFNAMGKYVDKRLEQLGAQRIFELGLGDDDGNLEEDFIXWREQFWPAVCEHFGVEAXGEESSIRQYELVVHXDIDAAKVYMGEMGRLKSYENQKPPFDAKNPFLAAVXXNRKLNQGXERHLMHLELDISDSKIRYESGDHVAVYPANDSALVNQLGKILGADLDVVMSLNNLDEESNKKHPFPCPXSYRXALXYYLDIXNPPRXNVLYELAQYASEPSEQELLRKMASSSGEGKELYLSWVVEARRHILAILQDCPSLRPPIDHLCELLPRLQARYYSIASSSKVHPNSVHICAVVVEYEXKAGRINKGVAXNWLRAKEPAGENGGRALVPMFVRKSQFRLPFKAXXPVIMVGPGXGVAPFIGFIQERAWLRQQGKEVGEXLLYYGCRRSDEDYLYREELAQFHRDGALXQLNVAFSREQSHKVYVQHLLKQDREHLWKLIEGGAHIYVCGXPSSCPGMHGXWPGMCRXPSXXSWLSSGPWSXRRRWXXSRN

SEQ ID NO: 20829 - protein, 405 aa, Homo sapiens
  MOD_RES (11)..(11): Selenocysteine
  MOD_RES (57)..(57): Selenocysteine
  MOD_RES (72)..(72): Selenocysteine
  MOD_RES (74)..(74): Selenocysteine
  MOD_RES (103)..(103): Selenocysteine
  MOD_RES (119)..(119): Selenocysteine
  MOD_RES (163)..(163): Selenocysteine
  MOD_RES (209)..(209): Selenocysteine
  MOD_RES (211)..(211): Selenocysteine
  MOD_RES (218)..(218): Selenocysteine
  MOD_RES (229)..(229): Selenocysteine
  MOD_RES (247)..(247): Selenocysteine
  MOD_RES (270)..(270): Selenocysteine
  MOD_RES (277)..(277): Selenocysteine
  MOD_RES (302)..(302): Selenocysteine
  MOD_RES (368)..(369): Selenocysteine
  MOD_RES (379)..(379): Selenocysteine
  MOD_RES (394)..(394): Selenocysteine
GLPSYLKHASXVAGGFFSLYHFFQLHMVWVVLLSLLCYLVLFLCRHSSHRGVFLSVXILIYLLMGEMHMVDXVXWHKMRGAQMIVAMKAVSLGFDLDRGEVGXVPSPVEFMGYLYFVGXIVFGPWISFHSYLQAVQGRPLSCRWLQKVARSLALALLCLVLSXCVGPYLFPYFIPLNGDRLLRKWLRAYESAVSFHFSNYFVGFLSEAXAXLAGAGFXEEKDHLEWDLXVSKPLNVELPRSMVEVVXSWNLPMSYWLNNYVFKNALRLGXFSAVLVXYAASALLHGFSFHLAAVLLSLAFIXYVEHVLRKRLARILSACVLSKRCPPDCSHQHRLGLGVRALNLLFGALAIFHLAYLGSLFDVDVDDXXEEQGYGMAYXVHKWSELSWASHWVXFGCWIFYRLIG

SEQ ID NO: 20830 - protein, 86 aa, Homo sapiens
  MOD_RES (3)..(3): Selenocysteine
  MOD_RES (21)..(21): Selenocysteine
  MOD_RES (67)..(67): Selenocysteine
  MOD_RES (84)..(84): Selenocysteine
MAXFSRQEFFQQLLQGCLLPXAQQGLDQIWLLLAICLACRLLWRLAAHGLGRAAQPPVLPRAVPLPXFLPSRRLPIRHHPHLPXHG

SEQ ID NO: 20831 - protein, 97 aa, Homo sapiens
  MOD_RES (3)..(3): Selenocysteine
  MOD_RES (21)..(21): Selenocysteine
  MOD_RES (56)..(56): Selenocysteine
MAXFSRQEFFQQLLQGCLLPXAQQGLDQIWLLLAICLACRLLWRLGLPSYLKHASXVAGGFFSLYHFFQLHMVWVVLLSLLCYLVLFLCRHSSHRGV

SEQ ID NO: 20832 - protein, 455 aa, Homo sapiens
  MOD_RES (3)..(3): Selenocysteine
  MOD_RES (21)..(21): Selenocysteine
  MOD_RES (56)..(56): Selenocysteine
  MOD_RES (102)..(102): Selenocysteine
  MOD_RES (117)..(117): Selenocysteine
  MOD_RES (119)..(119): Selenocysteine
  MOD_RES (148)..(148): Selenocysteine
  MOD_RES (164)..(164): Selenocysteine
  MOD_RES (208)..(208): Selenocysteine
  MOD_RES (231)..(231): Selenocysteine
  MOD_RES (259)..(259): Selenocysteine
  MOD_RES (261)..(261): Selenocysteine
  MOD_RES (268)..(268): Selenocysteine
  MOD_RES (279)..(279): Selenocysteine
  MOD_RES (297)..(297): Selenocysteine
  MOD_RES (320)..(320): Selenocysteine
  MOD_RES (327)..(327): Selenocysteine
  MOD_RES (352)..(352): Selenocysteine
  MOD_RES (418)..(419): Selenocysteine
  MOD_RES (429)..(429): Selenocysteine
  MOD_RES (444)..(444): Selenocysteine
MAXFSRQEFFQQLLQGCLLPXAQQGLDQIWLLLAICLACRLLWRLGLPSYLKHASXVAGGFFSLYHFFQLHMVWVVLLSLLCYLVLFLCRHSSHRGVFLSVXILIYLLMGEMHMVDXVXWHKMRGAQMIVAMKAVSLGFDLDRGEVGXVPSPVEFMGYLYFVGXIVFGPWISFHSYLQAVQGRPLSCRWLQKVARSLALALLCLVLSXCVGPYLFPYFIPLNGDRLLRKGXMVRWLRAYESAVSFHFSNYFVGFLSEAXAXLAGAGFXEEKDHLEWDLXVSKPLNVELPRSMVEVVXSWNLPMSYWLNNYVFKNALRLGXFSAVLVXYAASALLHGFSFHLAAVLLSLAFIXYVEHVLRKRLARILSACVLSKRCPPDCSHQHRLGLGVRALNLLFGALAIFHLAYLGSLFDVDVDDXXEEQGYGMAYXVHKWSELSWASHWVXFGCWIFYRLIG

SEQ ID NO: 20833 - protein, 450 aa, Homo sapiens
  MOD_RES (3)..(3): Selenocysteine
  MOD_RES (21)..(21): Selenocysteine
  MOD_RES (56)..(56): Selenocysteine
  MOD_RES (102)..(102): Selenocysteine
  MOD_RES (117)..(117): Selenocysteine
  MOD_RES (119)..(119): Selenocysteine
  MOD_RES (148)..(148): Selenocysteine
  MOD_RES (164)..(164): Selenocysteine
  MOD_RES (208)..(208): Selenocysteine
  MOD_RES (254)..(254): Selenocysteine
  MOD_RES (256)..(256): Selenocysteine
  MOD_RES (263)..(263): Selenocysteine
  MOD_RES (274)..(274): Selenocysteine
  MOD_RES (292)..(292): Selenocysteine
  MOD_RES (315)..(315): Selenocysteine
  MOD_RES (322)..(322): Selenocysteine
  MOD_RES (347)..(347): Selenocysteine
  MOD_RES (413)..(414): Selenocysteine
  MOD_RES (424)..(424): Selenocysteine
  MOD_RES (439)..(439): Selenocysteine
MAXFSRQEFFQQLLQGCLLPXAQQGLDQIWLLLAICLACRLLWRLGLPSYLKHASXVAGGFFSLYHFFQLHMVWVVLLSLLCYLVLFLCRHSSHRGVFLSVXILIYLLMGEMHMVDXVXWHKMRGAQMIVAMKAVSLGFDLDRGEVGXVPSPVEFMGYLYFVGXIVFGPWISFHSYLQAVQGRPLSCRWLQKVARSLALALLCLVLSXCVGPYLFPYFIPLNGDRLLRKWLRAYESAVSFHFSNYFVGFLSEAXAXLAGAGFXEEKDHLEWDLXVSKPLNVELPRSMVEVVXSWNLPMSYWLNNYVFKNALRLGXFSAVLVXYAASALLHGFSFHLAAVLLSLAFIXYVEHVLRKRLARILSACVLSKRCPPDCSHQHRLGLGVRALNLLFGALAIFHLAYLGSLFDVDVDDXXEEQGYGMAYXVHKWSELSWASHWVXFGCWIFYRLIG

SEQ ID NO: 20834 - protein, 461 aa, Homo sapiens
  MOD_RES (3)..(3): Selenocysteine
  MOD_RES (21)..(21): Selenocysteine
  MOD_RES (56)..(56): Selenocysteine
  MOD_RES (102)..(102): Selenocysteine
  MOD_RES (117)..(117): Selenocysteine
  MOD_RES (119)..(119): Selenocysteine
  MOD_RES (148)..(148): Selenocysteine
  MOD_RES (164)..(164): Selenocysteine
  MOD_RES (208)..(208): Selenocysteine
  MOD_RES (237)..(237): Selenocysteine
  MOD_RES (265)..(265): Selenocysteine
  MOD_RES (267)..(267): Selenocysteine
  MOD_RES (274)..(274): Selenocysteine
  MOD_RES (285)..(285): Selenocysteine
  MOD_RES (303)..(303): Selenocysteine
  MOD_RES (326)..(326): Selenocysteine
  MOD_RES (333)..(333): Selenocysteine
  MOD_RES (358)..(358): Selenocysteine
  MOD_RES (424)..(425): Selenocysteine
  MOD_RES (435)..(435): Selenocysteine
  MOD_RES (450)..(450): Selenocysteine
MAXFSRQEFFQQLLQGCLLPXAQQGLDQIWLLLAICLACRLLWRLGLPSYLKHASXVAGGFFSLYHFFQLHMVWVVLLSLLCYLVLFLCRHSSHRGVFLSVXILIYLLMGEMHMVDXVXWHKMRGAQMIVAMKAVSLGFDLDRGEVGXVPSPVEFMGYLYFVGXIVFGPWISFHSYLQAVQGRPLSCRWLQKVARSLALALLCLVLSXCVGPYLFPYFIPLNGDRLLRNKKRKARGXMVRWLRAYESAVSFHFSNYFVGFLSEAXAXLAGAGFXEEKDHLEWDLXVSKPLNVELPRSMVEVVXSWNLPMSYWLNNYVFKNALRLGXFSAVLVXYAASALLHGFSFHLAAVLLSLAFIXYVEHVLRKRLARILSACVLSKRCPPDCSHQHRLGLGVRALNLLFGALAIFHLAYLGSLFDVDVDDXXEEQGYGMAYXVHKWSELSWASHWVXFGCWIFYRLIG

SEQ ID NO: 20835 - protein, 456 aa, Homo sapiens
  MOD_RES (3)..(3): Selenocysteine
  MOD_RES (21)..(21): Selenocysteine
  MOD_RES (56)..(56): Selenocysteine
  MOD_RES (102)..(102): Selenocysteine
  MOD_RES (117)..(117): Selenocysteine
  MOD_RES (119)..(119): Selenocysteine
  MOD_RES (148)..(148): Selenocysteine
  MOD_RES (164)..(164): Selenocysteine
  MOD_RES (208)..(208): Selenocysteine
  MOD_RES (260)..(260): Selenocysteine
  MOD_RES (262)..(262): Selenocysteine
  MOD_RES (269)..(269): Selenocysteine
  MOD_RES (280)..(280): Selenocysteine
  MOD_RES (298)..(298): Selenocysteine
  MOD_RES (321)..(321): Selenocysteine
  MOD_RES (328)..(328): Selenocysteine
  MOD_RES (353)..(353): Selenocysteine
  MOD_RES (419)..(420): Selenocysteine
  MOD_RES (430)..(430): Selenocysteine
  MOD_RES (445)..(445): Selenocysteine
MAXFSRQEFFQQLLQGCLLPXAQQGLDQIWLLLAICLACRLLWRLGLPSYLKHASXVAGGFFSLYHFFQLHMVWVVLLSLLCYLVLFLCRHSSHRGVFLSVXILIYLLMGEMHMVDXVXWHKMRGAQMIVAMKAVSLGFDLDRGEVGXVPSPVEFMGYLYFVGXIVFGPWISFHSYLQAVQGRPLSCRWLQKVARSLALALLCLVLSXCVGPYLFPYFIPLNGDRLLRNKKRKARWLRAYESAVSFHFSNYFVGFLSEAXAXLAGAGFXEEKDHLEWDLXVSKPLNVELPRSMVEVVXSWNLPMSYWLNNYVFKNALRLGXFSAVLVXYAASALLHGFSFHLAAVLLSLAFIXYVEHVLRKRLARILSACVLSKRCPPDCSHQHRLGLGVRALNLLFGALAIFHLAYLGSLFDVDVDDXXEEQGYGMAYXVHKWSELSWASHWVXFGCWIFYRLIG

SEQ ID NO: 20836 - protein, 50 aa, Homo sapiens
  MOD_RES (3)..(3): Selenocysteine
  MOD_RES (21)..(21): Selenocysteine
  MOD_RES (49)..(49): Selenocysteine
MAXFSRQEFFQQLLQGCLLPXAQQGLDQIWLLLAICLACRLLWRLVRCXW

SEQ ID NO: 20837 - protein, 150 aa, Homo sapiens
  MOD_RES (4)..(4): Selenocysteine
  MOD_RES (14)..(14): Selenocysteine
  MOD_RES (67)..(67): Selenocysteine
  MOD_RES (85)..(85): Selenocysteine
  MOD_RES (131)..(131): Selenocysteine
  MOD_RES (148)..(148): Selenocysteine
MYLXSHAFPQSSSXVPLHGLGSPKLKCECQSASFKRGLPHGHPLPLCPCFDRSIHLAIHPWGSAMAXFSRQEFFQQLLQGCLLPXAQQGLDQIWLLLAICLACRLLWRLAAHGLGRAAQPPVLPRAVPLPXFLPSRRLPIRHHPHLPXHG

SEQ ID NO: 20838 - protein, 749 aa, Homo sapiens
  MOD_RES (52)..(52): Selenocysteine
  MOD_RES (59)..(59): Selenocysteine
  MOD_RES (73)..(74): Selenocysteine
  MOD_RES (104)..(104): Selenocysteine
  MOD_RES (111)..(113): Selenocysteine
  MOD_RES (133)..(133): Selenocysteine
  MOD_RES (176)..(176): Selenocysteine
  MOD_RES (205)..(205): Selenocysteine
  MOD_RES (219)..(219): Selenocysteine
  MOD_RES (231)..(231): Selenocysteine
  MOD_RES (235)..(235): Selenocysteine
  MOD_RES (256)..(256): Selenocysteine
  MOD_RES (270)..(270): Selenocysteine
  MOD_RES (275)..(275): Selenocysteine
  MOD_RES (308)..(308): Selenocysteine
  MOD_RES (323)..(323): Selenocysteine
  MOD_RES (328)..(328): Selenocysteine
  MOD_RES (339)..(339): Selenocysteine
  MOD_RES (353)..(353): Selenocysteine
  MOD_RES (382)..(383): Selenocysteine
  MOD_RES (385)..(385): Selenocysteine
  MOD_RES (404)..(404): Selenocysteine
  MOD_RES (417)..(417): Selenocysteine
  MOD_RES (451)..(451): Selenocysteine
  MOD_RES (464)..(464): Selenocysteine
  MOD_RES (511)..(511): Selenocysteine
  MOD_RES (526)..(526): Selenocysteine
  MOD_RES (532)..(532): Selenocysteine
  MOD_RES (537)..(537): Selenocysteine
  MOD_RES (545)..(545): Selenocysteine
  MOD_RES (568)..(568): Selenocysteine
  MOD_RES (582)..(582): Selenocysteine
  MOD_RES (587)..(588): Selenocysteine
  MOD_RES (601)..(601): Selenocysteine
  MOD_RES (616)..(617): Selenocysteine
  MOD_RES (633)..(633): Selenocysteine
  MOD_RES (660)..(660): Selenocysteine
  MOD_RES (667)..(667): Selenocysteine
  MOD_RES (676)..(676): Selenocysteine
  MOD_RES (680)..(680): Selenocysteine
  MOD_RES (685)..(685): Selenocysteine
  MOD_RES (688)..(688): Selenocysteine
  MOD_RES (698)..(698): Selenocysteine
  MOD_RES (701)..(701): Selenocysteine
  MOD_RES (725)..(725): Selenocysteine
MIPFLPMFSLLLLLIVNPINANNHYDKILAHSRIRGRDQGPNVCALQQILGXKKKYFSXCKNWYKKSICGQKXXVLYECCPGYMRMEGMKGCPAVLPIDHVYGXLGIVGAXXXQRYSDASKLREEIEGKGSFXYFAPSNEAWDNLDSDIRRGLESNVNVELLNALHSHMINKRMLXKDLKNGMIIPSMYNNLGLFINHYPNGVVXVNCARIIHGNQIAXNGVVHVIDRVLXQIGXSIQDFIEAEDDLSSFRAAAIXSDILEALGRDGHFXLFAPXNEAFEKLPRGVLERIMGDKVASEALMKYHILNXLQCSESIMGGAVFEXLEGNXIEIGCDGDSIXVNGIKMVNKKDIVXNNGVIHLIDQVLIPDSAKQVIELAGKQQXXFXDLVAQLGLASALRPDGEYXLLAPVNNAFSDDXLSMDQRLLKLILQNHILKVKVGLNELYNGQILEXIGGKQLRVFVYRXAVCIENSCMEKGSKQGRNGAIHIFREIIKPAEKSLHEKLKQDKRFSXFLSLLEAADLKELLXQPGDWXLFVPXNDAFKGMXSEEKEILIRDKNALQNIILYHLXPGVFIGKGFEPGVXNILKXXQGSKIFLKEVNDXLLVNELKSKESDIMXXNGVIHVVDKLLYPADXPVGNDQLLEILNKLIKYIQIKFVRGSXFKEIPVXVYSPEIKYXRISXGGGEXEEXLKKLLQEEVXKVXKFIEGGDGHLFEDEEIKRLLQGDXPVRKLQANKKVQGSRRRLREGRSQ

SEQ ID NO: 20839 - protein, 779 aa, Homo sapiens
  MOD_RES (52)..(52): Selenocysteine
  MOD_RES (59)..(59): Selenocysteine
  MOD_RES (73)..(74): Selenocysteine
  MOD_RES (104)..(104): Selenocysteine
  MOD_RES (111)..(113): Selenocysteine
  MOD_RES (133)..(133): Selenocysteine
  MOD_RES (176)..(176): Selenocysteine
  MOD_RES (205)..(205): Selenocysteine
  MOD_RES (219)..(219): Selenocysteine
  MOD_RES (231)..(231): Selenocysteine
  MOD_RES (235)..(235): Selenocysteine
  MOD_RES (256)..(256): Selenocysteine
  MOD_RES (270)..(270): Selenocysteine
  MOD_RES (275)..(275): Selenocysteine
  MOD_RES (308)..(308): Selenocysteine
  MOD_RES (323)..(323): Selenocysteine
  MOD_RES (328)..(328): Selenocysteine
  MOD_RES (339)..(339): Selenocysteine
  MOD_RES (353)..(353): Selenocysteine
  MOD_RES (382)..(383): Selenocysteine
  MOD_RES (385)..(385): Selenocysteine
  MOD_RES (404)..(404): Selenocysteine
  MOD_RES (417)..(417): Selenocysteine
  MOD_RES (451)..(451): Selenocysteine
  MOD_RES (464)..(464): Selenocysteine
  MOD_RES (511)..(511): Selenocysteine
  MOD_RES (526)..(526): Selenocysteine
  MOD_RES (532)..(532): Selenocysteine
  MOD_RES (537)..(537): Selenocysteine
  MOD_RES (545)..(545): Selenocysteine
  MOD_RES (568)..(568): Selenocysteine
  MOD_RES (582)..(582): Selenocysteine
  MOD_RES (587)..(588): Selenocysteine
  MOD_RES (601)..(601): Selenocysteine
  MOD_RES (616)..(617): Selenocysteine
  MOD_RES (633)..(633): Selenocysteine
  MOD_RES (660)..(660): Selenocysteine
  MOD_RES (667)..(667): Selenocysteine
  MOD_RES (677)..(677): Selenocysteine
  MOD_RES (688)..(688): Selenocysteine
  MOD_RES (692)..(692): Selenocysteine
  MOD_RES (699)..(699): Selenocysteine
  MOD_RES (706)..(706): Selenocysteine
  MOD_RES (710)..(710): Selenocysteine
  MOD_RES (715)..(715): Selenocysteine
  MOD_RES (718)..(718): Selenocysteine
  MOD_RES (728)..(728): Selenocysteine
  MOD_RES (731)..(731): Selenocysteine
  MOD_RES (755)..(755): Selenocysteine
MIPFLPMFSLLLLLIVNPINANNHYDKILAHSRIRGRDQGPNVCALQQILGXKKKYFSXCKNWYKKSICGQKXXVLYECCPGYMRMEGMKGCPAVLPIDHVYGXLGIVGAXXXQRYSDASKLREEIEGKGSFXYFAPSNEAWDNLDSDIRRGLESNVNVELLNALHSHMINKRMLXKDLKNGMIIPSMYNNLGLFINHYPNGVVXVNCARIIHGNQIAXNGVVHVIDRVLXQIGXSIQDFIEAEDDLSSFRAAAIXSDILEALGRDGHFXLFAPXNEAFEKLPRGVLERIMGDKVASEALMKYHILNXLQCSESIMGGAVFEXLEGNXIEIGCDGDSIXVNGIKMVNKKDIVXNNGVIHLIDQVLIPDSAKQVIELAGKQQXXFXDLVAQLGLASALRPDGEYXLLAPVNNAFSDDXLSMDQRLLKLILQNHILKVKVGLNELYNGQILEXIGGKQLRVFVYRXAVCIENSCMEKGSKQGRNGAIHIFREIIKPAEKSLHEKLKQDKRFSXFLSLLEAADLKELLXQPGDWXLFVPXNDAFKGMXSEEKEILIRDKNALQNIILYHLXPGVFIGKGFEPGVXNILKXXQGSKIFLKEVNDXLLVNELKSKESDIMXXNGVIHVVDKLLYPADXPVGNDQLLEILNKLIKYIQIKFVRGSXFKEIPVXVYKPIIKKYXKIIDGVPVEIXEKEXREERIIXGPEIKYXRISXGGGEXEEXLKKLLQEEVXKVXKFIEGGDGHLFEDEEIKRLLQGDXPVRKLQANKKVQGSRRRLREGRSQ

SEQ ID NO: 20840 - protein, 781 aa, Homo sapiens
  MOD_RES (52)..(52): Selenocysteine
  MOD_RES (59)..(59): Selenocysteine
  MOD_RES (73)..(74): Selenocysteine
  MOD_RES (104)..(104): Selenocysteine
  MOD_RES (111)..(113): Selenocysteine
  MOD_RES (133)..(133): Selenocysteine
  MOD_RES (176)..(176): Selenocysteine
  MOD_RES (205)..(205): Selenocysteine
  MOD_RES (219)..(219): Selenocysteine
  MOD_RES (231)..(231): Selenocysteine
  MOD_RES (235)..(235): Selenocysteine
  MOD_RES (256)..(256): Selenocysteine
  MOD_RES (270)..(270): Selenocysteine
  MOD_RES (275)..(275): Selenocysteine
  MOD_RES (308)..(308): Selenocysteine
  MOD_RES (323)..(323): Selenocysteine
  MOD_RES (328)..(328): Selenocysteine
  MOD_RES (339)..(339): Selenocysteine
  MOD_RES (353)..(353): Selenocysteine
  MOD_RES (382)..(383): Selenocysteine
  MOD_RES (385)..(385): Selenocysteine
  MOD_RES (404)..(404): Selenocysteine
  MOD_RES (417)..(417): Selenocysteine
  MOD_RES (451)..(451): Selenocysteine
  MOD_RES (464)..(464): Selenocysteine
  MOD_RES (511)..(511): Selenocysteine
  MOD_RES (526)..(526): Selenocysteine
  MOD_RES (532)..(532): Selenocysteine
  MOD_RES (537)..(537): Selenocysteine
  MOD_RES (545)..(545): Selenocysteine
  MOD_RES (568)..(568): Selenocysteine
  MOD_RES (582)..(582): Selenocysteine
  MOD_RES (587)..(588): Selenocysteine
  MOD_RES (601)..(601): Selenocysteine
  MOD_RES (616)..(617): Selenocysteine
  MOD_RES (633)..(633): Selenocysteine
  MOD_RES (660)..(660): Selenocysteine
  MOD_RES (667)..(667): Selenocysteine
  MOD_RES (672)..(672): Selenocysteine
  MOD_RES (674)..(674): Selenocysteine
  MOD_RES (692)..(692): Selenocysteine
  MOD_RES (694)..(694): Selenocysteine
  MOD_RES (707)..(707): Selenocysteine
  MOD_RES (718)..(718): Selenocysteine
  MOD_RES (722)..(722): Selenocysteine
  MOD_RES (729)..(729): Selenocysteine
  MOD_RES (736)..(736): Selenocysteine
  MOD_RES (740)..(740): Selenocysteine
  MOD_RES (745)..(745): Selenocysteine
  MOD_RES (748)..(748): Selenocysteine
  MOD_RES (757)..(757): Selenocysteine
MIPFLPMFSLLLLLIVNPINANNHYDKILAHSRIRGRDQGPNVCALQQILGXKKKYFSXCKNWYKKSICGQKXXVLYECCPGYMRMEGMKGCPAVLPIDHVYGXLGIVGAXXXQRYSDASKLREEIEGKGSFXYFAPSNEAWDNLDSDIRRGLESNVNVELLNALHSHMINKRMLXKDLKNGMIIPSMYNNLGLFINHYPNGVVXVNCARIIHGNQIAXNGVVHVIDRVLXQIGXSIQDFIEAEDDLSSFRAAAIXSDILEALGRDGHFXLFAPXNEAFEKLPRGVLERIMGDKVASEALMKYHILNXLQCSESIMGGAVFEXLEGNXIEIGCDGDSIXVNGIKMVNKKDIVXNNGVIHLIDQVLIPDSAKQVIELAGKQQXXFXDLVAQLGLASALRPDGEYXLLAPVNNAFSDDXLSMDQRLLKLILQNHILKVKVGLNELYNGQILEXIGGKQLRVFVYRXAVCIENSCMEKGSKQGRNGAIHIFREIIKPAEKSLHEKLKQDKRFSXFLSLLEAADLKELLXQPGDWXLFVPXNDAFKGMXSEEKEILIRDKNALQNIILYHLXPGVFIGKGFEPGVXNILKXXQGSKIFLKEVNDXLLVNELKSKESDIMXXNGVIHVVDKLLYPADXPVGNDQLLEILNKLIKYIQIKFVRGSXFKEIPVXVYRPXLXKVKIEGEPEFRLIKEGEXIXEVIHGEPIIKKYXKIIDGVPVEIXEKEXREERIIXGPEIKYXRISXGGGEXEEXLKKLLQEDXPVRKLQANKKVQGSRRRLREGRSQ

SEQ ID NO: 20841 - protein, 808 aa, Homo sapiens
  MOD_RES (52)..(52): Selenocysteine
  MOD_RES (59)..(59): Selenocysteine
  MOD_RES (73)..(74): Selenocysteine
  MOD_RES (104)..(104): Selenocysteine
  MOD_RES (111)..(113): Selenocysteine
  MOD_RES (133)..(133): Selenocysteine
  MOD_RES (176)..(176): Selenocysteine
  MOD_RES (205)..(205): Selenocysteine
  MOD_RES (219)..(219): Selenocysteine
  MOD_RES (231)..(231): Selenocysteine
  MOD_RES (235)..(235): Selenocysteine
  MOD_RES (256)..(256): Selenocysteine
  MOD_RES (270)..(270): Selenocysteine
  MOD_RES (275)..(275): Selenocysteine
  MOD_RES (308)..(308): Selenocysteine
  MOD_RES (323)..(323): Selenocysteine
  MOD_RES (328)..(328): Selenocysteine
  MOD_RES (339)..(339): Selenocysteine
  MOD_RES (353)..(353): Selenocysteine
  MOD_RES (382)..(383): Selenocysteine
  MOD_RES (385)..(385): Selenocysteine
  MOD_RES (404)..(404): Selenocysteine
  MOD_RES (417)..(417): Selenocysteine
  MOD_RES (451)..(451): Selenocysteine
  MOD_RES (464)..(464): Selenocysteine
  MOD_RES (511)..(511): Selenocysteine
  MOD_RES (526)..(526): Selenocysteine
  MOD_RES (532)..(532): Selenocysteine
  MOD_RES (537)..(537): Selenocysteine
  MOD_RES (545)..(545): Selenocysteine
  MOD_RES (568)..(568): Selenocysteine
  MOD_RES (582)..(582): Selenocysteine
  MOD_RES (587)..(588): Selenocysteine
  MOD_RES (601)..(601): Selenocysteine
  MOD_RES (616)..(617): Selenocysteine
  MOD_RES (633)..(633): Selenocysteine
  MOD_RES (660)..(660): Selenocysteine
  MOD_RES (667)..(667): Selenocysteine
  MOD_RES (670)..(671): Selenocysteine
  MOD_RES (675)..(675): Selenocysteine
  MOD_RES (695)..(695): Selenocysteine
  MOD_RES (699)..(699): Selenocysteine
  MOD_RES (701)..(701): Selenocysteine
  MOD_RES (719)..(719): Selenocysteine
  MOD_RES (721)..(721): Selenocysteine
  MOD_RES (734)..(734): Selenocysteine
  MOD_RES (745)..(745): Selenocysteine
  MOD_RES (749)..(749): Selenocysteine
  MOD_RES (756)..(756): Selenocysteine
  MOD_RES (763)..(763): Selenocysteine
  MOD_RES (767)..(767): Selenocysteine
  MOD_RES (772)..(772): Selenocysteine
  MOD_RES (775)..(775): Selenocysteine
  MOD_RES (784)..(784): Selenocysteine
MIPFLPMFSLLLLLIVNPINANNHYDKILAHSRIRGRDQGPNVCALQQILGXKKKYFSXCKNWYKKSICGQKXXVLYECCPGYMRMEGMKGCPAVLPIDHVYGXLGIVGAXXXQRYSDASKLREEIEGKGSFXYFAPSNEAWDNLDSDIRRGLESNVNVELLNALHSHMINKRMLXKDLKNGMIIPSMYNNLGLFINHYPNGVVXVNCARIIHGNQIAXNGVVHVIDRVLXQIGXSIQDFIEAEDDLSSFRAAAIXSDILEALGRDGHFXLFAPXNEAFEKLPRGVLERIMGDKVASEALMKYHILNXLQCSESIMGGAVFEXLEGNXIEIGCDGDSIXVNGIKMVNKKDIVXNNGVIHLIDQVLIPDSAKQVIELAGKQQXXFXDLVAQLGLASALRPDGEYXLLAPVNNAFSDDXLSMDQRLLKLILQNHILKVKVGLNELYNGQILEXIGGKQLRVFVYRXAVCIENSCMEKGSKQGRNGAIHIFREIIKPAEKSLHEKLKQDKRFSXFLSLLEAADLKELLXQPGDWXLFVPXNDAFKGMXSEEKEILIRDKNALQNIILYHLXPGVFIGKGFEPGVXNILKXXQGSKIFLKEVNDXLLVNELKSKESDIMXXNGVIHVVDKLLYPADXPVGNDQLLEILNKLIKYIQIKFVRGSXFKEIPVXVYXXKIIXKVVEPKIKVIEGSLQPIIKXEGPXLXKVKIEGEPEFRLIKEGEXIXEVIHGEPIIKKYXKIIDGVPVEIXEKEXREERIIXGPEIKYXRISXGGGEXEEXLKKLLQEDXPVRKLQANKKVQGSRRRLREGRSQ

SEQ ID NO: 20842 - protein, 809 aa, Homo sapiens
  MOD_RES (52)..(52): Selenocysteine
  MOD_RES (59)..(59): Selenocysteine
  MOD_RES (73)..(74): Selenocysteine
  MOD_RES (104)..(104): Selenocysteine
  MOD_RES (111)..(113): Selenocysteine
  MOD_RES (133)..(133): Selenocysteine
  MOD_RES (176)..(176): Selenocysteine
  MOD_RES (205)..(205): Selenocysteine
  MOD_RES (219)..(219): Selenocysteine
  MOD_RES (231)..(231): Selenocysteine
  MOD_RES (235)..(235): Selenocysteine
  MOD_RES (256)..(256): Selenocysteine
  MOD_RES (270)..(270): Selenocysteine
  MOD_RES (275)..(275): Selenocysteine
  MOD_RES (308)..(308): Selenocysteine
  MOD_RES (323)..(323): Selenocysteine
  MOD_RES (328)..(328): Selenocysteine
  MOD_RES (339)..(339): Selenocysteine
  MOD_RES (353)..(353): Selenocysteine
  MOD_RES (382)..(383): Selenocysteine
  MOD_RES (385)..(385): Selenocysteine
  MOD_RES (404)..(404): Selenocysteine
  MOD_RES (417)..(417): Selenocysteine
  MOD_RES (451)..(451): Selenocysteine
  MOD_RES (464)..(464): Selenocysteine
  MOD_RES (511)..(511): Selenocysteine
  MOD_RES (526)..(526): Selenocysteine
  MOD_RES (532)..(532): Selenocysteine
  MOD_RES (537)..(537): Selenocysteine
  MOD_RES (545)..(545): Selenocysteine
  MOD_RES (568)..(568): Selenocysteine
  MOD_RES (582)..(582): Selenocysteine
  MOD_RES (587)..(588): Selenocysteine
  MOD_RES (601)..(601): Selenocysteine
  MOD_RES (616)..(617): Selenocysteine
  MOD_RES (633)..(633): Selenocysteine
  MOD_RES (660)..(660): Selenocysteine
  MOD_RES (667)..(667): Selenocysteine
  MOD_RES (672)..(672): Selenocysteine
  MOD_RES (674)..(674): Selenocysteine
  MOD_RES (692)..(692): Selenocysteine
  MOD_RES (694)..(694): Selenocysteine
  MOD_RES (707)..(707): Selenocysteine
  MOD_RES (718)..(718): Selenocysteine
  MOD_RES (722)..(722): Selenocysteine
  MOD_RES (729)..(729): Selenocysteine
  MOD_RES (736)..(736): Selenocysteine
  MOD_RES (740)..(740): Selenocysteine
  MOD_RES (745)..(745): Selenocysteine
  MOD_RES (748)..(748): Selenocysteine
  MOD_RES (758)..(758): Selenocysteine
  MOD_RES (761)..(761): Selenocysteine
  MOD_RES (785)..(785): Selenocysteine
MIPFLPMFSLLLLLIVNPINANNHYDKILAHSRIRGRDQGPNVCALQQILGXKKKYFSXCKNWYKKSICGQKXXVLYECCPGYMRMEGMKGCPAVLPIDHVYGXLGIVGAXXXQRYSDASKLREEIEGKGSFXYFAPSNEAWDNLDSDIRRGLESNVNVELLNALHSHMINKRMLXKDLKNGMIIPSMYNNLGLFINHYPNGVVXVNCARIIHGNQIAXNGVVHVIDRVLXQIGXSIQDFIEAEDDLSSFRAAAIXSDILEALGRDGHFXLFAPXNEAFEKLPRGVLERIMGDKVASEALMKYHILNXLQCSESIMGGAVFEXLEGNXIEIGCDGDSIXVNGIKMVNKKDIVXNNGVIHLIDQVLIPDSAKQVIELAGKQQXXFXDLVAQLGLASALRPDGEYXLLAPVNNAFSDDXLSMDQRLLKLILQNHILKVKVGLNELYNGQILEXIGGKQLRVFVYRXAVCIENSCMEKGSKQGRNGAIHIFREIIKPAEKSLHEKLKQDKRFSXFLSLLEAADLKELLXQPGDWXLFVPXNDAFKGMXSEEKEILIRDKNALQNIILYHLXPGVFIGKGFEPGVXNILKXXQGSKIFLKEVNDXLLVNELKSKESDIMXXNGVIHVVDKLLYPADXPVGNDQLLEILNKLIKYIQIKFVRGSXFKEIPVXVYRPXLXKVKIEGEPEFRLIKEGEXIXEVIHGEPIIKKYXKIIDGVPVEIXEKEXREERIIXGPEIKYXRISXGGGEXEEXLKKLLQEEVXKVXKFIEGGDGHLFEDEEIKRLLQGDXPVRKLQANKKVQGSRRRLREGRSQ

SEQ ID NO: 20843 - protein, 836 aa, Homo sapiens
  MOD_RES (52)..(52): Selenocysteine
  MOD_RES (59)..(59): Selenocysteine
  MOD_RES (73)..(74): Selenocysteine
  MOD_RES (104)..(104): Selenocysteine
  MOD_RES (111)..(113): Selenocysteine
  MOD_RES (133)..(133): Selenocysteine
  MOD_RES (176)..(176): Selenocysteine
  MOD_RES (205)..(205): Selenocysteine
  MOD_RES (219)..(219): Selenocysteine
  MOD_RES (231)..(231): Selenocysteine
  MOD_RES (235)..(235): Selenocysteine
  MOD_RES (256)..(256): Selenocysteine
  MOD_RES (270)..(270): Selenocysteine
  MOD_RES (275)..(275): Selenocysteine
  MOD_RES (308)..(308): Selenocysteine
  MOD_RES (323)..(323): Selenocysteine
  MOD_RES (328)..(328): Selenocysteine
  MOD_RES (339)..(339): Selenocysteine
  MOD_RES (353)..(353): Selenocysteine
  MOD_RES (382)..(383): Selenocysteine
  MOD_RES (385)..(385): Selenocysteine
  MOD_RES (404)..(404): Selenocysteine
  MOD_RES (417)..(417): Selenocysteine
  MOD_RES (451)..(451): Selenocysteine
  MOD_RES (464)..(464): Selenocysteine
  MOD_RES (511)..(511): Selenocysteine
  MOD_RES (526)..(526): Selenocysteine
  MOD_RES (532)..(532): Selenocysteine
  MOD_RES (537)..(537): Selenocysteine
  MOD_RES (545)..(545): Selenocysteine
  MOD_RES (568)..(568): Selenocysteine
  MOD_RES (582)..(582): Selenocysteine
  MOD_RES (587)..(588): Selenocysteine
  MOD_RES (601)..(601): Selenocysteine
  MOD_RES (616)..(617): Selenocysteine
  MOD_RES (633)..(633): Selenocysteine
  MOD_RES (660)..(660): Selenocysteine
  MOD_RES (667)..(667): Selenocysteine
  MOD_RES (670)..(671): Selenocysteine
  MOD_RES (675)..(675): Selenocysteine
  MOD_RES (695)..(695): Selenocysteine
  MOD_RES (699)..(699): Selenocysteine
  MOD_RES (701)..(701): Selenocysteine
  MOD_RES (719)..(719): Selenocysteine
  MOD_RES (721)..(721): Selenocysteine
  MOD_RES (734)..(734): Selenocysteine
  MOD_RES (745)..(745): Selenocysteine
  MOD_RES (749)..(749): Selenocysteine
  MOD_RES (756)..(756): Selenocysteine
  MOD_RES (763)..(763): Selenocysteine
  MOD_RES (767)..(767): Selenocysteine
  MOD_RES (772)..(772): Selenocysteine
  MOD_RES (775)..(775): Selenocysteine
  MOD_RES (785)..(785): Selenocysteine
  MOD_RES (788)..(788): Selenocysteine
  MOD_RES (812)..(812): Selenocysteine
MIPFLPMFSLLLLLIVNPINANNHYDKILAHSRIRGRDQGPNVCALQQILGXKKKYFSXCKNWYKKSICGQKXXVLYECCPGYMRMEGMKGCPAVLPIDHVYGXLGIVGAXXXQRYSDASKLREEIEGKGSFXYFAPSNEAWDNLDSDIRRGLESNVNVELLNALHSHMINKRMLXKDLKNGMIIPSMYNNLGLFINHYPNGVVXVNCARIIHGNQIAXNGVVHVIDRVLXQIGXSIQDFIEAEDDLSSFRAAAIXSDILEALGRDGHFXLFAPXNEAFEKLPRGVLERIMGDKVASEALMKYHILNXLQCSESIMGGAVFEXLEGNXIEIGCDGDSIXVNGIKMVNKKDIVXNNGVIHLIDQVLIPDSAKQVIELAGKQQXXFXDLVAQLGLASALRPDGEYXLLAPVNNAFSDDXLSMDQRLLKLILQNHILKVKVGLNELYNGQILEXIGGKQLRVFVYRXAVCIENSCMEKGSKQGRNGAIHIFREIIKPAEKSLHEKLKQDKRFSXFLSLLEAADLKELLXQPGDWXLFVPXNDAFKGMXSEEKEILIRDKNALQNIILYHLXPGVFIGKGFEPGVXNILKXXQGSKIFLKEVNDXLLVNELKSKESDIMXXNGVIHVVDKLLYPADXPVGNDQLLEILNKLIKYIQIKFVRGSXFKEIPVXVYXXKIIXKVVEPKIKVIEGSLQPIIKXEGPXLXKVKIEGEPEFRLIKEGEXIXEVIHGEPIIKKYXKIIDGVPVEIXEKEXREERIIXGPEIKYXRISXGGGEXEEXLKKLLQEEVXKVXKFIEGGDGHLFEDEEIKRLLQGDXPVRKLQANKKVQGSRRRLREGRSQ

SEQ ID NO: 20844 - protein, 169 aa, Homo sapiens
  MOD_RES (7)..(7): Selenocysteine
  MOD_RES (11)..(11): Selenocysteine
  MOD_RES (22)..(22): Selenocysteine
  MOD_RES (42)..(42): Selenocysteine
  MOD_RES (47)..(47): Selenocysteine
  MOD_RES (49)..(49): Selenocysteine
  MOD_RES (66)..(66): Selenocysteine
  MOD_RES (75)..(75): Selenocysteine
  MOD_RES (85)..(85): Selenocysteine
  MOD_RES (103)..(103): Selenocysteine
  MOD_RES (157)..(157): Selenocysteine
MSCQAFXSADXFIPLNSDASAXLPLIMHHSAAECLPVSNHAXNVMSXAXGLHYSVPSCHYGNQPSXYGVMAGSLXPCLYKFPDHXLSHGFPPIHQPLLAEDPXAADFKQELRRKSKLVEEPIDMDSPEIRELEKFANEFKVRRIKLALLLKMLWRDXLENRINLLLKRS

SEQ ID NO: 20845 - protein, 291 aa, Homo sapiens
  MOD_RES (7)..(7): Selenocysteine
  MOD_RES (11)..(11): Selenocysteine
  MOD_RES (22)..(22): Selenocysteine
  MOD_RES (42)..(42): Selenocysteine
  MOD_RES (47)..(47): Selenocysteine
  MOD_RES (49)..(49): Selenocysteine
  MOD_RES (66)..(66): Selenocysteine
  MOD_RES (75)..(75): Selenocysteine
  MOD_RES (85)..(85): Selenocysteine
  MOD_RES (103)..(103): Selenocysteine
  MOD_RES (149)..(149): Selenocysteine
  MOD_RES (151)..(151): Selenocysteine
  MOD_RES (168)..(169): Selenocysteine
  MOD_RES (219)..(220): Selenocysteine
  MOD_RES (274)..(274): Selenocysteine
MSCQAFXSADXFIPLNSDASAXLPLIMHHSAAECLPVSNHAXNVMSXAXGLHYSVPSCHYGNQPSXYGVMAGSLXPCLYKFPDHXLSHGFPPIHQPLLAEDPXAADFKQELRRKSKLVEEPIDMDSPEIRELEKFANEFKVRRIKLGYXQXNVGEALAAVHGSEFSQXXICRFENLQLSFKNACKLKAILSKWLEEAEQVGALYNEKVGANERKRKRRXXISIAAKDALERHFGEQNKPSSQEIMRMAEELNLEKEVVRVWFCNRRQREKRVKXSLNQSLFSISKEHLECR

SEQ ID NO: 20846 - protein, 216 aa, Homo sapiens
  MOD_RES (7)..(7): Selenocysteine
  MOD_RES (11)..(11): Selenocysteine
  MOD_RES (22)..(22): Selenocysteine
  MOD_RES (42)..(42): Selenocysteine
  MOD_RES (47)..(47): Selenocysteine
  MOD_RES (49)..(49): Selenocysteine
  MOD_RES (66)..(66): Selenocysteine
  MOD_RES (74)..(74): Selenocysteine
  MOD_RES (76)..(76): Selenocysteine
  MOD_RES (93)..(94): Selenocysteine
  MOD_RES (144)..(145): Selenocysteine
  MOD_RES (199)..(199): Selenocysteine
MSCQAFXSADXFIPLNSDASAXLPLIMHHSAAECLPVSNHAXNVMSXAXGLHYSVPSCHYGNQPSXYGVMAGYXQXNVGEALAAVHGSEFSQXXICRFENLQLSFKNACKLKAILSKWLEEAEQVGALYNEKVGANERKRKRRXXISIAAKDALERHFGEQNKPSSQEIMRMAEELNLEKEVVRVWFCNRRQREKRVKXSLNQSLFSISKEHLECR

SEQ ID NO: 20847 - protein, 317 aa, Homo sapiens
  MOD_RES (7)..(7): Selenocysteine
  MOD_RES (11)..(11): Selenocysteine
  MOD_RES (22)..(22): Selenocysteine
  MOD_RES (42)..(42): Selenocysteine
  MOD_RES (47)..(47): Selenocysteine
  MOD_RES (57)..(57): Selenocysteine
  MOD_RES (63)..(63): Selenocysteine
  MOD_RES (68)..(69): Selenocysteine
  MOD_RES (73)..(73): Selenocysteine
  MOD_RES (75)..(75): Selenocysteine
  MOD_RES (92)..(92): Selenocysteine
  MOD_RES (101)..(101): Selenocysteine
  MOD_RES (111)..(111): Selenocysteine
  MOD_RES (129)..(129): Selenocysteine
  MOD_RES (175)..(175): Selenocysteine
  MOD_RES (177)..(177): Selenocysteine
  MOD_RES (194)..(195): Selenocysteine
  MOD_RES (245)..(246): Selenocysteine
  MOD_RES (300)..(300): Selenocysteine
MSCQAFXSADXFIPLNSDASAXLPLIMHHSAAECLPVSNHAXNVMSXVPSILSLIQXPKCLCXHFSVXXLGNXAXGLHYSVPSCHYGNQPSXYGVMAGSLXPCLYKFPDHXLSHGFPPIHQPLLAEDPXAADFKQELRRKSKLVEEPIDMDSPEIRELEKFANEFKVRRIKLGYXQXNVGEALAAVHGSEFSQXXICRFENLQLSFKNACKLKAILSKWLEEAEQVGALYNEKVGANERKRKRRXXISIAAKDALERHFGEQNKPSSQEIMRMAEELNLEKEVVRVWFCNRRQREKRVKXSLNQSLFSISKEHLECR

SEQ ID NO: 20848 - protein, 703 aa, Homo sapiens
  MOD_RES (30)..(30): Selenocysteine
  MOD_RES (42)..(42): Selenocysteine
  MOD_RES (44)..(44): Selenocysteine
  MOD_RES (46)..(46): Selenocysteine
  MOD_RES (64)..(64): Selenocysteine
  MOD_RES (82)..(82): Selenocysteine
  MOD_RES (123)..(123): Selenocysteine
  MOD_RES (133)..(133): Selenocysteine
  MOD_RES (158)..(159): Selenocysteine
  MOD_RES (171)..(171): Selenocysteine
  MOD_RES (186)..(186): Selenocysteine
  MOD_RES (204)..(204): Selenocysteine
  MOD_RES (206)..(206): Selenocysteine
  MOD_RES (211)..(211): Selenocysteine
  MOD_RES (213)..(213): Selenocysteine
  MOD_RES (215)..(215): Selenocysteine
  MOD_RES (219)..(219): Selenocysteine
  MOD_RES (223)..(223): Selenocysteine
  MOD_RES (230)..(230): Selenocysteine
  MOD_RES (236)..(236): Selenocysteine
  MOD_RES (254)..(254): Selenocysteine
  MOD_RES (265)..(265): Selenocysteine
  MOD_RES (284)..(285): Selenocysteine
  MOD_RES (344)..(344): Selenocysteine
  MOD_RES (348)..(348): Selenocysteine
  MOD_RES (365)..(365): Selenocysteine
  MOD_RES (370)..(370): Selenocysteine
  MOD_RES (405)..(405): Selenocysteine
  MOD_RES (418)..(418): Selenocysteine
  MOD_RES (423)..(424): Selenocysteine
  MOD_RES (429)..(429): Selenocysteine
  MOD_RES (434)..(435): Selenocysteine
  MOD_RES (437)..(437): Selenocysteine
  MOD_RES (445)..(445): Selenocysteine
  MOD_RES (450)..(450): Selenocysteine
  MOD_RES (455)..(455): Selenocysteine
  MOD_RES (457)..(457): Selenocysteine
  MOD_RES (460)..(461): Selenocysteine
  MOD_RES (465)..(465): Selenocysteine
  MOD_RES (467)..(467): Selenocysteine
  MOD_RES (471)..(471): Selenocysteine
  MOD_RES (480)..(480): Selenocysteine
  MOD_RES (494)..(494): Selenocysteine
  MOD_RES (503)..(503): Selenocysteine
  MOD_RES (505)..(506): Selenocysteine
  MOD_RES (508)..(509): Selenocysteine
  MOD_RES (511)..(511): Selenocysteine
  MOD_RES (519)..(519): Selenocysteine
  MOD_RES (525)..(525): Selenocysteine
  MOD_RES (531)..(531): Selenocysteine
  MOD_RES (581)..(581): Selenocysteine
  MOD_RES (595)..(595): Selenocysteine
  MOD_RES (598)..(598): Selenocysteine
  MOD_RES (611)..(611): Selenocysteine
  MOD_RES (616)..(616): Selenocysteine
  MOD_RES (632)..(632): Selenocysteine
  MOD_RES (646)..(646): Selenocysteine
  MOD_RES (672)..(672): Selenocysteine
  MOD_RES (674)..(674): Selenocysteine
  MOD_RES (685)..(685): Selenocysteine
  MOD_RES (695)..(698): Selenocysteine
MADGGAASQDESSAAAAAAADSRMNNPSEXSKPSMESGDGNXGXQXNGLDFQKQPVPVGGAISXAQAQAFLGHLHQVQLAGXSLQAAAQSLNVQSKSNEESGDSQQPSQPSQQPSVQAAIPQXQLMLAGGQIXGDLQQLQQLQQQNLNLQQFVLVHPXXNLQPAQFIISQXPQGQQGLLQAQNLLXQLPQQSQANLLQSQPSIXLXSQPAXPXRXIAAXPIQXLPQSQSXPKRIDXPSLEEPSDLEELEQFAKXFKQRRIKLGFXQGDVGLAMGKLYGNDFSQXXISRFEALNLSFKNMCKLKPLLEKWLNDAENLSSDSSLSSPSALNSPGIEGLSRRRKKRXSIEXNIRVALEKSFLENQKPXSEEIXMIADQLNMEKEVIRVWFCNRRQKEKRINPPSSGGXSSSPIKAIFPSPXSLVAXXPSLVXSSAAXXLXVSPVLPLXSAAVXNLSVXGXSDXXSNNXAXVISXAPPASSAVXSPSLSPSPSASASXSEASSASEXSXXQXXSXPLSSPLGXSQVMVXASGLQXAAAAALQGAAQLPANASLAAMAAAAGLNPSLMAPSQFAAGGALLSLNPGXLSGALSPALMSNSXLAXIQALASGGSLPIXSLDAXGNLVFANAGGAPNIVXAPLFLNPQNLSLLXSNPVSLVSAAAASAGNSAPVASLHAXSXSAESIQNSLFXVASASGAASXXXXASKAQ

SEQ ID NO: 20849 - protein, 766 aa, Homo sapiens
  MOD_RES (30)..(30): Selenocysteine
  MOD_RES (42)..(42): Selenocysteine
  MOD_RES (44)..(44): Selenocysteine
  MOD_RES (46)..(46): Selenocysteine
  MOD_RES (64)..(64): Selenocysteine
  MOD_RES (82)..(82): Selenocysteine
  MOD_RES (123)..(123): Selenocysteine
  MOD_RES (133)..(133): Selenocysteine
  MOD_RES (136)..(136): Selenocysteine
  MOD_RES (138)..(138): Selenocysteine
  MOD_RES (175)..(175): Selenocysteine
  MOD_RES (182)..(182): Selenocysteine
  MOD_RES (185)..(185): Selenocysteine
  MOD_RES (221)..(222): Selenocysteine
  MOD_RES (234)..(234): Selenocysteine
  MOD_RES (249)..(249): Selenocysteine
  MOD_RES (267)..(267): Selenocysteine
  MOD_RES (269)..(269): Selenocysteine
  MOD_RES (274)..(274): Selenocysteine
  MOD_RES (276)..(276): Selenocysteine
  MOD_RES (278)..(278): Selenocysteine
  MOD_RES (282)..(282): Selenocysteine
  MOD_RES (286)..(286): Selenocysteine
  MOD_RES (293)..(293): Selenocysteine
  MOD_RES (299)..(299): Selenocysteine
  MOD_RES (317)..(317): Selenocysteine
  MOD_RES (328)..(328): Selenocysteine
  MOD_RES (347)..(348): Selenocysteine
  MOD_RES (407)..(407): Selenocysteine
  MOD_RES (411)..(411): Selenocysteine
  MOD_RES (428)..(428): Selenocysteine
  MOD_RES (433)..(433): Selenocysteine
  MOD_RES (468)..(468): Selenocysteine
  MOD_RES (481)..(481): Selenocysteine
  MOD_RES (486)..(487): Selenocysteine
  MOD_RES (492)..(492): Selenocysteine
  MOD_RES (497)..(498): Selenocysteine
  MOD_RES (500)..(500): Selenocysteine
  MOD_RES (508)..(508): Selenocysteine
  MOD_RES (513)..(513): Selenocysteine
  MOD_RES (518)..(518): Selenocysteine
  MOD_RES (520)..(520): Selenocysteine
  MOD_RES (523)..(524): Selenocysteine
  MOD_RES (528)..(528): Selenocysteine
  MOD_RES (530)..(530): Selenocysteine
  MOD_RES (534)..(534): Selenocysteine
  MOD_RES (543)..(543): Selenocysteine
  MOD_RES (557)..(557): Selenocysteine
  MOD_RES (566)..(566): Selenocysteine
  MOD_RES (568)..(569): Selenocysteine
  MOD_RES (571)..(572): Selenocysteine
  MOD_RES (574)..(574): Selenocysteine
  MOD_RES (582)..(582): Selenocysteine
  MOD_RES (588)..(588): Selenocysteine
  MOD_RES (594)..(594): Selenocysteine
  MOD_RES (644)..(644): Selenocysteine
  MOD_RES (658)..(658): Selenocysteine
  MOD_RES (661)..(661): Selenocysteine
  MOD_RES (674)..(674): Selenocysteine
  MOD_RES (679)..(679): Selenocysteine
  MOD_RES (695)..(695): Selenocysteine
  MOD_RES (709)..(709): Selenocysteine
  MOD_RES (735)..(735): Selenocysteine
  MOD_RES (737)..(737): Selenocysteine
  MOD_RES (748)..(748): Selenocysteine
  MOD_RES (758)..(761): Selenocysteine
MADGGAASQDESSAAAAAAADSRMNNPSEXSKPSMESGDGNXGXQXNGLDFQKQPVPVGGAISXAQAQAFLGHLHQVQLAGXSLQAAAQSLNVQSKSNEESGDSQQPSQPSQQPSVQAAIPQXQLMLAGGQIXGLXLXPAQQQLLLQQAQAQAQLLAAAVQQHSASQQHSAAGAXISASAAXPMXQIPLSQPIQIAQDLQQLQQLQQQNLNLQQFVLVHPXXNLQPAQFIISQXPQGQQGLLQAQNLLXQLPQQSQANLLQSQPSIXLXSQPAXPXRXIAAXPIQXLPQSQSXPKRIDXPSLEEPSDLEELEQFAKXFKQRRIKLGFXQGDVGLAMGKLYGNDFSQXXISRFEALNLSFKNMCKLKPLLEKWLNDAENLSSDSSLSSPSALNSPGIEGLSRRRKKRXSIEXNIRVALEKSFLENQKPXSEEIXMIADQLNMEKEVIRVWFCNRRQKEKRINPPSSGGXSSSPIKAIFPSPXSLVAXXPSLVXSSAAXXLXVSPVLPLXSAAVXNLSVXGXSDXXSNNXAXVISXAPPASSAVXSPSLSPSPSASASXSEASSASEXSXXQXXSXPLSSPLGXSQVMVXASGLQXAAAAALQGAAQLPANASLAAMAAAAGLNPSLMAPSQFAAGGALLSLNPGXLSGALSPALMSNSXLAXIQALASGGSLPIXSLDAXGNLVFANAGGAPNIVXAPLFLNPQNLSLLXSNPVSLVSAAAASAGNSAPVASLHAXSXSAESIQNSLFXVASASGAASXXXXASKAQ

SEQ ID NO: 20850 - protein, 57 aa, Homo sapiens
  MOD_RES (34)..(34): Selenocysteine
  MOD_RES (55)..(55): Selenocysteine
MADGGAASQDESSAAAAAAADWKSKKSFPAFLIXKLLSVFNESVQRKNAVFLYLXQE

SEQ ID NO: 20851 - protein, 60 aa, Homo sapiens
  MOD_RES (34)..(34): Selenocysteine
MADGGAASQDESSAAAAAAADWKSKKSFPAFLIXKLLSVFNESVQRKNAVFLYLVFFHHL

SEQ ID NO: 20852 - protein, 594 aa, Homo sapiens
  MOD_RES (19)..(19): Selenocysteine
  MOD_RES (31)..(31): Selenocysteine
  MOD_RES (33)..(33): Selenocysteine
  MOD_RES (35)..(35): Selenocysteine
  MOD_RES (53)..(53): Selenocysteine
  MOD_RES (71)..(71): Selenocysteine
  MOD_RES (112)..(112): Selenocysteine
  MOD_RES (122)..(122): Selenocysteine
  MOD_RES (125)..(125): Selenocysteine
  MOD_RES (127)..(127): Selenocysteine
  MOD_RES (164)..(164): Selenocysteine
  MOD_RES (171)..(171): Selenocysteine
  MOD_RES (174)..(174): Selenocysteine
  MOD_RES (210)..(211): Selenocysteine
  MOD_RES (223)..(223): Selenocysteine
  MOD_RES (238)..(238): Selenocysteine
  MOD_RES (256)..(256): Selenocysteine
  MOD_RES (258)..(258): Selenocysteine
  MOD_RES (278)..(279): Selenocysteine
  MOD_RES (338)..(338): Selenocysteine
  MOD_RES (342)..(342): Selenocysteine
  MOD_RES (359)..(359): Selenocysteine
  MOD_RES (364)..(364): Selenocysteine
  MOD_RES (399)..(399): Selenocysteine
  MOD_RES (412)..(412): Selenocysteine
  MOD_RES (417)..(418): Selenocysteine
  MOD_RES (423)..(423): Selenocysteine
  MOD_RES (428)..(429): Selenocysteine
  MOD_RES (431)..(431): Selenocysteine
  MOD_RES (439)..(439): Selenocysteine
  MOD_RES (444)..(444): Selenocysteine
  MOD_RES (449)..(449): Selenocysteine
  MOD_RES (451)..(451): Selenocysteine
  MOD_RES (454)..(455): Selenocysteine
  MOD_RES (459)..(459): Selenocysteine
  MOD_RES (461)..(461): Selenocysteine
  MOD_RES (465)..(465): Selenocysteine
  MOD_RES (474)..(474): Selenocysteine
  MOD_RES (488)..(488): Selenocysteine
  MOD_RES (497)..(497): Selenocysteine
  MOD_RES (499)..(500): Selenocysteine
  MOD_RES (502)..(503): Selenocysteine
  MOD_RES (505)..(505): Selenocysteine
  MOD_RES (513)..(513): Selenocysteine
  MOD_RES (519)..(519): Selenocysteine
  MOD_RES (525)..(525): Selenocysteine
  MOD_RES (575)..(575): Selenocysteine
  MOD_RES (589)..(589): Selenocysteine
  MOD_RES (592)..(592): Selenocysteine
MLDCSDYVLDSRMNNPSEXSKPSMESGDGNXGXQXNGLDFQKQPVPVGGAISXAQAQAFLGHLHQVQLAGXSLQAAAQSLNVQSKSNEESGDSQQPSQPSQQPSVQAAIPQXQLMLAGGQIXGLXLXPAQQQLLLQQAQAQAQLLAAAVQQHSASQQHSAAGAXISASAAXPMXQIPLSQPIQIAQDLQQLQQLQQQNLNLQQFVLVHPXXNLQPAQFIISQXPQGQQGLLQAQNLLXQLPQQSQANLLQSQPSIXLXSQGDVGLAMGKLYGNDFSQXXISRFEALNLSFKNMCKLKPLLEKWLNDAENLSSDSSLSSPSALNSPGIEGLSRRRKKRXSIEXNIRVALEKSFLENQKPXSEEIXMIADQLNMEKEVIRVWFCNRRQKEKRINPPSSGGXSSSPIKAIFPSPXSLVAXXPSLVXSSAAXXLXVSPVLPLXSAAVXNLSVXGXSDXXSNNXAXVISXAPPASSAVXSPSLSPSPSASASXSEASSASEXSXXQXXSXPLSSPLGXSQVMVXASGLQXAAAAALQGAAQLPANASLAAMAAAAGLNPSLMAPSQFAAGGALLSLNPGXLSGALSPALMSNSXLAXIQ

SEQ ID NO: 20853 - protein, 755 aa, Homo sapiens
  MOD_RES (19)..(19): Selenocysteine
  MOD_RES (31)..(31): Selenocysteine
  MOD_RES (33)..(33): Selenocysteine
  MOD_RES (35)..(35): Selenocysteine
  MOD_RES (53)..(53): Selenocysteine
  MOD_RES (71)..(71): Selenocysteine
  MOD_RES (112)..(112): Selenocysteine
  MOD_RES (122)..(122): Selenocysteine
  MOD_RES (125)..(125): Selenocysteine
  MOD_RES (127)..(127): Selenocysteine
  MOD_RES (164)..(164): Selenocysteine
  MOD_RES (171)..(171): Selenocysteine
  MOD_RES (174)..(174): Selenocysteine
  MOD_RES (210)..(211): Selenocysteine
  MOD_RES (223)..(223): Selenocysteine
  MOD_RES (238)..(238): Selenocysteine
  MOD_RES (256)..(256): Selenocysteine
  MOD_RES (258)..(258): Selenocysteine
  MOD_RES (263)..(263): Selenocysteine
  MOD_RES (265)..(265): Selenocysteine
  MOD_RES (267)..(267): Selenocysteine
  MOD_RES (271)..(271): Selenocysteine
  MOD_RES (275)..(275): Selenocysteine
  MOD_RES (282)..(282): Selenocysteine
  MOD_RES (288)..(288): Selenocysteine
  MOD_RES (306)..(306): Selenocysteine
  MOD_RES (317)..(317): Selenocysteine
  MOD_RES (336)..(337): Selenocysteine
  MOD_RES (396)..(396): Selenocysteine
  MOD_RES (400)..(400): Selenocysteine
  MOD_RES (417)..(417): Selenocysteine
  MOD_RES (422)..(422): Selenocysteine
  MOD_RES (457)..(457): Selenocysteine
  MOD_RES (470)..(470): Selenocysteine
  MOD_RES (475)..(476): Selenocysteine
  MOD_RES (481)..(481): Selenocysteine
  MOD_RES (486)..(487): Selenocysteine
  MOD_RES (489)..(489): Selenocysteine
  MOD_RES (497)..(497): Selenocysteine
  MOD_RES (502)..(502): Selenocysteine
  MOD_RES (507)..(507): Selenocysteine
  MOD_RES (509)..(509): Selenocysteine
  MOD_RES (512)..(513): Selenocysteine
  MOD_RES (517)..(517): Selenocysteine
  MOD_RES (519)..(519): Selenocysteine
  MOD_RES (523)..(523): Selenocysteine
  MOD_RES (532)..(532): Selenocysteine
  MOD_RES (546)..(546): Selenocysteine
  MOD_RES (555)..(555): Selenocysteine
  MOD_RES (557)..(558): Selenocysteine
  MOD_RES (560)..(561): Selenocysteine
  MOD_RES (563)..(563): Selenocysteine
  MOD_RES (571)..(571): Selenocysteine
  MOD_RES (577)..(577): Selenocysteine
  MOD_RES (583)..(583): Selenocysteine
  MOD_RES (633)..(633): Selenocysteine
  MOD_RES (647)..(647): Selenocysteine
  MOD_RES (650)..(650): Selenocysteine
  MOD_RES (663)..(663): Selenocysteine
  MOD_RES (668)..(668): Selenocysteine
  MOD_RES (684)..(684): Selenocysteine
  MOD_RES (698)..(698): Selenocysteine
  MOD_RES (724)..(724): Selenocysteine
  MOD_RES (726)..(726): Selenocysteine
  MOD_RES (737)..(737): Selenocysteine
  MOD_RES (747)..(750): Selenocysteine
MLDCSDYVLDSRMNNPSEXSKPSMESGDGNXGXQXNGLDFQKQPVPVGGAISXAQAQAFLGHLHQVQLAGXSLQAAAQSLNVQSKSNEESGDSQQPSQPSQQPSVQAAIPQXQLMLAGGQIXGLXLXPAQQQLLLQQAQAQAQLLAAAVQQHSASQQHSAAGAXISASAAXPMXQIPLSQPIQIAQDLQQLQQLQQQNLNLQQFVLVHPXXNLQPAQFIISQXPQGQQGLLQAQNLLXQLPQQSQANLLQSQPSIXLXSQPAXPXRXIAAXPIQXLPQSQSXPKRIDXPSLEEPSDLEELEQFAKXFKQRRIKLGFXQGDVGLAMGKLYGNDFSQXXISRFEALNLSFKNMCKLKPLLEKWLNDAENLSSDSSLSSPSALNSPGIEGLSRRRKKRXSIEXNIRVALEKSFLENQKPXSEEIXMIADQLNMEKEVIRVWFCNRRQKEKRINPPSSGGXSSSPIKAIFPSPXSLVAXXPSLVXSSAAXXLXVSPVLPLXSAAVXNLSVXGXSDXXSNNXAXVISXAPPASSAVXSPSLSPSPSASASXSEASSASEXSXXQXXSXPLSSPLGXSQVMVXASGLQXAAAAALQGAAQLPANASLAAMAAAAGLNPSLMAPSQFAAGGALLSLNPGXLSGALSPALMSNSXLAXIQALASGGSLPIXSLDAXGNLVFANAGGAPNIVXAPLFLNPQNLSLLXSNPVSLVSAAAASAGNSAPVASLHAXSXSAESIQNSLFXVASASGAASXXXXASKAQ

SEQ ID NO: 20854 - protein, 743 aa, Homo sapiens
  MOD_RES (7)..(7): Selenocysteine
  MOD_RES (19)..(19): Selenocysteine
  MOD_RES (21)..(21): Selenocysteine
  MOD_RES (23)..(23): Selenocysteine
  MOD_RES (41)..(41): Selenocysteine
  MOD_RES (59)..(59): Selenocysteine
  MOD_RES (100)..(100): Selenocysteine
  MOD_RES (110)..(110): Selenocysteine
  MOD_RES (113)..(113): Selenocysteine
  MOD_RES (115)..(115): Selenocysteine
  MOD_RES (152)..(152): Selenocysteine
  MOD_RES (159)..(159): Selenocysteine
  MOD_RES (162)..(162): Selenocysteine
  MOD_RES (198)..(199): Selenocysteine
  MOD_RES (211)..(211): Selenocysteine
  MOD_RES (226)..(226): Selenocysteine
  MOD_RES (244)..(244): Selenocysteine
  MOD_RES (246)..(246): Selenocysteine
  MOD_RES (251)..(251): Selenocysteine
  MOD_RES (253)..(253): Selenocysteine
  MOD_RES (255)..(255): Selenocysteine
  MOD_RES (259)..(259): Selenocysteine
  MOD_RES (263)..(263): Selenocysteine
  MOD_RES (270)..(270): Selenocysteine
  MOD_RES (276)..(276): Selenocysteine
  MOD_RES (294)..(294): Selenocysteine
  MOD_RES (305)..(305): Selenocysteine
  MOD_RES (324)..(325): Selenocysteine
  MOD_RES (384)..(384): Selenocysteine
  MOD_RES (388)..(388): Selenocysteine
  MOD_RES (405)..(405): Selenocysteine
  MOD_RES (410)..(410): Selenocysteine
  MOD_RES (445)..(445): Selenocysteine
  MOD_RES (458)..(458): Selenocysteine
  MOD_RES (463)..(464): Selenocysteine
  MOD_RES (469)..(469): Selenocysteine
  MOD_RES (474)..(475): Selenocysteine
  MOD_RES (477)..(477): Selenocysteine
  MOD_RES (485)..(485): Selenocysteine
  MOD_RES (490)..(490): Selenocysteine
  MOD_RES (495)..(495): Selenocysteine
  MOD_RES (497)..(497): Selenocysteine
  MOD_RES (500)..(501): Selenocysteine
  MOD_RES (505)..(505): Selenocysteine
  MOD_RES (507)..(507): Selenocysteine
  MOD_RES (511)..(511): Selenocysteine
  MOD_RES (520)..(520): Selenocysteine
  MOD_RES (534)..(534): Selenocysteine
  MOD_RES (543)..(543): Selenocysteine
  MOD_RES (545)..(546): Selenocysteine
  MOD_RES (548)..(549): Selenocysteine
  MOD_RES (551)..(551): Selenocysteine
  MOD_RES (559)..(559): Selenocysteine
  MOD_RES (565)..(565): Selenocysteine
  MOD_RES (571)..(571): Selenocysteine
  MOD_RES (621)..(621): Selenocysteine
  MOD_RES (635)..(635): Selenocysteine
  MOD_RES (638)..(638): Selenocysteine
  MOD_RES (651)..(651): Selenocysteine
  MOD_RES (656)..(656): Selenocysteine
  MOD_RES (672)..(672): Selenocysteine
  MOD_RES (686)..(686): Selenocysteine
  MOD_RES (712)..(712): Selenocysteine
  MOD_RES (714)..(714): Selenocysteine
  MOD_RES (725)..(725): Selenocysteine
  MOD_RES (735)..(738): Selenocysteine
MNNPSEXSKPSMESGDGNXGXQXNGLDFQKQPVPVGGAISXAQAQAFLGHLHQVQLAGXSLQAAAQSLNVQSKSNEESGDSQQPSQPSQQPSVQAAIPQXQLMLAGGQIXGLXLXPAQQQLLLQQAQAQAQLLAAAVQQHSASQQHSAAGAXISASAAXPMXQIPLSQPIQIAQDLQQLQQLQQQNLNLQQFVLVHPXXNLQPAQFIISQXPQGQQGLLQAQNLLXQLPQQSQANLLQSQPSIXLXSQPAXPXRXIAAXPIQXLPQSQSXPKRIDXPSLEEPSDLEELEQFAKXFKQRRIKLGFXQGDVGLAMGKLYGNDFSQXXISRFEALNLSFKNMCKLKPLLEKWLNDAENLSSDSSLSSPSALNSPGIEGLSRRRKKRXSIEXNIRVALEKSFLENQKPXSEEIXMIADQLNMEKEVIRVWFCNRRQKEKRINPPSSGGXSSSPIKAIFPSPXSLVAXXPSLVXSSAAXXLXVSPVLPLXSAAVXNLSVXGXSDXXSNNXAXVISXAPPASSAVXSPSLSPSPSASASXSEASSASEXSXXQXXSXPLSSPLGXSQVMVXASGLQXAAAAALQGAAQLPANASLAAMAAAAGLNPSLMAPSQFAAGGALLSLNPGXLSGALSPALMSNSXLAXIQALASGGSLPIXSLDAXGNLVFANAGGAPNIVXAPLFLNPQNLSLLXSNPVSLVSAAAASAGNSAPVASLHAXSXSAESIQNSLFXVASASGAASXXXXASKAQ

SEQ ID NO: 20855 - protein, 561 aa, Homo sapiens
  MOD_RES (8)..(8): Selenocysteine
  MOD_RES (18)..(18): Selenocysteine
  MOD_RES (21)..(21): Selenocysteine
  MOD_RES (23)..(23): Selenocysteine
  MOD_RES (60)..(60): Selenocysteine
  MOD_RES (67)..(67): Selenocysteine
  MOD_RES (70)..(70): Selenocysteine
  MOD_RES (106)..(107): Selenocysteine
  MOD_RES (119)..(119): Selenocysteine
  MOD_RES (134)..(134): Selenocysteine
  MOD_RES (152)..(152): Selenocysteine
  MOD_RES (154)..(154): Selenocysteine
  MOD_RES (159)..(159): Selenocysteine
  MOD_RES (161)..(161): Selenocysteine
  MOD_RES (163)..(163): Selenocysteine
  MOD_RES (167)..(167): Selenocysteine
  MOD_RES (171)..(171): Selenocysteine
  MOD_RES (178)..(178): Selenocysteine
  MOD_RES (184)..(184): Selenocysteine
  MOD_RES (202)..(202): Selenocysteine
  MOD_RES (213)..(213): Selenocysteine
  MOD_RES (232)..(233): Selenocysteine
  MOD_RES (292)..(292): Selenocysteine
  MOD_RES (296)..(296): Selenocysteine
  MOD_RES (313)..(313): Selenocysteine
  MOD_RES (318)..(318): Selenocysteine
  MOD_RES (353)..(353): Selenocysteine
  MOD_RES (366)..(366): Selenocysteine
  MOD_RES (371)..(372): Selenocysteine
  MOD_RES (377)..(377): Selenocysteine
  MOD_RES (382)..(383): Selenocysteine
  MOD_RES (385)..(385): Selenocysteine
  MOD_RES (393)..(393): Selenocysteine
  MOD_RES (398)..(398): Selenocysteine
  MOD_RES (403)..(403): Selenocysteine
  MOD_RES (405)..(405): Selenocysteine
  MOD_RES (408)..(409): Selenocysteine
  MOD_RES (413)..(413): Selenocysteine
  MOD_RES (415)..(415): Selenocysteine
  MOD_RES (419)..(419): Selenocysteine
  MOD_RES (428)..(428): Selenocysteine
  MOD_RES (442)..(442): Selenocysteine
  MOD_RES (451)..(451): Selenocysteine
  MOD_RES (453)..(454): Selenocysteine
  MOD_RES (456)..(457): Selenocysteine
  MOD_RES (459)..(459): Selenocysteine
  MOD_RES (467)..(467): Selenocysteine
  MOD_RES (473)..(473): Selenocysteine
  MOD_RES (479)..(479): Selenocysteine
  MOD_RES (529)..(529): Selenocysteine
  MOD_RES (543)..(543): Selenocysteine
  MOD_RES (546)..(546): Selenocysteine
  MOD_RES (559)..(559): Selenocysteine
VQAAIPQXQLMLAGGQIXGLXLXPAQQQLLLQQAQAQAQLLAAAVQQHSASQQHSAAGAXISASAAXPMXQIPLSQPIQIAQDLQQLQQLQQQNLNLQQFVLVHPXXNLQPAQFIISQXPQGQQGLLQAQNLLXQLPQQSQANLLQSQPSIXLXSQPAXPXRXIAAXPIQXLPQSQSXPKRIDXPSLEEPSDLEELEQFAKXFKQRRIKLGFXQGDVGLAMGKLYGNDFSQXXISRFEALNLSFKNMCKLKPLLEKWLNDAENLSSDSSLSSPSALNSPGIEGLSRRRKKRXSIEXNIRVALEKSFLENQKPXSEEIXMIADQLNMEKEVIRVWFCNRRQKEKRINPPSSGGXSSSPIKAIFPSPXSLVAXXPSLVXSSAAXXLXVSPVLPLXSAAVXNLSVXGXSDXXSNNXAXVISXAPPASSAVXSPSLSPSPSASASXSEASSASEXSXXQXXSXPLSSPLGXSQVMVXASGLQXAAAAALQGAAQLPANASLAAMAAAAGLNPSLMAPSQFAAGGALLSLNPGXLSGALSPALMSNSXLAXIQGLLHGLENFLXKN

SEQ ID NO: 20856 - protein, 112 aa, Homo sapiens
  MOD_RES (26)..(26): Selenocysteine
  MOD_RES (28)..(28): Selenocysteine
  MOD_RES (35)..(35): Selenocysteine
  MOD_RES (44)..(44): Selenocysteine
  MOD_RES (52)..(52): Selenocysteine
  MOD_RES (56)..(56): Selenocysteine
  MOD_RES (90)..(90): Selenocysteine
  MOD_RES (110)..(110): Selenocysteine
MGAPEIRMSKPLEAEKQGLDSPSEHXDXERNGPDXNHQNPQNKXSPFSVSPXGPSXKIKAEDPSGDSAPAAPLPPQPAQPHLPQAQLMLXGSQLAGLHEVRLIVVSPEEXEA

SEQ ID NO: 20857 - protein, 116 aa, Homo sapiens
  MOD_RES (19)..(19): Selenocysteine
  MOD_RES (21)..(21): Selenocysteine
  MOD_RES (28)..(28): Selenocysteine
  MOD_RES (37)..(37): Selenocysteine
  MOD_RES (45)..(45): Selenocysteine
  MOD_RES (49)..(49): Selenocysteine
  MOD_RES (83)..(83): Selenocysteine
  MOD_RES (91)..(91): Selenocysteine
MSKPLEAEKQGLDSPSEHXDXERNGPDXNHQNPQNKXSPFSVSPXGPSXKIKAEDPSGDSAPAAPLPPQPAQPHLPQAQLMLXGSQLAGLXALMPAQQQLLLQQAQAQLLAAAVQQ

SEQ ID NO: 20858 - protein, 163 aa, Homo sapiens
  MOD_RES (19)..(19): Selenocysteine
  MOD_RES (21)..(21): Selenocysteine
  MOD_RES (28)..(28): Selenocysteine
  MOD_RES (37)..(37): Selenocysteine
  MOD_RES (45)..(45): Selenocysteine
  MOD_RES (49)..(49): Selenocysteine
  MOD_RES (83)..(83): Selenocysteine
  MOD_RES (91)..(91): Selenocysteine
  MOD_RES (138)..(138): Selenocysteine
  MOD_RES (150)..(150): Selenocysteine
MSKPLEAEKQGLDSPSEHXDXERNGPDXNHQNPQNKXSPFSVSPXGPSXKIKAEDPSGDSAPAAPLPPQPAQPHLPQAQLMLXGSQLAGLXALMPAQQQLLLQQAQAQLLAAAVQQSSAAAAANAAAAAAAASASSSXSSSSSSSASSSXSQPPASSGGGDLP

SEQ ID NO: 20859 - protein, 106 aa, Homo sapiens
  MOD_RES (19)..(19): Selenocysteine
  MOD_RES (21)..(21): Selenocysteine
  MOD_RES (28)..(28): Selenocysteine
  MOD_RES (37)..(37): Selenocysteine
  MOD_RES (45)..(45): Selenocysteine
  MOD_RES (49)..(49): Selenocysteine
  MOD_RES (60)..(60): Selenocysteine
  MOD_RES (105)..(105): Selenocysteine
MSKPLEAEKQGLDSPSEHXDXERNGPDXNHQNPQNKXSPFSVSPXGPSXKVGILSGLHLXFWGPGPCLSPPQIKAEDPSGDSAPAAPLPPQPAQPHLPQAQLMLXG

SEQ ID NO: 20860 - protein, 424 aa, Homo sapiens
  MOD_RES (31)..(31): Selenocysteine
  MOD_RES (33)..(33): Selenocysteine
  MOD_RES (40)..(40): Selenocysteine
  MOD_RES (49)..(49): Selenocysteine
  MOD_RES (57)..(57): Selenocysteine
  MOD_RES (61)..(61): Selenocysteine
  MOD_RES (102)..(102): Selenocysteine
  MOD_RES (112)..(112): Selenocysteine
  MOD_RES (118)..(118): Selenocysteine
  MOD_RES (127)..(127): Selenocysteine
  MOD_RES (154)..(154): Selenocysteine
  MOD_RES (165)..(165): Selenocysteine
  MOD_RES (184)..(185): Selenocysteine
  MOD_RES (215)..(215): Selenocysteine
  MOD_RES (247)..(247): Selenocysteine
  MOD_RES (251)..(251): Selenocysteine
  MOD_RES (268)..(268): Selenocysteine
  MOD_RES (324)..(324): Selenocysteine
  MOD_RES (331)..(331): Selenocysteine
  MOD_RES (343)..(344): Selenocysteine
  MOD_RES (346)..(347): Selenocysteine
  MOD_RES (354)..(354): Selenocysteine
  MOD_RES (360)..(360): Selenocysteine
  MOD_RES (381)..(381): Selenocysteine
  MOD_RES (387)..(388): Selenocysteine
  MOD_RES (391)..(391): Selenocysteine
  MOD_RES (411)..(411): Selenocysteine
MVHSSMGAPEIRMSKPLEAEKQGLDSPSEHXDXERNGPDXNHQNPQNKXSPFSVSPXGPSXKDIQQLLQLQQLVLVPGHHLQPPAQFLLPQAQQSQPGLLPXPNLFQLPQQXQGALLXSQPRAGLPXQPPKCLEPPSHPEEPSDLEELEQFARXFKQRRIKLGFXQGDVGLAMGKLYGNDFSQXXISRFEALNLSFKNMCKLKPLLEKWLNDAEXMSVDSSLPSPNQLSSPSLGFDGLPGRRRKKRXSIEXNVRFALEKSFLANQKPXSEEILLIAEQLHMEKEVIRVWFCNRRQKEKRINPCSAAPMLPSPGKPASYSPHMVXPQGGAGXLPLSQASSSLSXXVXXLSSAVGXLHPSRXAGGGGGGGGAAPPLNSIPSVXPPPPAXXNSXNPSPQGSHSAIGLSGLNPSXGPGLWWNPAPYQP

SEQ ID NO: 20861 - protein, 467 aa, Homo sapiens
  MOD_RES (31)..(31): Selenocysteine
  MOD_RES (33)..(33): Selenocysteine
  MOD_RES (40)..(40): Selenocysteine
  MOD_RES (49)..(49): Selenocysteine
  MOD_RES (57)..(57): Selenocysteine
  MOD_RES (61)..(61): Selenocysteine
  MOD_RES (95)..(95): Selenocysteine
  MOD_RES (141)..(141): Selenocysteine
  MOD_RES (151)..(151): Selenocysteine
  MOD_RES (157)..(157): Selenocysteine
  MOD_RES (166)..(166): Selenocysteine
  MOD_RES (170)..(170): Selenocysteine
  MOD_RES (173)..(173): Selenocysteine
  MOD_RES (209)..(209): Selenocysteine
  MOD_RES (220)..(220): Selenocysteine
  MOD_RES (239)..(240): Selenocysteine
  MOD_RES (270)..(270): Selenocysteine
  MOD_RES (302)..(302): Selenocysteine
  MOD_RES (306)..(306): Selenocysteine
  MOD_RES (323)..(323): Selenocysteine
  MOD_RES (379)..(379): Selenocysteine
  MOD_RES (386)..(386): Selenocysteine
  MOD_RES (398)..(399): Selenocysteine
  MOD_RES (401)..(402): Selenocysteine
  MOD_RES (409)..(409): Selenocysteine
  MOD_RES (415)..(415): Selenocysteine
  MOD_RES (436)..(436): Selenocysteine
  MOD_RES (442)..(443): Selenocysteine
  MOD_RES (446)..(446): Selenocysteine
  MOD_RES (466)..(466): Selenocysteine
MVHSSMGAPEIRMSKPLEAEKQGLDSPSEHXDXERNGPDXNHQNPQNKXSPFSVSPXGPSXKIKAEDPSGDSAPAAPLPPQPAQPHLPQAQLMLXGSQLAGDIQQLLQLQQLVLVPGHHLQPPAQFLLPQAQQSQPGLLPXPNLFQLPQQXQGALLXSQPRAGLPXQAVXRPXLPDPHLSHPQPPKCLEPPSHPEEPSDLEELEQFARXFKQRRIKLGFXQGDVGLAMGKLYGNDFSQXXISRFEALNLSFKNMCKLKPLLEKWLNDAEXMSVDSSLPSPNQLSSPSLGFDGLPGRRRKKRXSIEXNVRFALEKSFLANQKPXSEEILLIAEQLHMEKEVIRVWFCNRRQKEKRINPCSAAPMLPSPGKPASYSPHMVXPQGGAGXLPLSQASSSLSXXVXXLSSAVGXLHPSRXAGGGGGGGGAAPPLNSIPSVXPPPPAXXNSXNPSPQGSHSAIGLSGLNPSXG

SEQ ID NO: 20862 - protein, 479 aa, Homo sapiens
  MOD_RES (31)..(31): Selenocysteine
  MOD_RES (33)..(33): Selenocysteine
  MOD_RES (40)..(40): Selenocysteine
  MOD_RES (49)..(49): Selenocysteine
  MOD_RES (57)..(57): Selenocysteine
  MOD_RES (61)..(61): Selenocysteine
  MOD_RES (95)..(95): Selenocysteine
  MOD_RES (141)..(141): Selenocysteine
  MOD_RES (151)..(151): Selenocysteine
  MOD_RES (157)..(157): Selenocysteine
  MOD_RES (166)..(166): Selenocysteine
  MOD_RES (170)..(170): Selenocysteine
  MOD_RES (173)..(173): Selenocysteine
  MOD_RES (209)..(209): Selenocysteine
  MOD_RES (220)..(220): Selenocysteine
  MOD_RES (239)..(240): Selenocysteine
  MOD_RES (270)..(270): Selenocysteine
  MOD_RES (302)..(302): Selenocysteine
  MOD_RES (306)..(306): Selenocysteine
  MOD_RES (323)..(323): Selenocysteine
  MOD_RES (379)..(379): Selenocysteine
  MOD_RES (386)..(386): Selenocysteine
  MOD_RES (398)..(399): Selenocysteine
  MOD_RES (401)..(402): Selenocysteine
  MOD_RES (409)..(409): Selenocysteine
  MOD_RES (415)..(415): Selenocysteine
  MOD_RES (436)..(436): Selenocysteine
  MOD_RES (442)..(443): Selenocysteine
  MOD_RES (446)..(446): Selenocysteine
  MOD_RES (466)..(466): Selenocysteine
MVHSSMGAPEIRMSKPLEAEKQGLDSPSEHXDXERNGPDXNHQNPQNKXSPFSVSPXGPSXKIKAEDPSGDSAPAAPLPPQPAQPHLPQAQLMLXGSQLAGDIQQLLQLQQLVLVPGHHLQPPAQFLLPQAQQSQPGLLPXPNLFQLPQQXQGALLXSQPRAGLPXQAVXRPXLPDPHLSHPQPPKCLEPPSHPEEPSDLEELEQFARXFKQRRIKLGFXQGDVGLAMGKLYGNDFSQXXISRFEALNLSFKNMCKLKPLLEKWLNDAEXMSVDSSLPSPNQLSSPSLGFDGLPGRRRKKRXSIEXNVRFALEKSFLANQKPXSEEILLIAEQLHMEKEVIRVWFCNRRQKEKRINPCSAAPMLPSPGKPASYSPHMVXPQGGAGXLPLSQASSSLSXXVXXLSSAVGXLHPSRXAGGGGGGGGAAPPLNSIPSVXPPPPAXXNSXNPSPQGSHSAIGLSGLNPSXGPGLWWNPAPYQP

SEQ ID NO: 20863 - protein, 400 aa, Homo sapiens
  MOD_RES (31)..(31): Selenocysteine
  MOD_RES (33)..(33): Selenocysteine
  MOD_RES (40)..(40): Selenocysteine
  MOD_RES (49)..(49): Selenocysteine
  MOD_RES (57)..(57): Selenocysteine
  MOD_RES (61)..(61): Selenocysteine
  MOD_RES (95)..(95): Selenocysteine
  MOD_RES (141)..(141): Selenocysteine
  MOD_RES (151)..(151): Selenocysteine
  MOD_RES (157)..(157): Selenocysteine
  MOD_RES (166)..(166): Selenocysteine
  MOD_RES (193)..(193): Selenocysteine
  MOD_RES (204)..(204): Selenocysteine
  MOD_RES (223)..(224): Selenocysteine
  MOD_RES (254)..(254): Selenocysteine
  MOD_RES (286)..(286): Selenocysteine
  MOD_RES (290)..(290): Selenocysteine
  MOD_RES (307)..(307): Selenocysteine
  MOD_RES (363)..(363): Selenocysteine
  MOD_RES (370)..(370): Selenocysteine
  MOD_RES (382)..(383): Selenocysteine
  MOD_RES (386)..(386): Selenocysteine
  MOD_RES (393)..(393): Selenocysteine
MVHSSMGAPEIRMSKPLEAEKQGLDSPSEHXDXERNGPDXNHQNPQNKXSPFSVSPXGPSXKIKAEDPSGDSAPAAPLPPQPAQPHLPQAQLMLXGSQLAGDIQQLLQLQQLVLVPGHHLQPPAQFLLPQAQQSQPGLLPXPNLFQLPQQXQGALLXSQPRAGLPXQPPKCLEPPSHPEEPSDLEELEQFARXFKQRRIKLGFXQGDVGLAMGKLYGNDFSQXXISRFEALNLSFKNMCKLKPLLEKWLNDAEXMSVDSSLPSPNQLSSPSLGFDGLPGRRRKKRXSIEXNVRFALEKSFLANQKPXSEEILLIAEQLHMEKEVIRVWFCNRRQKEKRINPCSAAPMLPSPGKPASYSPHMVXPQGGAGXLPLSQASSSLSXXAQXPALKAAXRLSACQA

SEQ ID NO: 20864 - protein, 463 aa, Homo sapiens
  MOD_RES (31)..(31): Selenocysteine
  MOD_RES (33)..(33): Selenocysteine
  MOD_RES (40)..(40): Selenocysteine
  MOD_RES (49)..(49): Selenocysteine
  MOD_RES (57)..(57): Selenocysteine
  MOD_RES (61)..(61): Selenocysteine
  MOD_RES (95)..(95): Selenocysteine
  MOD_RES (141)..(141): Selenocysteine
  MOD_RES (151)..(151): Selenocysteine
  MOD_RES (157)..(157): Selenocysteine
  MOD_RES (166)..(166): Selenocysteine
  MOD_RES (193)..(193): Selenocysteine
  MOD_RES (204)..(204): Selenocysteine
  MOD_RES (223)..(224): Selenocysteine
  MOD_RES (254)..(254): Selenocysteine
  MOD_RES (286)..(286): Selenocysteine
  MOD_RES (290)..(290): Selenocysteine
  MOD_RES (307)..(307): Selenocysteine
  MOD_RES (363)..(363): Selenocysteine
  MOD_RES (370)..(370): Selenocysteine
  MOD_RES (382)..(383): Selenocysteine
  MOD_RES (385)..(386): Selenocysteine
  MOD_RES (393)..(393): Selenocysteine
  MOD_RES (399)..(399): Selenocysteine
  MOD_RES (420)..(420): Selenocysteine
  MOD_RES (426)..(427): Selenocysteine
  MOD_RES (430)..(430): Selenocysteine
  MOD_RES (450)..(450): Selenocysteine
MVHSSMGAPEIRMSKPLEAEKQGLDSPSEHXDXERNGPDXNHQNPQNKXSPFSVSPXGPSXKIKAEDPSGDSAPAAPLPPQPAQPHLPQAQLMLXGSQLAGDIQQLLQLQQLVLVPGHHLQPPAQFLLPQAQQSQPGLLPXPNLFQLPQQXQGALLXSQPRAGLPXQPPKCLEPPSHPEEPSDLEELEQFARXFKQRRIKLGFXQGDVGLAMGKLYGNDFSQXXISRFEALNLSFKNMCKLKPLLEKWLNDAEXMSVDSSLPSPNQLSSPSLGFDGLPGRRRKKRXSIEXNVRFALEKSFLANQKPXSEEILLIAEQLHMEKEVIRVWFCNRRQKEKRINPCSAAPMLPSPGKPASYSPHMVXPQGGAGXLPLSQASSSLSXXVXXLSSAVGXLHPSRXAGGGGGGGGAAPPLNSIPSVXPPPPAXXNSXNPSPQGSHSAIGLSGLNPSXGPGLWWNPAPYQP

SEQ ID NO: 20865 - protein, 586 aa, Homo sapiens
  MOD_RES (31)..(31): Selenocysteine
  MOD_RES (33)..(33): Selenocysteine
  MOD_RES (40)..(40): Selenocysteine
  MOD_RES (49)..(49): Selenocysteine
  MOD_RES (57)..(57): Selenocysteine
  MOD_RES (61)..(61): Selenocysteine
  MOD_RES (95)..(95): Selenocysteine
  MOD_RES (141)..(141): Selenocysteine
  MOD_RES (151)..(151): Selenocysteine
  MOD_RES (157)..(157): Selenocysteine
  MOD_RES (166)..(166): Selenocysteine
  MOD_RES (193)..(193): Selenocysteine
  MOD_RES (204)..(204): Selenocysteine
  MOD_RES (223)..(224): Selenocysteine
  MOD_RES (254)..(254): Selenocysteine
  MOD_RES (286)..(286): Selenocysteine
  MOD_RES (290)..(290): Selenocysteine
  MOD_RES (307)..(307): Selenocysteine
  MOD_RES (363)..(363): Selenocysteine
  MOD_RES (370)..(370): Selenocysteine
  MOD_RES (382)..(383): Selenocysteine
  MOD_RES (385)..(386): Selenocysteine
  MOD_RES (393)..(393): Selenocysteine
  MOD_RES (399)..(399): Selenocysteine
  MOD_RES (420)..(420): Selenocysteine
  MOD_RES (426)..(427): Selenocysteine
  MOD_RES (430)..(430): Selenocysteine
  MOD_RES (450)..(450): Selenocysteine
  MOD_RES (453)..(453): Selenocysteine
  MOD_RES (473)..(473): Selenocysteine
  MOD_RES (482)..(482): Selenocysteine
  MOD_RES (486)..(486): Selenocysteine
  MOD_RES (510)..(510): Selenocysteine
  MOD_RES (525)..(525): Selenocysteine
  MOD_RES (564)..(564): Selenocysteine
  MOD_RES (568)..(568): Selenocysteine
  MOD_RES (572)..(572): Selenocysteine
MVHSSMGAPEIRMSKPLEAEKQGLDSPSEHXDXERNGPDXNHQNPQNKXSPFSVSPXGPSXKIKAEDPSGDSAPAAPLPPQPAQPHLPQAQLMLXGSQLAGDIQQLLQLQQLVLVPGHHLQPPAQFLLPQAQQSQPGLLPXPNLFQLPQQXQGALLXSQPRAGLPXQPPKCLEPPSHPEEPSDLEELEQFARXFKQRRIKLGFXQGDVGLAMGKLYGNDFSQXXISRFEALNLSFKNMCKLKPLLEKWLNDAEXMSVDSSLPSPNQLSSPSLGFDGLPGRRRKKRXSIEXNVRFALEKSFLANQKPXSEEILLIAEQLHMEKEVIRVWFCNRRQKEKRINPCSAAPMLPSPGKPASYSPHMVXPQGGAGXLPLSQASSSLSXXVXXLSSAVGXLHPSRXAGGGGGGGGAAPPLNSIPSVXPPPPAXXNSXNPSPQGSHSAIGLSGLNPSXGSXMVGLSSGLSPALMSNNPLAXIQALASGGXLPLXSLDGSGNLVLGAAGAAPGSPGLVXSPLFLNHAGLPLLSXPPGVGLVSAAAAAVAASISSKSPGLSSSSSSSSSSSSSXCSEXAAQXPGGPGGPEAGSKPE

SEQ ID NO: 20866 - protein, 117 aa, Homo sapiens
  MOD_RES (31)..(31): Selenocysteine
  MOD_RES (33)..(33): Selenocysteine
  MOD_RES (40)..(40): Selenocysteine
  MOD_RES (49)..(49): Selenocysteine
  MOD_RES (57)..(57): Selenocysteine
  MOD_RES (61)..(61): Selenocysteine
  MOD_RES (95)..(95): Selenocysteine
  MOD_RES (115)..(115): Selenocysteine
MVHSSMGAPEIRMSKPLEAEKQGLDSPSEHXDXERNGPDXNHQNPQNKXSPFSVSPXGPSXKIKAEDPSGDSAPAAPLPPQPAQPHLPQAQLMLXGSQLAGLHEVRLIVVSPEEXEA

SEQ ID NO: 20867 - protein, 485 aa, Homo sapiens
  MOD_RES (31)..(31): Selenocysteine
  MOD_RES (33)..(33): Selenocysteine
  MOD_RES (40)..(40): Selenocysteine
  MOD_RES (49)..(49): Selenocysteine
  MOD_RES (57)..(57): Selenocysteine
  MOD_RES (61)..(61): Selenocysteine
  MOD_RES (72)..(72): Selenocysteine
  MOD_RES (117)..(117): Selenocysteine
  MOD_RES (163)..(163): Selenocysteine
  MOD_RES (173)..(173): Selenocysteine
  MOD_RES (179)..(179): Selenocysteine
  MOD_RES (188)..(188): Selenocysteine
  MOD_RES (215)..(215): Selenocysteine
  MOD_RES (226)..(226): Selenocysteine
  MOD_RES (245)..(246): Selenocysteine
  MOD_RES (276)..(276): Selenocysteine
  MOD_RES (308)..(308): Selenocysteine
  MOD_RES (312)..(312): Selenocysteine
  MOD_RES (329)..(329): Selenocysteine
  MOD_RES (385)..(385): Selenocysteine
  MOD_RES (392)..(392): Selenocysteine
  MOD_RES (404)..(405): Selenocysteine
  MOD_RES (407)..(408): Selenocysteine
  MOD_RES (415)..(415): Selenocysteine
  MOD_RES (421)..(421): Selenocysteine
  MOD_RES (442)..(442): Selenocysteine
  MOD_RES (448)..(449): Selenocysteine
  MOD_RES (452)..(452): Selenocysteine
  MOD_RES (472)..(472): Selenocysteine
MVHSSMGAPEIRMSKPLEAEKQGLDSPSEHXDXERNGPDXNHQNPQNKXSPFSVSPXGPSXKVGILSGLHLXFWGPGPCLSPPQIKAEDPSGDSAPAAPLPPQPAQPHLPQAQLMLXGSQLAGDIQQLLQLQQLVLVPGHHLQPPAQFLLPQAQQSQPGLLPXPNLFQLPQQXQGALLXSQPRAGLPXQPPKCLEPPSHPEEPSDLEELEQFARXFKQRRIKLGFXQGDVGLAMGKLYGNDFSQXXISRFEALNLSFKNMCKLKPLLEKWLNDAEXMSVDSSLPSPNQLSSPSLGFDGLPGRRRKKRXSIEXNVRFALEKSFLANQKPXSEEILLIAEQLHMEKEVIRVWFCNRRQKEKRINPCSAAPMLPSPGKPASYSPHMVXPQGGAGXLPLSQASSSLSXXVXXLSSAVGXLHPSRXAGGGGGGGGAAPPLNSIPSVXPPPPAXXNSXNPSPQGSHSAIGLSGLNPSXGPGLWWNPAPYQP

SEQ ID NO: 20868 - protein, 618 aa, Homo sapiens
  MOD_RES (27)..(27): Selenocysteine
  MOD_RES (29)..(29): Selenocysteine
  MOD_RES (36)..(36): Selenocysteine
  MOD_RES (45)..(45): Selenocysteine
  MOD_RES (53)..(53): Selenocysteine
  MOD_RES (57)..(57): Selenocysteine
  MOD_RES (68)..(68): Selenocysteine
  MOD_RES (113)..(113): Selenocysteine
  MOD_RES (159)..(159): Selenocysteine
  MOD_RES (169)..(169): Selenocysteine
  MOD_RES (175)..(175): Selenocysteine
  MOD_RES (184)..(184): Selenocysteine
  MOD_RES (211)..(211): Selenocysteine
  MOD_RES (222)..(222): Selenocysteine
  MOD_RES (241)..(242): Selenocysteine
  MOD_RES (272)..(272): Selenocysteine
  MOD_RES (304)..(304): Selenocysteine
  MOD_RES (308)..(308): Selenocysteine
  MOD_RES (325)..(325): Selenocysteine
  MOD_RES (381)..(381): Selenocysteine
  MOD_RES (388)..(388): Selenocysteine
  MOD_RES (400)..(401): Selenocysteine
  MOD_RES (403)..(404): Selenocysteine
  MOD_RES (411)..(411): Selenocysteine
  MOD_RES (417)..(417): Selenocysteine
  MOD_RES (438)..(438): Selenocysteine
  MOD_RES (444)..(445): Selenocysteine
  MOD_RES (448)..(448): Selenocysteine
  MOD_RES (468)..(468): Selenocysteine
  MOD_RES (471)..(471): Selenocysteine
  MOD_RES (491)..(491): Selenocysteine
  MOD_RES (535)..(535): Selenocysteine
  MOD_RES (538)..(538): Selenocysteine
SMGAPEIRMSKPLEAEKQGLDSPSEHXDXERNGPDXNHQNPQNKXSPFSVSPXGPSXKVGILSGLHLXFWGPGPCLSPPQIKAEDPSGDSAPAAPLPPQPAQPHLPQAQLMLXGSQLAGDIQQLLQLQQLVLVPGHHLQPPAQFLLPQAQQSQPGLLPXPNLFQLPQQXQGALLXSQPRAGLPXQPPKCLEPPSHPEEPSDLEELEQFARXFKQRRIKLGFXQGDVGLAMGKLYGNDFSQXXISRFEALNLSFKNMCKLKPLLEKWLNDAEXMSVDSSLPSPNQLSSPSLGFDGLPGRRRKKRXSIEXNVRFALEKSFLANQKPXSEEILLIAEQLHMEKEVIRVWFCNRRQKEKRINPCSAAPMLPSPGKPASYSPHMVXPQGGAGXLPLSQASSSLSXXVXXLSSAVGXLHPSRXAGGGGGGGGAAPPLNSIPSVXPPPPAXXNSXNPSPQGSHSAIGLSGLNPSXGSXMVGLSSGLSPALMSNNPLAXIQGACCLMSHPSSPALSSGASSPAIAAPAMPSCPCSLHCLPLHXHLXFGEGVRGADGGQWDRWGDGGHSGQDAGRQRSPLARHALSPASLSPRQPWPLVEPCPLPALMAAGIWCWGQPVQPRGALAW

SEQ ID NO: 20869 - protein, 320 aa, Homo sapiens
  MOD_RES (10)..(10): Selenocysteine
  MOD_RES (55)..(55): Selenocysteine
  MOD_RES (63)..(63): Selenocysteine
  MOD_RES (110)..(110): Selenocysteine
  MOD_RES (122)..(122): Selenocysteine
  MOD_RES (146)..(146): Selenocysteine
  MOD_RES (150)..(150): Selenocysteine
  MOD_RES (158)..(158): Selenocysteine
  MOD_RES (200)..(200): Selenocysteine
  MOD_RES (210)..(210): Selenocysteine
  MOD_RES (216)..(216): Selenocysteine
  MOD_RES (225)..(225): Selenocysteine
  MOD_RES (229)..(229): Selenocysteine
  MOD_RES (232)..(232): Selenocysteine
  MOD_RES (268)..(268): Selenocysteine
  MOD_RES (279)..(279): Selenocysteine
  MOD_RES (298)..(299): Selenocysteine
VGILSGLHLXFWGPGPCLSPPQIKAEDPSGDSAPAAPLPPQPAQPHLPQAQLMLXGSQLAGLXALMPAQQQLLLQQAQAQLLAAAVQQSSAAAAANAAAAAAAASASSSXSSSSSSSASSSXSQPPASSGGGDLPPPQPASQPPGXPQLXLSQPIQLXAQDIQQLLQLQQLVLVPGHHLQPPAQFLLPQAQQSQPGLLPXPNLFQLPQQXQGALLXSQPRAGLPXQAVXRPXLPDPHLSHPQPPKCLEPPSHPEEPSDLEELEQFARXFKQRRIKLGFXQGDVGLAMGKLYGNDFSQXXISRFEALNLSFKNMCKLKPLL

SEQ ID NO: 20870 - protein, 262 aa, Homo sapiens
  MOD_RES (1)..(1): Any amino acid
  MOD_RES (25)..(25): Selenocysteine
  MOD_RES (27)..(27): Selenocysteine
  MOD_RES (34)..(34): Selenocysteine
  MOD_RES (43)..(43): Selenocysteine
  MOD_RES (51)..(51): Selenocysteine
  MOD_RES (55)..(55): Selenocysteine
  MOD_RES (89)..(89): Selenocysteine
  MOD_RES (135)..(135): Selenocysteine
  MOD_RES (145)..(145): Selenocysteine
  MOD_RES (151)..(151): Selenocysteine
  MOD_RES (160)..(160): Selenocysteine
  MOD_RES (164)..(164): Selenocysteine
  MOD_RES (167)..(167): Selenocysteine
  MOD_RES (203)..(203): Selenocysteine
  MOD_RES (214)..(214): Selenocysteine
  MOD_RES (233)..(234): Selenocysteine
XAPEIRMSKPLEAEKQGLDSPSEHXDXERNGPDXNHQNPQNKXSPFSVSPXGPSXKIKAEDPSGDSAPAAPLPPQPAQPHLPQAQLMLXGSQLAGDIQQLLQLQQLVLVPGHHLQPPAQFLLPQAQQSQPGLLPXPNLFQLPQQXQGALLXSQPRAGLPXQAVXRPXLPDPHLSHPQPPKCLEPPSHPEEPSDLEELEQFARXFKQRRIKLGFXQGDVGLAMGKLYGNDFSQXXISRFEALNLSFKNMCKLKPLLEKWLNDA

SEQ ID NO: 20871 - protein, 198 aa, Homo sapiens
  MOD_RES (1)..(1): Any amino acid
  MOD_RES (17)..(17): Selenocysteine
  MOD_RES (43)..(43): Selenocysteine
  MOD_RES (51)..(51): Selenocysteine
  MOD_RES (65)..(65): Selenocysteine
  MOD_RES (85)..(85): Selenocysteine
  MOD_RES (94)..(94): Selenocysteine
  MOD_RES (98)..(98): Selenocysteine
  MOD_RES (122)..(122): Selenocysteine
  MOD_RES (137)..(137): Selenocysteine
  MOD_RES (176)..(176): Selenocysteine
  MOD_RES (180)..(180): Selenocysteine
  MOD_RES (184)..(184): Selenocysteine
XGSDPRLVLQPAPEGEXHQPLQCGPHAAQPREAGQLQPPYGHXPRGRGDLXVVPSFQQSEHNRSXMVGLSSGLSPALMSNNPLAXIQALASGGXLPLXSLDGSGNLVLGAAGAAPGSPGLVXSPLFLNHAGLPLLSXPPGVGLVSAAAAAVAASISSKSPGLSSSSSSSSSSSSSXCSEXAAQXPGGPGGPEAGSKPE

SEQ ID NO: 20872 - protein, 124 aa, Homo sapiens
  MOD_RES (1)..(1): Any amino acid
  MOD_RES (7)..(7): Selenocysteine
  MOD_RES (11)..(11): Selenocysteine
  MOD_RES (28)..(28): Selenocysteine
  MOD_RES (84)..(84): Selenocysteine
  MOD_RES (91)..(91): Selenocysteine
  MOD_RES (103)..(104): Selenocysteine
XRRKKRXSIEXNVRFALEKSFLANQKPXSEEILLIAEQLHMEKEVIRVWFCNRRQKEKRINPCSAAPMLPSPGKPASYSPHMVXPQGGAGXLPLSQASSSLSXXGQGGQKMVRGDWEDVAQAGA

SEQ ID NO: 20873 - protein, 161 aa, Homo sapiens
  MOD_RES (18)..(19): Selenocysteine
  MOD_RES (58)..(58): Selenocysteine
  MOD_RES (77)..(77): Selenocysteine
  MOD_RES (81)..(81): Selenocysteine
  MOD_RES (86)..(86): Selenocysteine
  MOD_RES (111)..(111): Selenocysteine
  MOD_RES (115)..(115): Selenocysteine
  MOD_RES (117)..(117): Selenocysteine
  MOD_RES (141)..(141): Selenocysteine
GDVGLAMGKLYGNDFSQXXISRFEALNLSFKNMCKLKPLLEKWLNDAESSPSDPSVSXPSSYPSLSEVFGRKRKKRXSIEXNIRLXLEKRFQDVSPSGSLGPLSVPPVHSXMPGXVXSSCSPGNNSRPSSPGSGLHASSPXASQNNSKAAVNSASSFNSSG

SEQ ID NO: 20874 - protein, 438 aa, Homo sapiens
  MOD_RES (6)..(6): Selenocysteine
  MOD_RES (23)..(23): Selenocysteine
  MOD_RES (28)..(28): Selenocysteine
  MOD_RES (49)..(49): Selenocysteine
  MOD_RES (59)..(59): Selenocysteine
  MOD_RES (117)..(117): Selenocysteine
  MOD_RES (143)..(143): Selenocysteine
  MOD_RES (199)..(199): Selenocysteine
  MOD_RES (210)..(210): Selenocysteine
  MOD_RES (229)..(230): Selenocysteine
  MOD_RES (269)..(269): Selenocysteine
  MOD_RES (288)..(288): Selenocysteine
  MOD_RES (292)..(292): Selenocysteine
  MOD_RES (297)..(297): Selenocysteine
  MOD_RES (347)..(347): Selenocysteine
  MOD_RES (376)..(376): Selenocysteine
  MOD_RES (380)..(380): Selenocysteine
  MOD_RES (382)..(382): Selenocysteine
  MOD_RES (406)..(406): Selenocysteine
  MOD_RES (435)..(435): Selenocysteine
MESPRXAKGGRDIKMSGDVADSXDARSXLSQVEPGNDRNGLDFNRQIKXEDLSDSLQQXLSHRPCHLSQGPAMMSGNQMSGLNASPCQDMASLHPLQQLVLVPGHLQSVSQFLLSQXQPGQQGLQPNLLPFPQQQSGLLLPQXGPGLASQAFGHPGLPGSSLEPHLEASQHLPVPKHLPSSGGADEPSDLEELEKFAKXFKQRRIKLGFXQGDVGLAMGKLYGNDFSQXXISRFEALNLSFKNMCKLKPLLEKWLNDAESSPSDPSVSXPSSYPSLSEVFGRKRKKRXSIEXNIRLXLEKRFQDNPKPSSEEISMIAEQLSMEKEVVRVWFCNRRQKEKRINCPVAXPIKPPVYNSRLVSPSGSLGPLSVPPVHSXMPGXVXSSCSPGNNSRPSSPGSGLHASSPXASQNNSKAAVNSASSFNSSGSWYRWNHSXYLH

SEQ ID NO: 20875 - protein, 126 aa, Homo sapiens
  MOD_RES (9)..(9): Selenocysteine
  MOD_RES (21)..(21): Selenocysteine
  MOD_RES (26)..(26): Selenocysteine
  MOD_RES (47)..(47): Selenocysteine
  MOD_RES (57)..(57): Selenocysteine
  MOD_RES (115)..(115): Selenocysteine
  MOD_RES (126)..(126): Selenocysteine
MVNLESMHXDIKMSGDVADSXDARSXLSQVEPGNDRNGLDFNRQIKXEDLSDSLQQXLSHRPCHLSQGPAMMSGNQMSGLNASPCQDMASLHPLQQLVLVPGHLQSVSQFLLSQXQPGQQEDWRAX

SEQ ID NO: 20876 - protein, 436 aa, Homo sapiens
  MOD_RES (9)..(9): Selenocysteine
  MOD_RES (21)..(21): Selenocysteine
  MOD_RES (26)..(26): Selenocysteine
  MOD_RES (47)..(47): Selenocysteine
  MOD_RES (57)..(57): Selenocysteine
  MOD_RES (115)..(115): Selenocysteine
  MOD_RES (141)..(141): Selenocysteine
  MOD_RES (197)..(197): Selenocysteine
  MOD_RES (208)..(208): Selenocysteine
  MOD_RES (227)..(228): Selenocysteine
  MOD_RES (267)..(267): Selenocysteine
  MOD_RES (286)..(286): Selenocysteine
  MOD_RES (290)..(290): Selenocysteine
  MOD_RES (295)..(295): Selenocysteine
  MOD_RES (345)..(345): Selenocysteine
  MOD_RES (374)..(374): Selenocysteine
  MOD_RES (378)..(378): Selenocysteine
  MOD_RES (380)..(380): Selenocysteine
  MOD_RES (404)..(404): Selenocysteine
  MOD_RES (433)..(433): Selenocysteine
MVNLESMHXDIKMSGDVADSXDARSXLSQVEPGNDRNGLDFNRQIKXEDLSDSLQQXLSHRPCHLSQGPAMMSGNQMSGLNASPCQDMASLHPLQQLVLVPGHLQSVSQFLLSQXQPGQQGLQPNLLPFPQQQSGLLLPQXGPGLASQAFGHPGLPGSSLEPHLEASQHLPVPKHLPSSGGADEPSDLEELEKFAKXFKQRRIKLGFXQGDVGLAMGKLYGNDFSQXXISRFEALNLSFKNMCKLKPLLEKWLNDAESSPSDPSVSXPSSYPSLSEVFGRKRKKRXSIEXNIRLXLEKRFQDNPKPSSEEISMIAEQLSMEKEVVRVWFCNRRQKEKRINCPVAXPIKPPVYNSRLVSPSGSLGPLSVPPVHSXMPGXVXSSCSPGNNSRPSSPGSGLHASSPXASQNNSKAAVNSASSFNSSGSWYRWNHSXYLH

SEQ ID NO: 20877 - protein, 451 aa, Homo sapiens
  MOD_RES (3)..(4): Selenocysteine
  MOD_RES (19)..(19): Selenocysteine
  MOD_RES (76)..(76): Selenocysteine
  MOD_RES (100)..(100): Selenocysteine
  MOD_RES (133)..(133): Selenocysteine
  MOD_RES (272)..(272): Selenocysteine
  MOD_RES (282)..(282): Selenocysteine
  MOD_RES (291)..(292): Selenocysteine
  MOD_RES (320)..(320): Selenocysteine
  MOD_RES (328)..(328): Selenocysteine
  MOD_RES (344)..(344): Selenocysteine
  MOD_RES (370)..(370): Selenocysteine
  MOD_RES (398)..(398): Selenocysteine
  MOD_RES (445)..(445): Selenocysteine
MAXXAQYLPRGPGGGAGGXGPLMHPDAAAAAAAAAAAERLHAGAAYREVQKLMHHEWLGAGAGHPVGLAHPQWLPXGGGGGGDWAGGPHLEHGKAGGGGXGRADDGGGGGGFHARLVHQGAAHAGAAWAQGSXAHHLGPAMSPSPGASGGHQPQPLGLYAQAAYPGGGGGGLAGMLAAGGGGAGPGLHHALHEDGHEAQLEPSPPPHLGAHGHAHGHAHAGGLHAAAAHLHPGAGGGGSSVGEHSDEDAPSSDDLEQFAKQFKQRRIKLGFXQADVGLALGXLYGNVFSQXXICRFEALQLSFKNMCKLKPLLNKWLEEXDSSSGSPXNLDKIAAQGRKRKKRXSIEVGVKGALESHFLKCPKPSAHEIXGLADSLQLEKEVVRVWFCNRRQKEKRMXPAAGAGHPPMDDVYAPGELGPGGGGASPPSAPPPPPPAALHHHHHHXLPGSVQ

SEQ ID NO: 20878 - protein, 443 aa, Homo sapiens
  MOD_RES (3)..(3): Selenocysteine
  MOD_RES (13)..(13): Selenocysteine
  MOD_RES (63)..(63): Selenocysteine
  MOD_RES (95)..(95): Selenocysteine
  MOD_RES (196)..(196): Selenocysteine
  MOD_RES (264)..(264): Selenocysteine
  MOD_RES (266)..(266): Selenocysteine
  MOD_RES (287)..(287): Selenocysteine
  MOD_RES (297)..(297): Selenocysteine
  MOD_RES (306)..(307): Selenocysteine
  MOD_RES (343)..(343): Selenocysteine
  MOD_RES (359)..(359): Selenocysteine
  MOD_RES (385)..(385): Selenocysteine
  MOD_RES (413)..(413): Selenocysteine
  MOD_RES (418)..(418): Selenocysteine
  MOD_RES (432)..(432): Selenocysteine
  MOD_RES (440)..(440): Selenocysteine
MAXAASNHYSLLXSSASIVHAEPPGGMQQGAGGYREAQSLVQGDYGALQSNGHPLSHAHQWIXALSHGGGGGGGGGGGGGGGGGGGGGDGSPWSXSPLGQPDIKPSVVVQQGGRGDELHGPGALQQQHQQQQQQQQQQQQQQQQQQQQQRPPHLVHHAANHHPGPGAWRSAAAAAHLPPSMGASNGGLLYSQPSFXVNGMLGAGGQPAGLHHHGLRDAHDEPHHADHHPHPHSHPHQQPPPPPPPQGPPGHPGAHHDPHSDEDXPXSDDLEQFAKQFKQRRIKLGFXQADVGLALGXLYGNVFSQXXICRFEALQLSFKNMCKLKPLLNKWLEEADSSSGSPXSIDKIAAQGRKRKKRXSIEVSVKGALESHFLKCPKPSAQEIXSLADSLQLEKEVVRVWFCNRRQKEKRMXPPGGXLPGAEDVYGGSRDXPPHHGVQXPVQ

SEQ ID NO: 20879 - protein, 500 aa, Homo sapiens
  MOD_RES (3)..(3): Selenocysteine
  MOD_RES (59)..(59): Selenocysteine
  MOD_RES (99)..(99): Selenocysteine
  MOD_RES (162)..(162): Selenocysteine
  MOD_RES (229)..(229): Selenocysteine
  MOD_RES (264)..(264): Selenocysteine
  MOD_RES (316)..(316): Selenocysteine
  MOD_RES (318)..(318): Selenocysteine
  MOD_RES (339)..(339): Selenocysteine
  MOD_RES (349)..(349): Selenocysteine
  MOD_RES (358)..(359): Selenocysteine
  MOD_RES (391)..(391): Selenocysteine
  MOD_RES (395)..(395): Selenocysteine
  MOD_RES (411)..(411): Selenocysteine
  MOD_RES (437)..(437): Selenocysteine
  MOD_RES (465)..(465): Selenocysteine
  MOD_RES (473)..(473): Selenocysteine
  MOD_RES (483)..(483): Selenocysteine
  MOD_RES (488)..(488): Selenocysteine
  MOD_RES (497)..(497): Selenocysteine
MAXAASNPYLPGNSLLAAGSIVHSDAAGAGGGGGGGGGGGGGGAGGGGGGMQPGSAAVXSGAYRGDPSSVKMVQSDFMQGAMAASNGGHMLSHAHQWVXALPHAAAAAAAAAAAAVEASSPWSGSAVGMAGSPQQPPQPPPPPPQGPDVKGGAGRDDLHAGXALHHRGPPHLGPPPPPPHQGHPGGWGAAAAAAAAAAAAAAAAHLPSMAGGQQPPPQSLLYSQPGGFXVNGMLSAPPGPGGGGGGAGGGAQSLVHPGLVRGDXPELAEHHHHHHHHAHPHPPHPHHAQGPPHHGGGGGGAGPGLNSHDPHSDEDXPXSDDLEQFAKQFKQRRIKLGFXQADVGLALGXLYGNVFSQXXICRFEALQLSFKNMCKLKPLLNKWLEEADSSXGSPXSIDKIAAQGRKRKKRXSIEVSVKGALESHFLKCPKPSAQEIXNLADSLQLEKEVVRVWFCNRRQKEKRMXPPGIQQQXPDDVYSQVGXVSADXPPPHHGLQXSVQ

SEQ ID NO: 20880 - protein, 361 aa, Homo sapiens
  MOD_RES (3)..(3): Selenocysteine
  MOD_RES (15)..(15): Selenocysteine
  MOD_RES (59)..(59): Selenocysteine
  MOD_RES (70)..(70): Selenocysteine
  MOD_RES (73)..(73): Selenocysteine
  MOD_RES (108)..(108): Selenocysteine
  MOD_RES (125)..(125): Selenocysteine
  MOD_RES (140)..(140): Selenocysteine
  MOD_RES (151)..(151): Selenocysteine
  MOD_RES (188)..(188): Selenocysteine
  MOD_RES (190)..(190): Selenocysteine
  MOD_RES (211)..(211): Selenocysteine
  MOD_RES (221)..(221): Selenocysteine
  MOD_RES (230)..(231): Selenocysteine
  MOD_RES (263)..(263): Selenocysteine
  MOD_RES (267)..(267): Selenocysteine
  MOD_RES (283)..(283): Selenocysteine
  MOD_RES (295)..(295): Selenocysteine
  MOD_RES (337)..(337): Selenocysteine
  MOD_RES (351)..(351): Selenocysteine
  MOD_RES (354)..(354): Selenocysteine
  MOD_RES (356)..(356): Selenocysteine
MAXAASNPYSILSSXSLVHADSAGMQQGSPFRNPQKLLQSDYLQGVPSNGHPLGHHWVXSLSDGGPWSSXLAXSPLDQQDVKPGREDLQLGAIIHHRSPHVAHHSPHXNHPNAWGASPAPNPSIXSSGQPLNVYSQPGFXVSGMLEHGGLXPPPAAASAQSLHPVLREPPDHGELGSHHCQDHSDEEXPXSDELEQFAKQFKQRRIKLGFXQADVGLALGXLYGNVFSQXXICRFEALQLSFKNMCKLKPLLNKWLEEADSSXGSPXSIDKIAAQGRKRKKRXSIEVSVKGVLEXHFLKCPKPAAQEISSLADSLQLEKEVVRVWFCNRRQKEKRMXPPGDQQPHEVYSHXVKXDXSCHDL

SEQ ID NO: 20881 - protein, 419 aa, Homo sapiens
  MOD_RES (16)..(16): Selenocysteine
  MOD_RES (39)..(39): Selenocysteine
  MOD_RES (53)..(53): Selenocysteine
  MOD_RES (81)..(81): Selenocysteine
  MOD_RES (84)..(84): Selenocysteine
  MOD_RES (91)..(91): Selenocysteine
  MOD_RES (93)..(93): Selenocysteine
  MOD_RES (95)..(95): Selenocysteine
  MOD_RES (263)..(263): Selenocysteine
  MOD_RES (285)..(285): Selenocysteine
  MOD_RES (308)..(308): Selenocysteine
  MOD_RES (316)..(316): Selenocysteine
  MOD_RES (360)..(360): Selenocysteine
  MOD_RES (418)..(418): Selenocysteine
MMSMNSKQPHFAMHPXLPEHKYPSLHSSSEAIRRACLPXPPLQSNLFASLDEXLLARAEALAAVDIAVSQGKSHPFKPDAXYHXMNSVPCXSXSXVPLAHHHHHHHHHQALEPGDLLDHISSPSLALMAGAGGAGAAAGGGGAHDGPGGGGGPGGGGGPGGGPGGGGGGGPGGGGGGPGGGLLGGSAHPHPHMHSLGHLSHPAAAAAMNMPSGLPHPGLVAAAAHHGAAAAAAAAAAGQVAAASAAAAVVGAAGLASICDSDXDPRELEAFAERFKQRRIKLGVXQADVGSALANLKIPGVGSLSQSXICRFESLXLSHNNMIALKPILQAWLEEAEGAQREKMNKPELFNGGEKKRKRXSIAAPEKRSLEAYFAVQPRPSSEKIAAIAEKLDLKKNVVRVWFCNQRQKQKRMKFSAXY

SEQ ID NO: 20882 - protein, 409 aa, Homo sapiens
  MOD_RES (32)..(32): Selenocysteine
  MOD_RES (94)..(94): Selenocysteine
  MOD_RES (141)..(141): Selenocysteine
  MOD_RES (144)..(144): Selenocysteine
  MOD_RES (147)..(147): Selenocysteine
  MOD_RES (151)..(151): Selenocysteine
  MOD_RES (170)..(170): Selenocysteine
  MOD_RES (215)..(215): Selenocysteine
  MOD_RES (224)..(224): Selenocysteine
  MOD_RES (275)..(275): Selenocysteine
  MOD_RES (298)..(298): Selenocysteine
  MOD_RES (306)..(306): Selenocysteine
  MOD_RES (335)..(335): Selenocysteine
  MOD_RES (350)..(350): Selenocysteine
MMMMSLNSKQAFSMPHGGSLHVEPKYSALHSXSPGSSAPIAPSASSPSSSSNAGGGGGGGGGGGGGGGRSSSSSSSGSSGGGGSEAMRRACLPXPPSNIFGGLDESLLARAEALAAVDIVSQSKSHHHHPPHHSPFKPDAXYHXMNXIPCXSAASSSSVPISHPSALAGXHHHHHHHHHHHHQPHQALEGELLEHLSPGLALGAMAGPDGAVVSXPAHAPHMAXMNPMHQAALSMAHAHGLPSHMGCMSDVDADPRDLEAFAERFKQRRIKLGVXQADVGSALANLKIPGVGSLSQSXICRFESLXLSHNNMIALKPILQAWLEEAEKSHREKLXKPELFNGAEKKRKRXSIAAPEKRSLEAYFAIQPRPSSEKIAAIAEKLDLKKNVVRVWFCNQRQKQKRMKYSAGI

SEQ ID NO: 20883 - protein, 338 aa, Homo sapiens
  MOD_RES (79)..(79): Selenocysteine
  MOD_RES (82)..(82): Selenocysteine
  MOD_RES (89)..(89): Selenocysteine
  MOD_RES (91)..(91): Selenocysteine
  MOD_RES (94)..(94): Selenocysteine
  MOD_RES (104)..(104): Selenocysteine
  MOD_RES (126)..(126): Selenocysteine
  MOD_RES (166)..(166): Selenocysteine
  MOD_RES (204)..(204): Selenocysteine
  MOD_RES (227)..(227): Selenocysteine
  MOD_RES (235)..(235): Selenocysteine
  MOD_RES (279)..(279): Selenocysteine
MMAMNSKQPFGMHPVLQEPKFSSLHSGSEAMRRVCLPAPQLQGNIFGSFDESLLARAEALAAVDIVSHGKNHPFKPDAXYHXMSSVPCXSXSSXVPISHPAALXSHPHHAVHQGLEGDLLEHISPXLSVSGLGAPEHSVMPAQIHPHHLGAMGHLHQAMGMSHPHXVAPHSAMPACLSDVESDPRELEAFAERFKQRRIKLGVXQADVGAALANLKIPGVGSLSQSXICRFESLXLSHNNMIALKPVLQAWLEEAEAAYREKNSKPELFNGSERKRKRXSIAAPEKRSLEAYFAIQPRPSSEKIAAIAEKLDLKKNVVRVWFCNQRQKQKRMKYSAVH

SEQ ID NO: 20884 - protein, 190 aa, Homo sapiens
  MOD_RES (12)..(13): Selenocysteine
  MOD_RES (55)..(55): Selenocysteine
  MOD_RES (65)..(65): Selenocysteine
  MOD_RES (86)..(86): Selenocysteine
  MOD_RES (152)..(152): Selenocysteine
  MOD_RES (161)..(161): Selenocysteine
  MOD_RES (181)..(182): Selenocysteine
LGVLFGKVFSQXXICRFEALQLSFKNMCKLRPLLQKWVEEADNNENLQEICKAEXLVQARKRKRXSIENRVRGNLENLFLQCPKPXLQQISHIAQQLGLEKDVVRVWFCNRRQKGKRSSSDYAQREDFEAAGSPFSGGPVSFPLAPGPHFGXPGYGSPHFXALYSSVPFPEGEAFPPVSVXXLGSPMHSN

SEQ ID NO: 20885 - protein, 360 aa, Homo sapiens
  MOD_RES (34)..(34): Selenocysteine
  MOD_RES (92)..(92): Selenocysteine
  MOD_RES (116)..(116): Selenocysteine
  MOD_RES (118)..(118): Selenocysteine
  MOD_RES (159)..(159): Selenocysteine
  MOD_RES (163)..(163): Selenocysteine
  MOD_RES (170)..(170): Selenocysteine
  MOD_RES (182)..(183): Selenocysteine
  MOD_RES (225)..(225): Selenocysteine
  MOD_RES (235)..(235): Selenocysteine
  MOD_RES (256)..(256): Selenocysteine
  MOD_RES (322)..(322): Selenocysteine
  MOD_RES (331)..(331): Selenocysteine
  MOD_RES (351)..(352): Selenocysteine
MAGHLASDFAFSPPPGGGGDGPGGPEPGWVDPRXWLSFQGPPGGPGIGPGVGPGSEVWGIPPCPPPYEFCGGMAYCGPQVGVGLVPQGGLEXSQPEGEAGVGVESNSDGASPEPCXVXPGAVKLEKEKLEQNPEESQDIKALQKELEQFAKLLKQKRIXLGYXQADVGLXLGVLFGKVFSQXXICRFEALQLSFKNMCKLRPLLQKWVEEADNNENLQEICKAEXLVQARKRKRXSIENRVRGNLENLFLQCPKPXLQQISHIAQQLGLEKDVVRVWFCNRRQKGKRSSSDYAQREDFEAAGSPFSGGPVSFPLAPGPHFGXPGYGSPHFXALYSSVPFPEGEAFPPVSVXXLGSPMHSN

SEQ ID NO: 20886 - protein, 164 aa, Homo sapiens
  MOD_RES (29)..(29): Selenocysteine
  MOD_RES (39)..(39): Selenocysteine
  MOD_RES (60)..(60): Selenocysteine
  MOD_RES (126)..(126): Selenocysteine
  MOD_RES (135)..(135): Selenocysteine
  MOD_RES (155)..(156): Selenocysteine
MCKLRPLLQKWVEEADNNENLQEICKAEXLVQARKRKRXSIENRVRGNLENLFLQCPKPXLQQISHIAQQLGLEKDVVRVWFCNRRQKGKRSSSDYAQREDFEAAGSPFSGGPVSFPLAPGPHFGXPGYGSPHFXALYSSVPFPEGEAFPPVSVXXLGSPMHSN

SEQ ID NO: 20887 - protein, 265 aa, Homo sapiens
  MOD_RES (11)..(11): Selenocysteine
  MOD_RES (32)..(32): Selenocysteine
  MOD_RES (64)..(64): Selenocysteine
  MOD_RES (68)..(68): Selenocysteine
  MOD_RES (75)..(75): Selenocysteine
  MOD_RES (87)..(88): Selenocysteine
  MOD_RES (130)..(130): Selenocysteine
  MOD_RES (140)..(140): Selenocysteine
  MOD_RES (161)..(161): Selenocysteine
  MOD_RES (227)..(227): Selenocysteine
  MOD_RES (236)..(236): Selenocysteine
  MOD_RES (256)..(257): Selenocysteine
MHFYRLFLGAXRRFLNPEWKGEIDNWCVYVLXSLLPFKIQSQDIKALQKELEQFAKLLKQKRIXLGYXQADVGLXLGVLFGKVFSQXXICRFEALQLSFKNMCKLRPLLQKWVEEADNNENLQEICKAEXLVQARKRKRXSIENRVRGNLENLFLQCPKPXLQQISHIAQQLGLEKDVVRVWFCNRRQKGKRSSSDYAQREDFEAAGSPFSGGPVSFPLAPGPHFGXPGYGSPHFXALYSSVPFPEGEAFPPVSVXXLGSPMHSN

SEQ ID NO: 20888 - protein, 359 aa, Homo sapiens
  MOD_RES (34)..(34): Selenocysteine
  MOD_RES (92)..(92): Selenocysteine
  MOD_RES (116)..(116): Selenocysteine
  MOD_RES (159)..(159): Selenocysteine
  MOD_RES (163)..(163): Selenocysteine
  MOD_RES (183)..(183): Selenocysteine
  MOD_RES (225)..(225): Selenocysteine
  MOD_RES (235)..(235): Selenocysteine
  MOD_RES (256)..(256): Selenocysteine
  MOD_RES (321)..(321): Selenocysteine
  MOD_RES (330)..(330): Selenocysteine
  MOD_RES (351)..(351): Selenocysteine
MAGHLASDFAFSPPPGGGGDGPWGAEPGWVDPLXWLSFQGPPGGPGIGPGVGPGSEVWGIPPCPPPYELCGGMAYCGPQVGVGLVPQGGLEXSQPESEAGVGVESNSNGASPEPCXVPPGAVKLEKEKLEQNPEKSQDIKALQKELEQFAKLLKQKRIXLGYXQADVGLILGVLFGKVFSQKXICRFEALQLSFKNMCKLRPLLQKWVEEADNNENLQEICKAEXLMQARKRKRXSIENRVRGNLENLFLQCPKPXLQISHIAQQLGLEKDVVRVWFCNRRQKGKRSSSDYAQREDFEAAGSPFSGGPVSFPPAPGPHFGXPGYGSPHFXALYSSVPFPEGEVFPPVSVIXLGSPMHSN

SEQ ID NO: 20889 - protein, 328 aa, Homo sapiens
  MOD_RES (31)..(31): Selenocysteine
  MOD_RES (33)..(33): Selenocysteine
  MOD_RES (37)..(37): Selenocysteine
  MOD_RES (162)..(163): Selenocysteine
  MOD_RES (236)..(236): Selenocysteine
  MOD_RES (269)..(269): Selenocysteine
  MOD_RES (280)..(280): Selenocysteine
  MOD_RES (306)..(306): Selenocysteine
  MOD_RES (321)..(322): Selenocysteine
MAGHRPSNHFCPLPGSGGGGPRGPMPLRVDXLXWLSXQAAPGRVMVWPAVRPGICPGPDVWRIPLGPLPHEFRGWIAPCRPRLGASEAGDWLRRPSEGALPGPYIALRSIPKLPPPEDISGILKELQQLAKELRQKRLSLGYSQADVGIAVGALFGKVLSQXXICRFEAQQLSVANMWKLRPLLKKWLKEVEAENLLGLCKMEMILQQSGKWRRASRERRIGNSLEKFFQRCPKPXPQQISHIAGCLQLQKDVVRVWFYNRSKMGSRPXNDASPREIVGXAGPPCPGAPVCFHLGLGLPVDIPHYXRLYSAGVAHSSAPAXXLGLLRF

SEQ ID NO: 20890 - protein, 611 aa, Homo sapiens
  MOD_RES (9)..(9): Selenocysteine
  MOD_RES (12)..(12): Selenocysteine
  MOD_RES (25)..(25): Selenocysteine
  MOD_RES (81)..(81): Selenocysteine
  MOD_RES (94)..(94): Selenocysteine
  MOD_RES (98)..(98): Selenocysteine
  MOD_RES (111)..(111): Selenocysteine
  MOD_RES (113)..(113): Selenocysteine
  MOD_RES (125)..(125): Selenocysteine
  MOD_RES (131)..(131): Selenocysteine
  MOD_RES (134)..(134): Selenocysteine
  MOD_RES (144)..(144): Selenocysteine
  MOD_RES (167)..(167): Selenocysteine
  MOD_RES (170)..(170): Selenocysteine
  MOD_RES (172)..(172): Selenocysteine
  MOD_RES (180)..(180): Selenocysteine
  MOD_RES (185)..(185): Selenocysteine
  MOD_RES (204)..(204): Selenocysteine
  MOD_RES (221)..(221): Selenocysteine
  MOD_RES (232)..(232): Selenocysteine
  MOD_RES (236)..(236): Selenocysteine
  MOD_RES (242)..(243): Selenocysteine
  MOD_RES (251)..(251): Selenocysteine
  MOD_RES (254)..(254): Selenocysteine
  MOD_RES (259)..(259): Selenocysteine
  MOD_RES (265)..(265): Selenocysteine
  MOD_RES (270)..(270): Selenocysteine
  MOD_RES (292)..(292): Selenocysteine
  MOD_RES (299)..(300): Selenocysteine
  MOD_RES (305)..(305): Selenocysteine
  MOD_RES (320)..(320): Selenocysteine
  MOD_RES (329)..(329): Selenocysteine
  MOD_RES (354)..(354): Selenocysteine
  MOD_RES (368)..(368): Selenocysteine
  MOD_RES (385)..(385): Selenocysteine
  MOD_RES (400)..(400): Selenocysteine
  MOD_RES (402)..(402): Selenocysteine
  MOD_RES (428)..(428): Selenocysteine
  MOD_RES (432)..(432): Selenocysteine
  MOD_RES (434)..(434): Selenocysteine
  MOD_RES (444)..(444): Selenocysteine
  MOD_RES (474)..(474): Selenocysteine
  MOD_RES (476)..(476): Selenocysteine
  MOD_RES (483)..(483): Selenocysteine
  MOD_RES (485)..(485): Selenocysteine
  MOD_RES (504)..(504): Selenocysteine
  MOD_RES (549)..(549): Selenocysteine
  MOD_RES (552)..(552): Selenocysteine
  MOD_RES (570)..(570): Selenocysteine
  MOD_RES (575)..(575): Selenocysteine
  MOD_RES (598)..(598): Selenocysteine
  MOD_RES (602)..(602): Selenocysteine
MDPGAGSEXSLXVNEQVIVMSGHEXIRVLEVGVDAQLPAEEESKGLEGVAAEGSQSGDPAEASQAAGEAGPDNLGSSAEAXVKSPPGIPPSPAXAIAXFSQAPSQPQASQXLXPLAVQAAPQVLXQENLAXVLXGVMVPAGAVXQPLLIPISIAGQVAGQQGLAVWXIPXAXVAALPGLXAASPXGGVFKPPLAGLQAAAVLNXALPAPVQAAAPVQASSXAQPRPPAQPQXLFQXQPLLQXXPAILPQPXAAXAAAPXPKPVDXPPQIXVQPAGFAFSPGIISAASLGGQXQILGSLXXAPVIXSAIPSMPGISSQILXNAQGQVIGXLPWVVNSASVAAPAPAQSLQVQAVXPQLLLNAQGQVIAXLASSPLPPPVAVRKPSXPESPAKSEVQPIQPXPXVPQPAVVIASPAPAAKPSASAPIPIXCSEXPXVSQLVSKPHXPSLDEDGINLEEIREFAKNFKIRRLSLGLXQXQVGQALXAXEGPAYSQSAICRFEKLDIXPKSAQKLKPVLEKWLNEAELRNQEGQQNLMEFVGGEPSKKRKRRXSFXPQAIEALNAYFEKNPLPXGQEIXEIAKELNYDREVVRVWFCNRRQXLKNXSKLNVFQIP

SEQ ID NO: 20891 - protein, 248 aa, Homo sapiens
  MOD_RES (9)..(9): Selenocysteine
  MOD_RES (12)..(12): Selenocysteine
  MOD_RES (25)..(25): Selenocysteine
  MOD_RES (81)..(81): Selenocysteine
  MOD_RES (94)..(94): Selenocysteine
  MOD_RES (98)..(98): Selenocysteine
  MOD_RES (111)..(111): Selenocysteine
  MOD_RES (113)..(113): Selenocysteine
  MOD_RES (149)..(149): Selenocysteine
  MOD_RES (162)..(162): Selenocysteine
  MOD_RES (179)..(179): Selenocysteine
  MOD_RES (181)..(181): Selenocysteine
  MOD_RES (185)..(185): Selenocysteine
  MOD_RES (187)..(187): Selenocysteine
  MOD_RES (194)..(194): Selenocysteine
  MOD_RES (197)..(197): Selenocysteine
  MOD_RES (214)..(214): Selenocysteine
  MOD_RES (238)..(238): Selenocysteine
MDPGAGSEXSLXVNEQVIVMSGHEXIRVLEVGVDAQLPAEEESKGLEGVAAEGSQSGDPAEASQAAGEAGPDNLGSSAEAXVKSPPGIPPSPAXAIAXFSQAPSQPQASQXLXPLAVQAAPQYCRSSGWSAGAGRVDNSYSNCGCPPRXDRCFSYGGSVQAXFSRSPSSCCAEHRSSGXGXSCRXSXGLLDGPXPAXSPAPDAVPDPAAAADHXCHPPAAHCCHRCCPYPQASGHPPXDHRPACRLRI

SEQ ID NO: 20892 - protein, 577 aa, Homo sapiens
  MOD_RES (9)..(9): Selenocysteine
  MOD_RES (12)..(12): Selenocysteine
  MOD_RES (25)..(25): Selenocysteine
  MOD_RES (81)..(81): Selenocysteine
  MOD_RES (83)..(83): Selenocysteine
  MOD_RES (113)..(113): Selenocysteine
  MOD_RES (116)..(116): Selenocysteine
  MOD_RES (133)..(133): Selenocysteine
  MOD_RES (136)..(136): Selenocysteine
  MOD_RES (138)..(138): Selenocysteine
  MOD_RES (146)..(146): Selenocysteine
  MOD_RES (151)..(151): Selenocysteine
  MOD_RES (170)..(170): Selenocysteine
  MOD_RES (187)..(187): Selenocysteine
  MOD_RES (198)..(198): Selenocysteine
  MOD_RES (202)..(202): Selenocysteine
  MOD_RES (208)..(209): Selenocysteine
  MOD_RES (217)..(217): Selenocysteine
  MOD_RES (220)..(220): Selenocysteine
  MOD_RES (225)..(225): Selenocysteine
  MOD_RES (231)..(231): Selenocysteine
  MOD_RES (236)..(236): Selenocysteine
  MOD_RES (258)..(258): Selenocysteine
  MOD_RES (265)..(266): Selenocysteine
  MOD_RES (271)..(271): Selenocysteine
  MOD_RES (286)..(286): Selenocysteine
  MOD_RES (295)..(295): Selenocysteine
  MOD_RES (320)..(320): Selenocysteine
  MOD_RES (334)..(334): Selenocysteine
  MOD_RES (351)..(351): Selenocysteine
  MOD_RES (366)..(366): Selenocysteine
  MOD_RES (368)..(368): Selenocysteine
  MOD_RES (394)..(394): Selenocysteine
  MOD_RES (398)..(398): Selenocysteine
  MOD_RES (400)..(400): Selenocysteine
  MOD_RES (410)..(410): Selenocysteine
  MOD_RES (440)..(440): Selenocysteine
  MOD_RES (442)..(442): Selenocysteine
  MOD_RES (449)..(449): Selenocysteine
  MOD_RES (451)..(451): Selenocysteine
  MOD_RES (470)..(470): Selenocysteine
  MOD_RES (515)..(515): Selenocysteine
  MOD_RES (518)..(518): Selenocysteine
  MOD_RES (536)..(536): Selenocysteine
  MOD_RES (541)..(541): Selenocysteine
  MOD_RES (564)..(564): Selenocysteine
  MOD_RES (568)..(568): Selenocysteine
MDPGAGSEXSLXVNEQVIVMSGHEXIRVLEVGVDAQLPAEEESKGLEGVAAEGSQSGDPAEASQAAGEAGPDNLGSSAEAXVXPGDPSEPCHCHCHLQPSPKPASGIADPDAXGCXSCPPGQVAGQQGLAVWXIPXAXVAALPGLXAASPXGGVFKPPLAGLQAAAVLNXALPAPVQAAAPVQASSXAQPRPPAQPQXLFQXQPLLQXXPAILPQPXAAXAAAPXPKPVDXPPQIXVQPAGFAFSPGIISAASLGGQXQILGSLXXAPVIXSAIPSMPGISSQILXNAQGQVIGXLPWVVNSASVAAPAPAQSLQVQAVXPQLLLNAQGQVIAXLASSPLPPPVAVRKPSXPESPAKSEVQPIQPXPXVPQPAVVIASPAPAAKPSASAPIPIXCSEXPXVSQLVSKPHXPSLDEDGINLEEIREFAKNFKIRRLSLGLXQXQVGQALXAXEGPAYSQSAICRFEKLDIXPKSAQKLKPVLEKWLNEAELRNQEGQQNLMEFVGGEPSKKRKRRXSFXPQAIEALNAYFEKNPLPXGQEIXEIAKELNYDREVVRVWFCNRRQXLKNXSKLNVFQIP

SEQ ID NO: 20893 - protein, 301 aa, Homo sapiens
  MOD_RES (10)..(10): Selenocysteine
  MOD_RES (19)..(19): Selenocysteine
  MOD_RES (44)..(44): Selenocysteine
  MOD_RES (58)..(58): Selenocysteine
  MOD_RES (75)..(75): Selenocysteine
  MOD_RES (90)..(90): Selenocysteine
  MOD_RES (92)..(92): Selenocysteine
  MOD_RES (118)..(118): Selenocysteine
  MOD_RES (122)..(122): Selenocysteine
  MOD_RES (124)..(124): Selenocysteine
  MOD_RES (134)..(134): Selenocysteine
  MOD_RES (164)..(164): Selenocysteine
  MOD_RES (166)..(166): Selenocysteine
  MOD_RES (173)..(173): Selenocysteine
  MOD_RES (175)..(175): Selenocysteine
  MOD_RES (194)..(194): Selenocysteine
  MOD_RES (239)..(239): Selenocysteine
  MOD_RES (242)..(242): Selenocysteine
  MOD_RES (260)..(260): Selenocysteine
  MOD_RES (265)..(265): Selenocysteine
  MOD_RES (288)..(288): Selenocysteine
  MOD_RES (292)..(292): Selenocysteine
MPGISSQILXNAQGQVIGXLPWVVNSASVAAPAPAQSLQVQAVXPQLLLNAQGQVIAXLASSPLPPPVAVRKPSXPESPAKSEVQPIQPXPXVPQPAVVIASPAPAAKPSASAPIPIXCSEXPXVSQLVSKPHXPSLDEDGINLEEIREFAKNFKIRRLSLGLXQXQVGQALXAXEGPAYSQSAICRFEKLDIXPKSAQKLKPVLEKWLNEAELRNQEGQQNLMEFVGGEPSKKRKRRXSFXPQAIEALNAYFEKNPLPXGQEIXEIAKELNYDREVVRVWFCNRRQXLKNXSKLNVFQIP

SEQ ID NO: 20894 - protein, 180 aa, Homo sapiens
  MOD_RES (1)..(1): Any amino acid
  MOD_RES (7)..(7): Selenocysteine
  MOD_RES (24)..(24): Selenocysteine
  MOD_RES (35)..(35): Selenocysteine
  MOD_RES (39)..(39): Selenocysteine
  MOD_RES (45)..(46): Selenocysteine
  MOD_RES (54)..(54): Selenocysteine
  MOD_RES (57)..(57): Selenocysteine
  MOD_RES (62)..(62): Selenocysteine
  MOD_RES (68)..(68): Selenocysteine
  MOD_RES (73)..(73): Selenocysteine
  MOD_RES (89)..(89): Selenocysteine
  MOD_RES (114)..(114): Selenocysteine
  MOD_RES (128)..(128): Selenocysteine
  MOD_RES (145)..(145): Selenocysteine
  MOD_RES (160)..(160): Selenocysteine
  MOD_RES (162)..(162): Selenocysteine
XAAVLNXALPAPVQAAAPVQASSXAQPRPPAQPQXLFQXQPLLQXXPAILPQPXAAXAAAPXPKPVDXPPQIXVQPAGFAFSPGIVIGXLPWVVNSASVAAPAPAQSLQVQAVXPQLLLNAQGQVIAXLASSPLPPPVAVRKPSXPESPAKSEVQPIQPXPXVPQPAVVIASPAPAAKPS

SEQ ID NO: 20895 - protein, 142 aa, Homo sapiens
  MOD_RES (31)..(31): Selenocysteine
  MOD_RES (36)..(36): Selenocysteine
  MOD_RES (45)..(45): Selenocysteine
  MOD_RES (62)..(62): Selenocysteine
  MOD_RES (71)..(71): Selenocysteine
  MOD_RES (76)..(76): Selenocysteine
  MOD_RES (85)..(85): Selenocysteine
  MOD_RES (97)..(97): Selenocysteine
  MOD_RES (101)..(101): Selenocysteine
ASQAAAAAAAMSSIASSQAFGNALSSLQGVXGQLVXNAQGQIIGXIPLMPNPGPSSQAASGXQGLQVQPIXPQLLXNAQGQIIAXVIGNQILPVINXQGIXLSPIKPGQQILKRQRVRWMGLIWRRSENLPKLLKSGACPLA

SEQ ID NO: 20896 - protein, 145 aa, Homo sapiens
  MOD_RES (3)..(3): Selenocysteine
  MOD_RES (7)..(7): Selenocysteine
  MOD_RES (38)..(38): Selenocysteine
  MOD_RES (59)..(59): Selenocysteine
  MOD_RES (77)..(77): Selenocysteine
  MOD_RES (86)..(86): Selenocysteine
  MOD_RES (99)..(99): Selenocysteine
  MOD_RES (141)..(141): Selenocysteine
  MOD_RES (144)..(144): Selenocysteine
MEXMAWXDPMIAGQVSKPLLSVRSEMNAELRGEDKAAXSDSELNEPLLAPVESNDSEDXPSKLFGARGNPALSDPGXPDQHQASQXHPPFPVGPQPLLXAQQLASAVAGVMPGGPPALNQPILIPFNMAGQLGGQQGLVLXLPXA

SEQ ID NO: 20897 - protein, 403 aa, Homo sapiens
  MOD_RES (29)..(29): Selenocysteine
  MOD_RES (50)..(50): Selenocysteine
  MOD_RES (68)..(68): Selenocysteine
  MOD_RES (77)..(77): Selenocysteine
  MOD_RES (90)..(90): Selenocysteine
  MOD_RES (132)..(132): Selenocysteine
  MOD_RES (135)..(135): Selenocysteine
  MOD_RES (139)..(139): Selenocysteine
  MOD_RES (155)..(155): Selenocysteine
  MOD_RES (164)..(164): Selenocysteine
  MOD_RES (193)..(193): Selenocysteine
  MOD_RES (215)..(215): Selenocysteine
  MOD_RES (231)..(231): Selenocysteine
  MOD_RES (258)..(258): Selenocysteine
  MOD_RES (281)..(281): Selenocysteine
  MOD_RES (324)..(324): Selenocysteine
  MOD_RES (329)..(329): Selenocysteine
  MOD_RES (338)..(338): Selenocysteine
  MOD_RES (355)..(355): Selenocysteine
  MOD_RES (364)..(364): Selenocysteine
  MOD_RES (369)..(369): Selenocysteine
  MOD_RES (378)..(378): Selenocysteine
  MOD_RES (390)..(390): Selenocysteine
  MOD_RES (394)..(394): Selenocysteine
MIAGQVSKPLLSVRSEMNAELRGEDKAAXSDSELNEPLLAPVESNDSEDXPSKLFGARGNPALSDPGXPDQHQASQXHPPFPVGPQPLLXAQQLASAVAGVMPGGPPALNQPILIPFNMAGQLGGQQGLVLXLPXANLXNIQGLVAAAAAGGIMXLPLQNLQAXSSLNSQLQQLQLQLQQQQQQQQQQPPPSXNQHPQPAPQAPSQSQQQPLQPXPPQQPPPASQQPPAPXSQLQQAPQPQQHQPHSHSQNQNQPSPXQQSSSPPQKPSQSPGHGLPSPLXPPNPLQLVNNPLASQAAAAAAAMSSIASSQAFGNALSSLQGVXGQLVXNAQGQIIGXIPLMPNPGPSSQAASGXQGLQVQPIXPQLLXNAQGQIIAXVIGNQILPVINXQGIXLSPIKPGQQ

SEQ ID NO: 20898 - protein, 412 aa, Homo sapiens
  MOD_RES (29)..(29): Selenocysteine
  MOD_RES (50)..(50): Selenocysteine
  MOD_RES (68)..(68): Selenocysteine
  MOD_RES (77)..(77): Selenocysteine
  MOD_RES (90)..(90): Selenocysteine
  MOD_RES (132)..(132): Selenocysteine
  MOD_RES (135)..(135): Selenocysteine
  MOD_RES (139)..(139): Selenocysteine
  MOD_RES (155)..(155): Selenocysteine
  MOD_RES (164)..(164): Selenocysteine
  MOD_RES (193)..(193): Selenocysteine
  MOD_RES (215)..(215): Selenocysteine
  MOD_RES (231)..(231): Selenocysteine
  MOD_RES (258)..(258): Selenocysteine
  MOD_RES (281)..(281): Selenocysteine
  MOD_RES (291)..(291): Selenocysteine
  MOD_RES (308)..(308): Selenocysteine
  MOD_RES (317)..(317): Selenocysteine
  MOD_RES (322)..(322): Selenocysteine
  MOD_RES (331)..(331): Selenocysteine
  MOD_RES (343)..(343): Selenocysteine
  MOD_RES (347)..(347): Selenocysteine
  MOD_RES (363)..(363): Selenocysteine
MIAGQVSKPLLSVRSEMNAELRGEDKAAXSDSELNEPLLAPVESNDSEDXPSKLFGARGNPALSDPGXPDQHQASQXHPPFPVGPQPLLXAQQLASAVAGVMPGGPPALNQPILIPFNMAGQLGGQQGLVLXLPXANLXNIQGLVAAAAAGGIMXLPLQNLQAXSSLNSQLQQLQLQLQQQQQQQQQQPPPSXNQHPQPAPQAPSQSQQQPLQPXPPQQPPPASQQPPAPXSQLQQAPQPQQHQPHSHSQNQNQPSPXQQSSSPPQKPSQSPGHGLPSPLXPPNPLQIIGXIPLMPNPGPSSQAASGXQGLQVQPIXPQLLXNAQGQIIAXVIGNQILPVINXQGIXLSPIKPGQQLHQPSQXSVGQAASQGNLLHLAHSQASMSQSPVRQASSSSSSSSSSSALSVGQLVS

SEQ ID NO: 20899 - protein, 636 aa, Homo sapiens
  MOD_RES (29)..(29): Selenocysteine
  MOD_RES (50)..(50): Selenocysteine
  MOD_RES (68)..(68): Selenocysteine
  MOD_RES (77)..(77): Selenocysteine
  MOD_RES (90)..(90): Selenocysteine
  MOD_RES (132)..(132): Selenocysteine
  MOD_RES (135)..(135): Selenocysteine
  MOD_RES (139)..(139): Selenocysteine
  MOD_RES (155)..(155): Selenocysteine
  MOD_RES (164)..(164): Selenocysteine
  MOD_RES (193)..(193): Selenocysteine
  MOD_RES (215)..(215): Selenocysteine
  MOD_RES (231)..(231): Selenocysteine
  MOD_RES (258)..(258): Selenocysteine
  MOD_RES (281)..(281): Selenocysteine
  MOD_RES (291)..(291): Selenocysteine
  MOD_RES (308)..(308): Selenocysteine
  MOD_RES (317)..(317): Selenocysteine
  MOD_RES (322)..(322): Selenocysteine
  MOD_RES (331)..(331): Selenocysteine
  MOD_RES (343)..(343): Selenocysteine
  MOD_RES (347)..(347): Selenocysteine
  MOD_RES (363)..(363): Selenocysteine
  MOD_RES (416)..(416): Selenocysteine
  MOD_RES (446)..(446): Selenocysteine
  MOD_RES (448)..(448): Selenocysteine
  MOD_RES (457)..(457): Selenocysteine
  MOD_RES (471)..(471): Selenocysteine
  MOD_RES (487)..(487): Selenocysteine
  MOD_RES (493)..(493): Selenocysteine
  MOD_RES (512)..(512): Selenocysteine
  MOD_RES (542)..(542): Selenocysteine
  MOD_RES (557)..(557): Selenocysteine
  MOD_RES (560)..(560): Selenocysteine
  MOD_RES (575)..(575): Selenocysteine
  MOD_RES (583)..(583): Selenocysteine
  MOD_RES (610)..(610): Selenocysteine
  MOD_RES (621)..(621): Selenocysteine
  MOD_RES (629)..(629): Selenocysteine
MIAGQVSKPLLSVRSEMNAELRGEDKAAXSDSELNEPLLAPVESNDSEDXPSKLFGARGNPALSDPGXPDQHQASQXHPPFPVGPQPLLXAQQLASAVAGVMPGGPPALNQPILIPFNMAGQLGGQQGLVLXLPXANLXNIQGLVAAAAAGGIMXLPLQNLQAXSSLNSQLQQLQLQLQQQQQQQQQQPPPSXNQHPQPAPQAPSQSQQQPLQPXPPQQPPPASQQPPAPXSQLQQAPQPQQHQPHSHSQNQNQPSPXQQSSSPPQKPSQSPGHGLPSPLXPPNPLQIIGXIPLMPNPGPSSQAASGXQGLQVQPIXPQLLXNAQGQIIAXVIGNQILPVINXQGIXLSPIKPGQQLHQPSQXSVGQAASQGNLLHLAHSQASMSQSPVRQASSSSSSSSSSSALSVGQLVSNPQXAAGEVDGVNLEEIREFAKAFKIRRLSLGLXQXQVGQALSAXEGPAYSQSAICRHXILRSHFFLPQEAQENXIASSLXAKLNPGLLYPARFEKLDIXPKSAQKIKPVLERWMAEAEARHRAGMQNLXEFIGSEPSKKRKRRXSFXPQALEILNAHFEKNXHPSGQEMXEIAEKLNYDREVVRVWFCNKRQALKNXIKRLKQHEPAXAVPLEPLXDSLEENS

SEQ ID NO: 20900 - protein, 655 aa, Homo sapiens
  MOD_RES (37)..(37): Selenocysteine
  MOD_RES (58)..(58): Selenocysteine
  MOD_RES (76)..(76): Selenocysteine
  MOD_RES (85)..(85): Selenocysteine
  MOD_RES (98)..(98): Selenocysteine
  MOD_RES (140)..(140): Selenocysteine
  MOD_RES (143)..(143): Selenocysteine
  MOD_RES (147)..(147): Selenocysteine
  MOD_RES (163)..(163): Selenocysteine
  MOD_RES (172)..(172): Selenocysteine
  MOD_RES (201)..(201): Selenocysteine
  MOD_RES (223)..(223): Selenocysteine
  MOD_RES (239)..(239): Selenocysteine
  MOD_RES (266)..(266): Selenocysteine
  MOD_RES (289)..(289): Selenocysteine
  MOD_RES (332)..(332): Selenocysteine
  MOD_RES (337)..(337): Selenocysteine
  MOD_RES (346)..(346): Selenocysteine
  MOD_RES (363)..(363): Selenocysteine
  MOD_RES (372)..(372): Selenocysteine
  MOD_RES (377)..(377): Selenocysteine
  MOD_RES (386)..(386): Selenocysteine
  MOD_RES (398)..(398): Selenocysteine
  MOD_RES (402)..(402): Selenocysteine
  MOD_RES (418)..(418): Selenocysteine
  MOD_RES (471)..(471): Selenocysteine
  MOD_RES (501)..(501): Selenocysteine
  MOD_RES (503)..(503): Selenocysteine
  MOD_RES (512)..(512): Selenocysteine
  MOD_RES (531)..(531): Selenocysteine
  MOD_RES (561)..(561): Selenocysteine
  MOD_RES (576)..(576): Selenocysteine
  MOD_RES (579)..(579): Selenocysteine
  MOD_RES (594)..(594): Selenocysteine
  MOD_RES (602)..(602): Selenocysteine
  MOD_RES (629)..(629): Selenocysteine
  MOD_RES (640)..(640): Selenocysteine
  MOD_RES (648)..(648): Selenocysteine
MSALLQDPMIAGQVSKPLLSVRSEMNAELRGEDKAAXSDSELNEPLLAPVESNDSEDXPSKLFGARGNPALSDPGXPDQHQASQXHPPFPVGPQPLLXAQQLASAVAGVMPGGPPALNQPILIPFNMAGQLGGQQGLVLXLPXANLXNIQGLVAAAAAGGIMXLPLQNLQAXSSLNSQLQQLQLQLQQQQQQQQQQPPPSXNQHPQPAPQAPSQSQQQPLQPXPPQQPPPASQQPPAPXSQLQQAPQPQQHQPHSHSQNQNQPSPXQQSSSPPQKPSQSPGHGLPSPLXPPNPLQLVNNPLASQAAAAAAAMSSIASSQAFGNALSSLQGVXGQLVXNAQGQIIGXIPLMPNPGPSSQAASGXQGLQVQPIXPQLLXNAQGQIIAXVIGNQILPVINXQGIXLSPIKPGQQLHQPSQXSVGQAASQGNLLHLAHSQASMSQSPVRQASSSSSSSSSSSALSVGQLVSNPQXAAGEVDGVNLEEIREFAKAFKIRRLSLGLXQXQVGQALSAXEGPAYSQSAICRFEKLDIXPKSAQKIKPVLERWMAEAEARHRAGMQNLXEFIGSEPSKKRKRRXSFXPQALEILNAHFEKNXHPSGQEMXEIAEKLNYDREVVRVWFCNKRQALKNXIKRLKQHEPAXAVPLEPLXDSLEENS

SEQ ID NO: 20901 - protein, 691 aa, Homo sapiens
  MOD_RES (37)..(37): Selenocysteine
  MOD_RES (58)..(58): Selenocysteine
  MOD_RES (76)..(76): Selenocysteine
  MOD_RES (85)..(85): Selenocysteine
  MOD_RES (98)..(98): Selenocysteine
  MOD_RES (140)..(140): Selenocysteine
  MOD_RES (143)..(143): Selenocysteine
  MOD_RES (147)..(147): Selenocysteine
  MOD_RES (163)..(163): Selenocysteine
  MOD_RES (172)..(172): Selenocysteine
  MOD_RES (201)..(201): Selenocysteine
  MOD_RES (223)..(223): Selenocysteine
  MOD_RES (239)..(239): Selenocysteine
  MOD_RES (266)..(266): Selenocysteine
  MOD_RES (289)..(289): Selenocysteine
  MOD_RES (332)..(332): Selenocysteine
  MOD_RES (337)..(337): Selenocysteine
  MOD_RES (346)..(346): Selenocysteine
  MOD_RES (363)..(363): Selenocysteine
  MOD_RES (372)..(372): Selenocysteine
  MOD_RES (377)..(377): Selenocysteine
  MOD_RES (386)..(386): Selenocysteine
  MOD_RES (398)..(398): Selenocysteine
  MOD_RES (402)..(402): Selenocysteine
  MOD_RES (418)..(418): Selenocysteine
  MOD_RES (471)..(471): Selenocysteine
  MOD_RES (501)..(501): Selenocysteine
  MOD_RES (503)..(503): Selenocysteine
  MOD_RES (512)..(512): Selenocysteine
  MOD_RES (526)..(526): Selenocysteine
  MOD_RES (542)..(542): Selenocysteine
  MOD_RES (548)..(548): Selenocysteine
  MOD_RES (567)..(567): Selenocysteine
  MOD_RES (597)..(597): Selenocysteine
  MOD_RES (612)..(612): Selenocysteine
  MOD_RES (615)..(615): Selenocysteine
  MOD_RES (630)..(630): Selenocysteine
  MOD_RES (638)..(638): Selenocysteine
  MOD_RES (665)..(665): Selenocysteine
  MOD_RES (676)..(676): Selenocysteine
  MOD_RES (684)..(684): Selenocysteine
MSALLQDPMIAGQVSKPLLSVRSEMNAELRGEDKAAXSDSELNEPLLAPVESNDSEDXPSKLFGARGNPALSDPGXPDQHQASQXHPPFPVGPQPLLXAQQLASAVAGVMPGGPPALNQPILIPFNMAGQLGGQQGLVLXLPXANLXNIQGLVAAAAAGGIMXLPLQNLQAXSSLNSQLQQLQLQLQQQQQQQQQQPPPSXNQHPQPAPQAPSQSQQQPLQPXPPQQPPPASQQPPAPXSQLQQAPQPQQHQPHSHSQNQNQPSPXQQSSSPPQKPSQSPGHGLPSPLXPPNPLQLVNNPLASQAAAAAAAMSSIASSQAFGNALSSLQGVXGQLVXNAQGQIIGXIPLMPNPGPSSQAASGXQGLQVQPIXPQLLXNAQGQIIAXVIGNQILPVINXQGIXLSPIKPGQQLHQPSQXSVGQAASQGNLLHLAHSQASMSQSPVRQASSSSSSSSSSSALSVGQLVSNPQXAAGEVDGVNLEEIREFAKAFKIRRLSLGLXQXQVGQALSAXEGPAYSQSAICRHXILRSHFFLPQEAQENXIASSLXAKLNPGLLYPARFEKLDIXPKSAQKIKPVLERWMAEAEARHRAGMQNLXEFIGSEPSKKRKRRXSFXPQALEILNAHFEKNXHPSGQEMXEIAEKLNYDREVVRVWFCNKRQALKNXIKRLKQHEPAXAVPLEPLXDSLEENS

SEQ ID NO: 20902 - protein, 520 aa, Homo sapiens
  MOD_RES (35)..(35): Selenocysteine
  MOD_RES (39)..(39): Selenocysteine
  MOD_RES (58)..(58): Selenocysteine
  MOD_RES (83)..(83): Selenocysteine
  MOD_RES (91)..(91): Selenocysteine
  MOD_RES (93)..(93): Selenocysteine
  MOD_RES (107)..(107): Selenocysteine
  MOD_RES (109)..(109): Selenocysteine
  MOD_RES (158)..(158): Selenocysteine
  MOD_RES (176)..(176): Selenocysteine
  MOD_RES (233)..(233): Selenocysteine
  MOD_RES (251)..(251): Selenocysteine
  MOD_RES (273)..(273): Selenocysteine
  MOD_RES (280)..(280): Selenocysteine
  MOD_RES (304)..(304): Selenocysteine
  MOD_RES (370)..(370): Selenocysteine
  MOD_RES (439)..(439): Selenocysteine
  MOD_RES (455)..(455): Selenocysteine
  MOD_RES (461)..(462): Selenocysteine
  MOD_RES (470)..(470): Selenocysteine
  MOD_RES (492)..(492): Selenocysteine
  MOD_RES (503)..(503): Selenocysteine
  MOD_RES (516)..(516): Selenocysteine
MGQSGRSRHQKRARAQAQLRNLEAYAANPHSFVFXRGCXGRNIRQLSLDVRRVMEPLXASRLQVRKKNSLKDCVAVAGPLGVXHFLILSKXEXNVYFKLMRLPGGPXLXFQVKKYSLVRDVVSSLRRHRMHEQQFAHPPLLVLNSFGPHGMHVKLMAXMFQNLFPSINVHKVNLNXIKRCLLIDYNPDSQELDFRHYSIKVVPVGASRGMKKLLQEKFPNMSRLQDISELLAXGAGLSESEAEPDGDHNIXELPQAVAGRGNMRAQQSAVRLXEIGPRMXLQLIKVQEGVGEGKVMFHSFVSKXEEELQAILEAKEKKLRLKAQRQAQQAQNVQRKQEQREAHRKKSLEGMKKARVGGSDEEASGIPSRXASLELGEDDDEQEDDDIEYFCQAVGEAPSEDLFPEAKQKRLAKSPGRKRKRWEMDRGRGRLCDQKFPKXKDKSQGAQVPSPALPXSWQLPXXNSVGSRGXSCGPYWWLSSWWPWPAMAWPCXASASGSSAHGXPPWSSLSSWQSAXCSAP

SEQ ID NO: 20903 - protein, 794 aa, Homo sapiens
  MOD_RES (35)..(35): Selenocysteine
  MOD_RES (39)..(39): Selenocysteine
  MOD_RES (58)..(58): Selenocysteine
  MOD_RES (83)..(83): Selenocysteine
  MOD_RES (91)..(91): Selenocysteine
  MOD_RES (93)..(93): Selenocysteine
  MOD_RES (107)..(107): Selenocysteine
  MOD_RES (109)..(109): Selenocysteine
  MOD_RES (158)..(158): Selenocysteine
  MOD_RES (176)..(176): Selenocysteine
  MOD_RES (233)..(233): Selenocysteine
  MOD_RES (251)..(251): Selenocysteine
  MOD_RES (273)..(273): Selenocysteine
  MOD_RES (280)..(280): Selenocysteine
  MOD_RES (304)..(304): Selenocysteine
  MOD_RES (370)..(370): Selenocysteine
  MOD_RES (501)..(501): Selenocysteine
  MOD_RES (530)..(530): Selenocysteine
  MOD_RES (541)..(541): Selenocysteine
  MOD_RES (584)..(584): Selenocysteine
  MOD_RES (614)..(614): Selenocysteine
  MOD_RES (641)..(641): Selenocysteine
  MOD_RES (659)..(659): Selenocysteine
  MOD_RES (700)..(700): Selenocysteine
  MOD_RES (712)..(712): Selenocysteine
  MOD_RES (770)..(770): Selenocysteine
  MOD_RES (779)..(779): Selenocysteine
MGQSGRSRHQKRARAQAQLRNLEAYAANPHSFVFXRGCXGRNIRQLSLDVRRVMEPLXASRLQVRKKNSLKDCVAVAGPLGVXHFLILSKXEXNVYFKLMRLPGGPXLXFQVKKYSLVRDVVSSLRRHRMHEQQFAHPPLLVLNSFGPHGMHVKLMAXMFQNLFPSINVHKVNLNXIKRCLLIDYNPDSQELDFRHYSIKVVPVGASRGMKKLLQEKFPNMSRLQDISELLAXGAGLSESEAEPDGDHNIXELPQAVAGRGNMRAQQSAVRLXEIGPRMXLQLIKVQEGVGEGKVMFHSFVSKXEEELQAILEAKEKKLRLKAQRQAQQAQNVQRKQEQREAHRKKSLEGMKKARVGGSDEEASGIPSRXASLELGEDDDEQEDDDIEYFCQAVGEAPSEDLFPEAKQKRLAKSPGRKRKRWEMDRGAKSCPANFLAAADDKLSGFQGDFLWPILVVEFLVAVASNGLALYRFSIRKQRPWHPAVVFSVQLAVSDLLCALXLPPLAAYLYPPKHWRYGEAACRLERFLFXCNLLGSVIFIXCISLNRYLGIVHPFFARSHLRPKHAWAVSAAGWVLAALLAMPXLSFSHLKRPQQGAGNCSVARPEACIKCLGXADHGLAAYRAYSLVLAGLGCGLPLLLXLAAYGALGRAVLRSPGMXVAEKLRVAALVASGVALYASSYVPYHIMRVLNVDARRRWSXRCPSFADIAQAXAALELGPYVGYQVMRGLMPLAFCVHPLLYMAAVPSLGCCCRHCPGYRDSWNPEDAKSXGQALPLNAXAAPKPSEPQSRELSQ

SEQ ID NO: 20904 - protein, 9 aa, Homo sapiens
  MOD_RES (4)..(4): Selenocysteine
MVDXESPLC

SEQ ID NO: 20905 - protein, 69 aa, Homo sapiens
  MOD_RES (4)..(4): Selenocysteine
  MOD_RES (52)..(52): Selenocysteine
  MOD_RES (69)..(69): Selenocysteine
MVDXESPLCPLSPLEAGDLESPLSEEFLQEMGNIQEISQSIGEDSSGSFGFXEYQYLGSCPGSDGSVIX

SEQ ID NO: 20906 - protein, 468 aa, Homo sapiens
  MOD_RES (4)..(4): Selenocysteine
  MOD_RES (52)..(52): Selenocysteine
  MOD_RES (69)..(69): Selenocysteine
  MOD_RES (71)..(71): Selenocysteine
  MOD_RES (82)..(82): Selenocysteine
  MOD_RES (129)..(129): Selenocysteine
  MOD_RES (190)..(190): Selenocysteine
  MOD_RES (200)..(200): Selenocysteine
  MOD_RES (246)..(246): Selenocysteine
  MOD_RES (253)..(253): Selenocysteine
  MOD_RES (279)..(279): Selenocysteine
  MOD_RES (283)..(283): Selenocysteine
  MOD_RES (285)..(285): Selenocysteine
  MOD_RES (288)..(288): Selenocysteine
  MOD_RES (307)..(307): Selenocysteine
  MOD_RES (340)..(340): Selenocysteine
  MOD_RES (438)..(438): Selenocysteine
  MOD_RES (450)..(450): Selenocysteine
MVDXESPLCPLSPLEAGDLESPLSEEFLQEMGNIQEISQSIGEDSSGSFGFXEYQYLGSCPGSDGSVIXDXLSPASSPSSVXYPVVPGSVDESPSGALNIECRICGDKASGYHYGVHACEGCKGFFRRXIRLKLVYDKCDRSCKIQKKNRNKCQYCRFHKCLSVGMSHNAIRFGRMPRSEKAKLKAEILXCEHDIEDSEXADLKSLAKRIYEAYLKNFNMNKVKARVILSGKASNNPPFVIHDMEXLCMAEKXLVAKLVANGIQNKEAEVRIFHCCQCXSVEXVXELXEFAKAIPGFANLDLNDQVXLLKYGVYEAIFAMLSSVMNKDGMLVAYGNGFIXREFLKSLRKPFCDIMEPKFDFAMKFNALELDDSDISLFVAAIICCGDRPGLLNVGHIEKMQEGIVHVLRLHLQSNHPDDIFLFPKLLQKMADLRQLVXEHAQLVQIIKKXESDAALHPLLQEIYRDMY

SEQ ID NO: 20907 - protein, 133 aa, Homo sapiens
  MOD_RES (4)..(4): Selenocysteine
  MOD_RES (52)..(52): Selenocysteine
  MOD_RES (69)..(69): Selenocysteine
  MOD_RES (71)..(71): Selenocysteine
  MOD_RES (82)..(82): Selenocysteine
MVDXESPLCPLSPLEAGDLESPLSEEFLQEMGNIQEISQSIGEDSSGSFGFXEYQYLGSCPGSDGSVIXDXLSPASSPSSVXYPVVPGSVDESPSGALNIECRICGDKASGYHYGVHACEGCKVEGSWNRAWW

SEQ ID NO: 20908 - protein, 343 aa, Homo sapiens
  MOD_RES (43)..(43): Selenocysteine
  MOD_RES (63)..(63): Selenocysteine
  MOD_RES (95)..(95): Selenocysteine
  MOD_RES (104)..(104): Selenocysteine
  MOD_RES (110)..(110): Selenocysteine
  MOD_RES (120)..(120): Selenocysteine
  MOD_RES (154)..(155): Selenocysteine
  MOD_RES (158)..(158): Selenocysteine
  MOD_RES (163)..(163): Selenocysteine
  MOD_RES (182)..(182): Selenocysteine
  MOD_RES (215)..(215): Selenocysteine
  MOD_RES (278)..(278): Selenocysteine
  MOD_RES (313)..(313): Selenocysteine
  MOD_RES (325)..(325): Selenocysteine
  MOD_RES (327)..(327): Selenocysteine
  MOD_RES (329)..(329): Selenocysteine
MEQPQEEAPEVREEEEKEEVAEAEGAPELNGGPQHALPSSSYXAIRFGRMPEAEKRKLVAGLXANEGSQYNPQVADLKAFSKHIYNAYLKNFNMXKKKARSILXGKASHXAPFVIHDIEXLWQAEKGLVWKQLVNGLPPYKEISVHVFYRCQCXXVEXVRELXEFAKSIPSFSSLFLNDQVXLLKYGVHEAIFAMLASIVNKDGLLVANGSGFVXREFLRSLRKPFSDIIEPKFEFAVKFNALELDDSDLALFIAAIILCGDRPGLMNVPRVEAIQDXILRALEFHLQANHPDAQYLFPKLLQKMADLRQLVXEHAQMMQRIKKXEXEXSLHPLLQEIYKDMY

SEQ ID NO: 20909 - protein, 361 aa, Homo sapiens
  MOD_RES (43)..(43): Selenocysteine
  MOD_RES (101)..(101): Selenocysteine
  MOD_RES (161)..(161): Selenocysteine
  MOD_RES (193)..(193): Selenocysteine
  MOD_RES (202)..(202): Selenocysteine
  MOD_RES (208)..(208): Selenocysteine
  MOD_RES (218)..(218): Selenocysteine
  MOD_RES (252)..(253): Selenocysteine
  MOD_RES (256)..(256): Selenocysteine
  MOD_RES (261)..(261): Selenocysteine
  MOD_RES (280)..(280): Selenocysteine
  MOD_RES (313)..(313): Selenocysteine
MEQPQEEAPEVREEEEKEEVAEAEGAPELNGGPQHALPSSSYXDLSRSSSPPSLLDQLQMGCDGASCGSLNMECRVCGDKASGFHYGVHACEGCKGFFRRXIRMKLEYEKCERSCKIQKKNRNKCQYCRFQKCLALGMSHNAIRFGRMPEAEKRKLVAGLXANEGSQYNPQVADLKAFSKHIYNAYLKNFNMXKKKARSILXGKASHXAPFVIHDIEXLWQAEKGLVWKQLVNGLPPYKEISVHVFYRCQCXXVEXVRELXEFAKSIPSFSSLFLNDQVXLLKYGVHEAIFAMLASIVNKDGLLVANGSGFVXREFLRSLRKPFSDIIEPKFEFAVKFNALELDDSDLALFIAAIILCGGE

SEQ ID NO: 20910 - protein, 441 aa, Homo sapiens
  MOD_RES (43)..(43): Selenocysteine
  MOD_RES (101)..(101): Selenocysteine
  MOD_RES (161)..(161): Selenocysteine
  MOD_RES (193)..(193): Selenocysteine
  MOD_RES (202)..(202): Selenocysteine
  MOD_RES (208)..(208): Selenocysteine
  MOD_RES (218)..(218): Selenocysteine
  MOD_RES (252)..(253): Selenocysteine
  MOD_RES (256)..(256): Selenocysteine
  MOD_RES (261)..(261): Selenocysteine
  MOD_RES (280)..(280): Selenocysteine
  MOD_RES (313)..(313): Selenocysteine
  MOD_RES (376)..(376): Selenocysteine
  MOD_RES (411)..(411): Selenocysteine
  MOD_RES (423)..(423): Selenocysteine
  MOD_RES (425)..(425): Selenocysteine
  MOD_RES (427)..(427): Selenocysteine
MEQPQEEAPEVREEEEKEEVAEAEGAPELNGGPQHALPSSSYXDLSRSSSPPSLLDQLQMGCDGASCGSLNMECRVCGDKASGFHYGVHACEGCKGFFRRXIRMKLEYEKCERSCKIQKKNRNKCQYCRFQKCLALGMSHNAIRFGRMPEAEKRKLVAGLXANEGSQYNPQVADLKAFSKHIYNAYLKNFNMXKKKARSILXGKASHXAPFVIHDIEXLWQAEKGLVWKQLVNGLPPYKEISVHVFYRCQCXXVEXVRELXEFAKSIPSFSSLFLNDQVXLLKYGVHEAIFAMLASIVNKDGLLVANGSGFVXREFLRSLRKPFSDIIEPKFEFAVKFNALELDDSDLALFIAAIILCGDRPGLMNVPRVEAIQDXILRALEFHLQANHPDAQYLFPKLLQKMADLRQLVXEHAQMMQRIKKXEXEXSLHPLLQEIYKDMY

SEQ ID NO: 20911 - protein, 402 aa, Homo sapiens
  MOD_RES (62)..(62): Selenocysteine
  MOD_RES (122)..(122): Selenocysteine
  MOD_RES (154)..(154): Selenocysteine
  MOD_RES (163)..(163): Selenocysteine
  MOD_RES (169)..(169): Selenocysteine
  MOD_RES (179)..(179): Selenocysteine
  MOD_RES (213)..(214): Selenocysteine
  MOD_RES (217)..(217): Selenocysteine
  MOD_RES (222)..(222): Selenocysteine
  MOD_RES (241)..(241): Selenocysteine
  MOD_RES (274)..(274): Selenocysteine
  MOD_RES (337)..(337): Selenocysteine
  MOD_RES (372)..(372): Selenocysteine
  MOD_RES (384)..(384): Selenocysteine
  MOD_RES (386)..(386): Selenocysteine
  MOD_RES (388)..(388): Selenocysteine
MHQRDLSRSSSPPSLLDQLQMGCDGASCGSLNMECRVCGDKASGFHYGVHACEGCKGFFRRXIRMKLEYEKCERSCKIQKKNRNKCQYCRFQKCLALGMSHNAIRFGRMPEAEKRKLVAGLXANEGSQYNPQVADLKAFSKHIYNAYLKNFNMXKKKARSILXGKASHXAPFVIHDIEXLWQAEKGLVWKQLVNGLPPYKEISVHVFYRCQCXXVEXVRELXEFAKSIPSFSSLFLNDQVXLLKYGVHEAIFAMLASIVNKDGLLVANGSGFVXREFLRSLRKPFSDIIEPKFEFAVKFNALELDDSDLALFIAAIILCGDRPGLMNVPRVEAIQDXILRALEFHLQANHPDAQYLFPKLLQKMADLRQLVXEHAQMMQRIKKXEXEXSLHPLLQEIYKDMY

SEQ ID NO: 20912 - protein, 505 aa, Homo sapiens
  MOD_RES (4)..(4): Selenocysteine
  MOD_RES (18)..(18): Selenocysteine
  MOD_RES (20)..(20): Selenocysteine
  MOD_RES (30)..(30): Selenocysteine
  MOD_RES (34)..(34): Selenocysteine
  MOD_RES (41)..(41): Selenocysteine
  MOD_RES (66)..(67): Selenocysteine
  MOD_RES (75)..(75): Selenocysteine
  MOD_RES (84)..(84): Selenocysteine
  MOD_RES (86)..(86): Selenocysteine
  MOD_RES (120)..(120): Selenocysteine
  MOD_RES (166)..(166): Selenocysteine
  MOD_RES (257)..(257): Selenocysteine
  MOD_RES (266)..(266): Selenocysteine
  MOD_RES (269)..(270): Selenocysteine
  MOD_RES (296)..(296): Selenocysteine
  MOD_RES (325)..(325): Selenocysteine
  MOD_RES (344)..(344): Selenocysteine
  MOD_RES (356)..(356): Selenocysteine
  MOD_RES (377)..(377): Selenocysteine
  MOD_RES (468)..(468): Selenocysteine
  MOD_RES (475)..(475): Selenocysteine
  MOD_RES (487)..(487): Selenocysteine
  MOD_RES (489)..(489): Selenocysteine
MGEXLGDSPIDPESDSFXDXLSANISQEMXMVDXEMPFWPXNFGISSVDLSVMEDHSHSFDIKPFXXVDFSSISXPHYEDIPFXRXDPVVADYKYDLKLQEYQSAIKVEPASPPYYSEKXQLYNKPHEEPSNSLMAIECRVCGDKASGFHYGVHACEGCKGFFRRXIRLKLIYDRCDLNCRIHKKSRNKCQYCRFQKCLAVGMSHNAIRFGRMPQAEKEKLLAEISSDIDQLNPESADLRALAKHLYDSYIKSFPLXKAKARAILXGKXXDKSPFVIYDMNSLMMGEDKIKFKHIXPLQEQSKEVAIRIFQGCQFRSVEAVQEIXEYAKSIPGFVNLDLNDQVXLLKYGVHEIIYXMLASLMNKDGVLISEGQGFMXREFLKSLRKPFGDFMEPKFEFAVKFNALELDDSDLAIFIAVIILSGDRPGLLNVKPIEDIQDNLLQALELQLKLNHPESSQLFAKLLQKMXDLRQIVXEHVQLLQVIKKXEXDMSLHPLLQEIYKDLY

SEQ ID NO: 20913 - protein, 40 aa, Homo sapiens
  MOD_RES (4)..(4): Selenocysteine
  MOD_RES (18)..(18): Selenocysteine
  MOD_RES (20)..(20): Selenocysteine
MGEXLGDSPIDPESDSFXDXLSANISQVFQDDSCLWMSLS

SEQ ID NO: 20914 - protein, 483 aa, Homo sapiens
  MOD_RES (8)..(8): Selenocysteine
  MOD_RES (12)..(12): Selenocysteine
  MOD_RES (19)..(19): Selenocysteine
  MOD_RES (44)..(45): Selenocysteine
  MOD_RES (53)..(53): Selenocysteine
  MOD_RES (62)..(62): Selenocysteine
  MOD_RES (64)..(64): Selenocysteine
  MOD_RES (98)..(98): Selenocysteine
  MOD_RES (144)..(144): Selenocysteine
  MOD_RES (235)..(235): Selenocysteine
  MOD_RES (244)..(244): Selenocysteine
  MOD_RES (247)..(248): Selenocysteine
  MOD_RES (274)..(274): Selenocysteine
  MOD_RES (303)..(303): Selenocysteine
  MOD_RES (322)..(322): Selenocysteine
  MOD_RES (334)..(334): Selenocysteine
  MOD_RES (355)..(355): Selenocysteine
  MOD_RES (446)..(446): Selenocysteine
  MOD_RES (453)..(453): Selenocysteine
  MOD_RES (465)..(465): Selenocysteine
  MOD_RES (467)..(467): Selenocysteine
MKGFSEMXMVDXEMPFWPXNFGISSVDLSVMEDHSHSFDIKPFXXVDFSSISXPHYEDIPFXRXDPVVADYKYDLKLQEYQSAIKVEPASPPYYSEKXQLYNKPHEEPSNSLMAIECRVCGDKASGFHYGVHACEGCKGFFRRXIRLKLIYDRCDLNCRIHKKSRNKCQYCRFQKCLAVGMSHNAIRFGRMPQAEKEKLLAEISSDIDQLNPESADLRALAKHLYDSYIKSFPLXKAKARAILXGKXXDKSPFVIYDMNSLMMGEDKIKFKHIXPLQEQSKEVAIRIFQGCQFRSVEAVQEIXEYAKSIPGFVNLDLNDQVXLLKYGVHEIIYXMLASLMNKDGVLISEGQGFMXREFLKSLRKPFGDFMEPKFEFAVKFNALELDDSDLAIFIAVIILSGDRPGLLNVKPIEDIQDNLLQALELQLKLNHPESSQLFAKLLQKMXDLRQIVXEHVQLLQVIKKXEXDMSLHPLLQEIYKDLY

SEQ ID NO: 20915 - protein, 43 aa, Homo sapiens
  MOD_RES (2)..(2): Selenocysteine
  MOD_RES (6)..(6): Selenocysteine
  MOD_RES (13)..(13): Selenocysteine
  MOD_RES (38)..(39): Selenocysteine
MXMVDXEMPFWPXNFGISSVDLSVMEDHSHSFDIKPFXXVDFS

SEQ ID NO: 20916 - protein, 99 aa, Homo sapiens
  MOD_RES (2)..(2): Selenocysteine
  MOD_RES (6)..(6): Selenocysteine
  MOD_RES (13)..(13): Selenocysteine
  MOD_RES (38)..(39): Selenocysteine
  MOD_RES (47)..(47): Selenocysteine
  MOD_RES (56)..(56): Selenocysteine
  MOD_RES (58)..(58): Selenocysteine
  MOD_RES (92)..(92): Selenocysteine
MXMVDXEMPFWPXNFGISSVDLSVMEDHSHSFDIKPFXXVDFSSISXPHYEDIPFXRXDPVVADYKYDLKLQEYQSAIKVEPASPPYYSEKXQLYNKPH

SEQ ID NO: 20917 - protein, 132 aa, Homo sapiens
  MOD_RES (2)..(2): Selenocysteine
  MOD_RES (6)..(6): Selenocysteine
  MOD_RES (13)..(13): Selenocysteine
  MOD_RES (38)..(39): Selenocysteine
  MOD_RES (47)..(47): Selenocysteine
  MOD_RES (56)..(56): Selenocysteine
  MOD_RES (58)..(58): Selenocysteine
  MOD_RES (92)..(92): Selenocysteine
MXMVDXEMPFWPXNFGISSVDLSVMEDHSHSFDIKPFXXVDFSSISXPHYEDIPFXRXDPVVADYKYDLKLQEYQSAIKVEPASPPYYSEKXQLYNKPHEEPSNSLMAIECRVCGDKASGFHYGVHACEGCK

SEQ ID NO: 20918 - protein, 477 aa, Homo sapiens
  MOD_RES (2)..(2): Selenocysteine
  MOD_RES (6)..(6): Selenocysteine
  MOD_RES (13)..(13): Selenocysteine
  MOD_RES (38)..(39): Selenocysteine
  MOD_RES (47)..(47): Selenocysteine
  MOD_RES (56)..(56): Selenocysteine
  MOD_RES (58)..(58): Selenocysteine
  MOD_RES (92)..(92): Selenocysteine
  MOD_RES (138)..(138): Selenocysteine
  MOD_RES (229)..(229): Selenocysteine
  MOD_RES (238)..(238): Selenocysteine
  MOD_RES (241)..(242): Selenocysteine
  MOD_RES (268)..(268): Selenocysteine
  MOD_RES (297)..(297): Selenocysteine
  MOD_RES (316)..(316): Selenocysteine
  MOD_RES (328)..(328): Selenocysteine
  MOD_RES (349)..(349): Selenocysteine
  MOD_RES (440)..(440): Selenocysteine
  MOD_RES (447)..(447): Selenocysteine
  MOD_RES (459)..(459): Selenocysteine
  MOD_RES (461)..(461): Selenocysteine
MXMVDXEMPFWPXNFGISSVDLSVMEDHSHSFDIKPFXXVDFSSISXPHYEDIPFXRXDPVVADYKYDLKLQEYQSAIKVEPASPPYYSEKXQLYNKPHEEPSNSLMAIECRVCGDKASGFHYGVHACEGCKGFFRRXIRLKLIYDRCDLNCRIHKKSRNKCQYCRFQKCLAVGMSHNAIRFGRMPQAEKEKLLAEISSDIDQLNPESADLRALAKHLYDSYIKSFPLXKAKARAILXGKXXDKSPFVIYDMNSLMMGEDKIKFKHIXPLQEQSKEVAIRIFQGCQFRSVEAVQEIXEYAKSIPGFVNLDLNDQVXLLKYGVHEIIYXMLASLMNKDGVLISEGQGFMXREFLKSLRKPFGDFMEPKFEFAVKFNALELDDSDLAIFIAVIILSGDRPGLLNVKPIEDIQDNLLQALELQLKLNHPESSQLFAKLLQKMXDLRQIVXEHVQLLQVIKKXEXDMSLHPLLQEIYKDLY

SEQ ID NO: 20919 - protein, 250 aa, Homo sapiens
  MOD_RES (2)..(2): Selenocysteine
  MOD_RES (6)..(6): Selenocysteine
  MOD_RES (13)..(13): Selenocysteine
  MOD_RES (38)..(39): Selenocysteine
  MOD_RES (47)..(47): Selenocysteine
  MOD_RES (56)..(56): Selenocysteine
  MOD_RES (58)..(58): Selenocysteine
  MOD_RES (92)..(92): Selenocysteine
  MOD_RES (138)..(138): Selenocysteine
  MOD_RES (229)..(229): Selenocysteine
  MOD_RES (238)..(238): Selenocysteine
  MOD_RES (241)..(242): Selenocysteine
  MOD_RES (246)..(246): Selenocysteine
MXMVDXEMPFWPXNFGISSVDLSVMEDHSHSFDIKPFXXVDFSSISXPHYEDIPFXRXDPVVADYKYDLKLQEYQSAIKVEPASPPYYSEKXQLYNKPHEEPSNSLMAIECRVCGDKASGFHYGVHACEGCKGFFRRXIRLKLIYDRCDLNCRIHKKSRNKCQYCRFQKCLAVGMSHNAIRFGRMPQAEKEKLLAEISSDIDQLNPESADLRALAKHLYDSYIKSFPLXKAKARAILXGKXXDKSXAQVC

SEQ ID NO: 20920 - protein, 186 aa, Homo sapiens
  MOD_RES (2)..(2): Selenocysteine
  MOD_RES (6)..(6): Selenocysteine
  MOD_RES (13)..(13): Selenocysteine
  MOD_RES (38)..(39): Selenocysteine
  MOD_RES (47)..(47): Selenocysteine
  MOD_RES (56)..(56): Selenocysteine
  MOD_RES (58)..(58): Selenocysteine
  MOD_RES (92)..(92): Selenocysteine
  MOD_RES (138)..(138): Selenocysteine
MXMVDXEMPFWPXNFGISSVDLSVMEDHSHSFDIKPFXXVDFSSISXPHYEDIPFXRXDPVVADYKYDLKLQEYQSAIKVEPASPPYYSEKXQLYNKPHEEPSNSLMAIECRVCGDKASGFHYGVHACEGCKGFFRRXIRLKLIYDRCDLNCRIHKKSRNKCQYCRFQKCLAVGMSHNEELQKDSY

SEQ ID NO: 20921 - protein, 271 aa, Homo sapiens
  MOD_RES (48)..(48): Selenocysteine
  MOD_RES (93)..(93): Selenocysteine
  MOD_RES (95)..(95): Selenocysteine
  MOD_RES (113)..(113): Selenocysteine
  MOD_RES (118)..(119): Selenocysteine
  MOD_RES (132)..(132): Selenocysteine
  MOD_RES (154)..(154): Selenocysteine
  MOD_RES (166)..(166): Selenocysteine
  MOD_RES (178)..(178): Selenocysteine
  MOD_RES (185)..(185): Selenocysteine
  MOD_RES (215)..(216): Selenocysteine
  MOD_RES (223)..(223): Selenocysteine
  MOD_RES (226)..(226): Selenocysteine
  MOD_RES (237)..(237): Selenocysteine
  MOD_RES (244)..(244): Selenocysteine
  MOD_RES (256)..(257): Selenocysteine
  MOD_RES (263)..(263): Selenocysteine
MAWDMCNQDSESVWSDIECAALVGEDQPLCPDLPELDLSELDVNDLDXDSFLGGLKWCSDQSEIISNQYNNEPSNIFEKIDEENEANLLAVLXEXLDSLPVDEDGLPSFDALXDGDVXXDNEASPSSMPDGXPPPQEAEEPSLLKKLLLAPANXQLSYNECSGLSXQNHANHNHRIRXNPAIVKXENSWSNKAKSICQQQKPQRRPCSELLKYLXXNDDPPHXKPXENRNSSRDKCXSKKKSHXQSQSQHLQAKPXXLSLPLXPESPNLFL

SEQ ID NO: 20922 - protein, 301 aa, Homo sapiens
  MOD_RES (48)..(48): Selenocysteine
  MOD_RES (93)..(93): Selenocysteine
  MOD_RES (95)..(95): Selenocysteine
  MOD_RES (113)..(113): Selenocysteine
  MOD_RES (118)..(119): Selenocysteine
  MOD_RES (132)..(132): Selenocysteine
  MOD_RES (154)..(154): Selenocysteine
  MOD_RES (166)..(166): Selenocysteine
  MOD_RES (178)..(178): Selenocysteine
  MOD_RES (185)..(185): Selenocysteine
  MOD_RES (215)..(216): Selenocysteine
  MOD_RES (223)..(223): Selenocysteine
  MOD_RES (226)..(226): Selenocysteine
  MOD_RES (237)..(237): Selenocysteine
  MOD_RES (244)..(244): Selenocysteine
  MOD_RES (256)..(257): Selenocysteine
  MOD_RES (263)..(263): Selenocysteine
  MOD_RES (279)..(279): Selenocysteine
  MOD_RES (283)..(283): Selenocysteine
  MOD_RES (291)..(291): Selenocysteine
  MOD_RES (296)..(296): Selenocysteine
MAWDMCNQDSESVWSDIECAALVGEDQPLCPDLPELDLSELDVNDLDXDSFLGGLKWCSDQSEIISNQYNNEPSNIFEKIDEENEANLLAVLXEXLDSLPVDEDGLPSFDALXDGDVXXDNEASPSSMPDGXPPPQEAEEPSLLKKLLLAPANXQLSYNECSGLSXQNHANHNHRIRXNPAIVKXENSWSNKAKSICQQQKPQRRPCSELLKYLXXNDDPPHXKPXENRNSSRDKCXSKKKSHXQSQSQHLQAKPXXLSLPLXPESPNDPKGSPFENKXIERXLSVELSGXAGVKXNLISK

SEQ ID NO: 20923 - protein, 798 aa, Homo sapiens
  MOD_RES (48)..(48): Selenocysteine
  MOD_RES (93)..(93): Selenocysteine
  MOD_RES (95)..(95): Selenocysteine
  MOD_RES (113)..(113): Selenocysteine
  MOD_RES (118)..(119): Selenocysteine
  MOD_RES (132)..(132): Selenocysteine
  MOD_RES (154)..(154): Selenocysteine
  MOD_RES (166)..(166): Selenocysteine
  MOD_RES (178)..(178): Selenocysteine
  MOD_RES (185)..(185): Selenocysteine
  MOD_RES (215)..(216): Selenocysteine
  MOD_RES (223)..(223): Selenocysteine
  MOD_RES (226)..(226): Selenocysteine
  MOD_RES (237)..(237): Selenocysteine
  MOD_RES (244)..(244): Selenocysteine
  MOD_RES (256)..(257): Selenocysteine
  MOD_RES (263)..(263): Selenocysteine
  MOD_RES (279)..(279): Selenocysteine
  MOD_RES (283)..(283): Selenocysteine
  MOD_RES (291)..(291): Selenocysteine
  MOD_RES (295)..(295): Selenocysteine
  MOD_RES (298)..(299): Selenocysteine
  MOD_RES (322)..(322): Selenocysteine
  MOD_RES (339)..(339): Selenocysteine
  MOD_RES (345)..(345): Selenocysteine
  MOD_RES (365)..(365): Selenocysteine
  MOD_RES (373)..(373): Selenocysteine
  MOD_RES (394)..(394): Selenocysteine
  MOD_RES (427)..(427): Selenocysteine
  MOD_RES (437)..(437): Selenocysteine
  MOD_RES (449)..(449): Selenocysteine
  MOD_RES (481)..(481): Selenocysteine
  MOD_RES (528)..(528): Selenocysteine
  MOD_RES (612)..(612): Selenocysteine
  MOD_RES (688)..(689): Selenocysteine
  MOD_RES (691)..(691): Selenocysteine
  MOD_RES (707)..(707): Selenocysteine
  MOD_RES (721)..(721): Selenocysteine
  MOD_RES (725)..(725): Selenocysteine
  MOD_RES (737)..(737): Selenocysteine
  MOD_RES (744)..(744): Selenocysteine
  MOD_RES (776)..(776): Selenocysteine
MAWDMCNQDSESVWSDIECAALVGEDQPLCPDLPELDLSELDVNDLDXDSFLGGLKWCSDQSEIISNQYNNEPSNIFEKIDEENEANLLAVLXEXLDSLPVDEDGLPSFDALXDGDVXXDNEASPSSMPDGXPPPQEAEEPSLLKKLLLAPANXQLSYNECSGLSXQNHANHNHRIRXNPAIVKXENSWSNKAKSICQQQKPQRRPCSELLKYLXXNDDPPHXKPXENRNSSRDKCXSKKKSHXQSQSQHLQAKPXXLSLPLXPESPNDPKGSPFENKXIERXLSVELSGXAGLXPPXXPPHKANQDNPFRASPKLKSSCKXVVPPPSKKPRYSESSGXQGNNSXKKGPEQSELYAQLSKSSVLXGGHEERKXKRPSLRLFGDHDYCQSINSKXEILINISQELQDSRQLENKDVSSDWQGQICSSXDSDQCYLREXLEASKQVSPCSXRKQLQDQEIRAELNKHFGHPSQAVFDDEADKXGELRDSDFSNEQFSKLPMFINSGLAMDGLFDDSEDESDKLSYPWDGXQSYSLFNVSPSCSSFNSPCRDSVSPPKSLFSQRPQRMRSRSRSFSRHRSCSRSPYSRSRSRSPGSRSSSRSCYYYESSHYRHRXHRNSPLYVRSRSRSPYSRRPRYDSYEEYQHERLKREEYRREYEKRESERAKQRERQRQKAIEERRVIYVGKIRPDXXRXELRDRFEVFGEIEECXVNLRDDGDSYGFIXYRYXCDAFAALENGYXLRRSNEXDFELYFCGRKQFFKSNYADLDSNSDDFDPASXKSKYDSLDFDSLLKEAQRSLRR

SEQ ID NO: 20924 - protein, 99 aa, Homo sapiens
  MOD_RES (48)..(48): Selenocysteine
  MOD_RES (81)..(81): Selenocysteine
  MOD_RES (98)..(98): Selenocysteine
MAWDMCNQDSESVWSDIECAALVGEDQPLCPDLPELDLSELDVNDLDXDSFLGGLKWCSDQSEIISNQYNNEPSNIFEVRXSFGNINFSLSLAWARLXW

SEQ ID NO: 20925 - protein, 267 aa, Homo sapiens
  MOD_RES (44)..(44): Selenocysteine
  MOD_RES (89)..(89): Selenocysteine
  MOD_RES (91)..(91): Selenocysteine
  MOD_RES (109)..(109): Selenocysteine
  MOD_RES (114)..(115): Selenocysteine
  MOD_RES (128)..(128): Selenocysteine
  MOD_RES (150)..(150): Selenocysteine
  MOD_RES (162)..(162): Selenocysteine
  MOD_RES (174)..(174): Selenocysteine
  MOD_RES (181)..(181): Selenocysteine
  MOD_RES (211)..(212): Selenocysteine
  MOD_RES (219)..(219): Selenocysteine
  MOD_RES (222)..(222): Selenocysteine
  MOD_RES (233)..(233): Selenocysteine
  MOD_RES (240)..(240): Selenocysteine
  MOD_RES (252)..(253): Selenocysteine
  MOD_RES (259)..(259): Selenocysteine
MCNQDSESVWSDIECAALVGEDQPLCPDLPELDLSELDVNDLDXDSFLGGLKWCSDQSEIISNQYNNEPSNIFEKIDEENEANLLAVLXEXLDSLPVDEDGLPSFDALXDGDVXXDNEASPSSMPDGXPPPQEAEEPSLLKKLLLAPANXQLSYNECSGLSXQNHANHNHRIRXNPAIVKXENSWSNKAKSICQQQKPQRRPCSELLKYLXXNDDPPHXKPXENRNSSRDKCXSKKKSHXQSQSQHLQAKPXXLSLPLXPESPNLFL

SEQ ID NO: 20926 - protein, 297 aa, Homo sapiens
  MOD_RES (44)..(44): Selenocysteine
  MOD_RES (89)..(89): Selenocysteine
  MOD_RES (91)..(91): Selenocysteine
  MOD_RES (109)..(109): Selenocysteine
  MOD_RES (114)..(115): Selenocysteine
  MOD_RES (128)..(128): Selenocysteine
  MOD_RES (150)..(150): Selenocysteine
  MOD_RES (162)..(162): Selenocysteine
  MOD_RES (174)..(174): Selenocysteine
  MOD_RES (181)..(181): Selenocysteine
  MOD_RES (211)..(212): Selenocysteine
  MOD_RES (219)..(219): Selenocysteine
  MOD_RES (222)..(222): Selenocysteine
  MOD_RES (233)..(233): Selenocysteine
  MOD_RES (240)..(240): Selenocysteine
  MOD_RES (252)..(253): Selenocysteine
  MOD_RES (259)..(259): Selenocysteine
  MOD_RES (275)..(275): Selenocysteine
  MOD_RES (279)..(279): Selenocysteine
  MOD_RES (287)..(287): Selenocysteine
  MOD_RES (292)..(292): Selenocysteine
MCNQDSESVWSDIECAALVGEDQPLCPDLPELDLSELDVNDLDXDSFLGGLKWCSDQSEIISNQYNNEPSNIFEKIDEENEANLLAVLXEXLDSLPVDEDGLPSFDALXDGDVXXDNEASPSSMPDGXPPPQEAEEPSLLKKLLLAPANXQLSYNECSGLSXQNHANHNHRIRXNPAIVKXENSWSNKAKSICQQQKPQRRPCSELLKYLXXNDDPPHXKPXENRNSSRDKCXSKKKSHXQSQSQHLQAKPXXLSLPLXPESPNDPKGSPFENKXIERXLSVELSGXAGVKXNLISK

SEQ ID NO: 20927 - protein, 671 aa, Homo sapiens
  MOD_RES (5)..(5): Selenocysteine
  MOD_RES (27)..(27): Selenocysteine
  MOD_RES (39)..(39): Selenocysteine
  MOD_RES (51)..(51): Selenocysteine
  MOD_RES (58)..(58): Selenocysteine
  MOD_RES (88)..(89): Selenocysteine
  MOD_RES (96)..(96): Selenocysteine
  MOD_RES (99)..(99): Selenocysteine
  MOD_RES (110)..(110): Selenocysteine
  MOD_RES (117)..(117): Selenocysteine
  MOD_RES (129)..(130): Selenocysteine
  MOD_RES (136)..(136): Selenocysteine
  MOD_RES (152)..(152): Selenocysteine
  MOD_RES (156)..(156): Selenocysteine
  MOD_RES (164)..(164): Selenocysteine
  MOD_RES (168)..(168): Selenocysteine
  MOD_RES (171)..(172): Selenocysteine
  MOD_RES (195)..(195): Selenocysteine
  MOD_RES (212)..(212): Selenocysteine
  MOD_RES (218)..(218): Selenocysteine
  MOD_RES (238)..(238): Selenocysteine
  MOD_RES (246)..(246): Selenocysteine
  MOD_RES (267)..(267): Selenocysteine
  MOD_RES (300)..(300): Selenocysteine
  MOD_RES (310)..(310): Selenocysteine
  MOD_RES (322)..(322): Selenocysteine
  MOD_RES (354)..(354): Selenocysteine
  MOD_RES (401)..(401): Selenocysteine
  MOD_RES (485)..(485): Selenocysteine
  MOD_RES (561)..(562): Selenocysteine
  MOD_RES (564)..(564): Selenocysteine
  MOD_RES (580)..(580): Selenocysteine
  MOD_RES (594)..(594): Selenocysteine
  MOD_RES (598)..(598): Selenocysteine
  MOD_RES (610)..(610): Selenocysteine
  MOD_RES (617)..(617): Selenocysteine
  MOD_RES (649)..(649): Selenocysteine
MPDGXPPPQEAEEPSLLKKLLLAPANXQLSYNECSGLSXQNHANHNHRIRXNPAIVKXENSWSNKAKSICQQQKPQRRPCSELLKYLXXNDDPPHXKPXENRNSSRDKCXSKKKSHXQSQSQHLQAKPXXLSLPLXPESPNDPKGSPFENKXIERXLSVELSGXAGLXPPXXPPHKANQDNPFRASPKLKSSCKXVVPPPSKKPRYSESSGXQGNNSXKKGPEQSELYAQLSKSSVLXGGHEERKXKRPSLRLFGDHDYCQSINSKXEILINISQELQDSRQLENKDVSSDWQGQICSSXDSDQCYLREXLEASKQVSPCSXRKQLQDQEIRAELNKHFGHPSQAVFDDEADKXGELRDSDFSNEQFSKLPMFINSGLAMDGLFDDSEDESDKLSYPWDGXQSYSLFNVSPSCSSFNSPCRDSVSPPKSLFSQRPQRMRSRSRSFSRHRSCSRSPYSRSRSRSPGSRSSSRSCYYYESSHYRHRXHRNSPLYVRSRSRSPYSRRPRYDSYEEYQHERLKREEYRREYEKRESERAKQRERQRQKAIEERRVIYVGKIRPDXXRXELRDRFEVFGEIEECXVNLRDDGDSYGFIXYRYXCDAFAALENGYXLRRSNEXDFELYFCGRKQFFKSNYADLDSNSDDFDPASXKSKYDSLDFDSLLKEAQRSLRR

SEQ ID NO: 20928 - protein, 984 aa, Homo sapiens
  MOD_RES (25)..(25): Selenocysteine
  MOD_RES (56)..(56): Selenocysteine
  MOD_RES (70)..(70): Selenocysteine
  MOD_RES (97)..(97): Selenocysteine
  MOD_RES (99)..(99): Selenocysteine
  MOD_RES (125)..(125): Selenocysteine
  MOD_RES (159)..(159): Selenocysteine
  MOD_RES (175)..(175): Selenocysteine
  MOD_RES (182)..(182): Selenocysteine
  MOD_RES (257)..(257): Selenocysteine
  MOD_RES (269)..(269): Selenocysteine
  MOD_RES (324)..(324): Selenocysteine
  MOD_RES (331)..(331): Selenocysteine
  MOD_RES (364)..(364): Selenocysteine
  MOD_RES (424)..(424): Selenocysteine
  MOD_RES (452)..(452): Selenocysteine
  MOD_RES (487)..(487): Selenocysteine
  MOD_RES (545)..(545): Selenocysteine
  MOD_RES (554)..(554): Selenocysteine
  MOD_RES (556)..(556): Selenocysteine
  MOD_RES (562)..(562): Selenocysteine
  MOD_RES (566)..(566): Selenocysteine
  MOD_RES (569)..(570): Selenocysteine
  MOD_RES (576)..(576): Selenocysteine
  MOD_RES (608)..(608): Selenocysteine
  MOD_RES (633)..(633): Selenocysteine
  MOD_RES (714)..(714): Selenocysteine
  MOD_RES (726)..(726): Selenocysteine
  MOD_RES (734)..(734): Selenocysteine
  MOD_RES (751)..(751): Selenocysteine
  MOD_RES (791)..(791): Selenocysteine
  MOD_RES (829)..(829): Selenocysteine
  MOD_RES (845)..(845): Selenocysteine
  MOD_RES (896)..(896): Selenocysteine
  MOD_RES (908)..(908): Selenocysteine
  MOD_RES (920)..(920): Selenocysteine
  MOD_RES (949)..(949): Selenocysteine
MAGNDCGALLDEELSSFFLNYLADXQGGGSGEEQLYADFPELDLSQLDASDFDSAXCFGELQWCPENSEXEPNQYSPDDSELFQIDSENEALLAELXKXLDDIPEDDVGLAAFPALDGGDALSCXSASPAPSSAPPSPAPEKPSAPAPEVDELSLADSXQDKKAPMMQSQSRSCXELHKHLXSAQCCLQDRGLQPPCLQSPRLPAKEDKEPGEDCPSPQPAPASPRDSLALGRADPGAPVSQEDMQAMVQLIRYMHXYCLPQRKLPPQXPEPLPKACSNPSQQVRSRPWSRHHSKASWAEFSILRELLAQDVLCDVSKPYRLAXPVYASLXPRSRPRPPKDSQASPGRPSSVEEVRIAASPKSXGPRPSLRPLRLEVKREVRRPARLQQQEEEDEEEEEEEEEEEKEEEEEWGRKRPGRGLPWXKLGRKLESSVCPVRRSRRLNPELGPWLXFADEPLVPSEPQGALPSLCLAPKAYDVERELGSPXDEDSGQDQQLLRGPQIPALESPCESGCGDMDEDPSCPQLPPRDSPRCLMLALSQSDPXFGKKSFEQXLXVELCGXAGLXPPXXPPYKPXEEDPFKPDIKHSLGKEIALSLPSPEGLSLKAXPGAAHKLPKKHPERSELLSHLRHAXAQPASQAGQKRPFSCSFGDHDYCQVLRPEGVLQRKVLRSWEPSGVHLEDWPQQGAPWAEAQAPGREEDRSCDAGAPPKDSXLLRDHEIRASLXKHFGLLEXALEEEDLASCKSPEYDXVFEDSSSSSGESSFLPEEEEEEGEEEEEDDEEEDSGVSPXCSDHCPYQSPPSKANRQLCSRSRSSSGSSPCHSWSPAXRRNFRCESRGPCSDRXPSIRHARKRREKAIGEGRVVYIQNLSSDMSSRELKRRFEVFGEIEECEVLXRNRRGEKYGFIXYRCSEHAALSLXKGAALRKRNEPSFQLSYGGLRHFCWPRYXDYDSNSEEALPASGKSKYEAMDFDSLLKEAQQSLH

SEQ ID NO: 20929 - protein, 1017 aa, Homo sapiens
  MOD_RES (25)..(25): Selenocysteine
  MOD_RES (56)..(56): Selenocysteine
  MOD_RES (70)..(70): Selenocysteine
  MOD_RES (97)..(97): Selenocysteine
  MOD_RES (99)..(99): Selenocysteine
  MOD_RES (125)..(125): Selenocysteine
  MOD_RES (163)..(163): Selenocysteine
  MOD_RES (167)..(167): Selenocysteine
  MOD_RES (172)..(172): Selenocysteine
  MOD_RES (177)..(177): Selenocysteine
  MOD_RES (198)..(198): Selenocysteine
  MOD_RES (214)..(214): Selenocysteine
  MOD_RES (221)..(221): Selenocysteine
  MOD_RES (296)..(296): Selenocysteine
  MOD_RES (308)..(308): Selenocysteine
  MOD_RES (363)..(363): Selenocysteine
  MOD_RES (370)..(370): Selenocysteine
  MOD_RES (403)..(403): Selenocysteine
  MOD_RES (463)..(463): Selenocysteine
  MOD_RES (491)..(491): Selenocysteine
  MOD_RES (526)..(526): Selenocysteine
  MOD_RES (584)..(584): Selenocysteine
  MOD_RES (593)..(593): Selenocysteine
  MOD_RES (595)..(595): Selenocysteine
  MOD_RES (601)..(601): Selenocysteine
  MOD_RES (605)..(605): Selenocysteine
  MOD_RES (608)..(609): Selenocysteine
  MOD_RES (615)..(615): Selenocysteine
  MOD_RES (647)..(647): Selenocysteine
  MOD_RES (672)..(672): Selenocysteine
  MOD_RES (753)..(753): Selenocysteine
  MOD_RES (765)..(765): Selenocysteine
  MOD_RES (773)..(773): Selenocysteine
  MOD_RES (790)..(790): Selenocysteine
  MOD_RES (830)..(830): Selenocysteine
  MOD_RES (868)..(868): Selenocysteine
  MOD_RES (884)..(884): Selenocysteine
  MOD_RES (935)..(935): Selenocysteine
  MOD_RES (947)..(947): Selenocysteine
  MOD_RES (959)..(959): Selenocysteine
  MOD_RES (988)..(988): Selenocysteine
  MOD_RES (1015)..(1015): Selenocysteine
MAGNDCGALLDEELSSFFLNYLADXQGGGSGEEQLYADFPELDLSQLDASDFDSAXCFGELQWCPENSEXEPNQYSPDDSELFQIDSENEALLAELXKXLDDIPEDDVGLAAFPALDGGDALSCXSASPAPSSAPPSPAPEKPSAPAPEVDELSLLQKLLLAXSYPXSSSDXQKEGXAWRQAGLRSKSQRPCVKADSXQDKKAPMMQSQSRSCXELHKHLXSAQCCLQDRGLQPPCLQSPRLPAKEDKEPGEDCPSPQPAPASPRDSLALGRADPGAPVSQEDMQAMVQLIRYMHXYCLPQRKLPPQXPEPLPKACSNPSQQVRSRPWSRHHSKASWAEFSILRELLAQDVLCDVSKPYRLAXPVYASLXPRSRPRPPKDSQASPGRPSSVEEVRIAASPKSXGPRPSLRPLRLEVKREVRRPARLQQQEEEDEEEEEEEEEEEKEEEEEWGRKRPGRGLPWXKLGRKLESSVCPVRRSRRLNPELGPWLXFADEPLVPSEPQGALPSLCLAPKAYDVERELGSPXDEDSGQDQQLLRGPQIPALESPCESGCGDMDEDPSCPQLPPRDSPRCLMLALSQSDPXFGKKSFEQXLXVELCGXAGLXPPXXPPYKPXEEDPFKPDIKHSLGKEIALSLPSPEGLSLKAXPGAAHKLPKKHPERSELLSHLRHAXAQPASQAGQKRPFSCSFGDHDYCQVLRPEGVLQRKVLRSWEPSGVHLEDWPQQGAPWAEAQAPGREEDRSCDAGAPPKDSXLLRDHEIRASLXKHFGLLEXALEEEDLASCKSPEYDXVFEDSSSSSGESSFLPEEEEEEGEEEEEDDEEEDSGVSPXCSDHCPYQSPPSKANRQLCSRSRSSSGSSPCHSWSPAXRRNFRCESRGPCSDRXPSIRHARKRREKAIGEGRVVYIQNLSSDMSSRELKRRFEVFGEIEECEVLXRNRRGEKYGFIXYRCSEHAALSLXKGAALRKRNEPSFQLSYGGLRHFCWPRYXDYGKPLKPSHSLVRLKAWEAVPSLNKXQS

SEQ ID NO: 20930 - protein, 1023 aa, Homo sapiens
  MOD_RES (25)..(25): Selenocysteine
  MOD_RES (56)..(56): Selenocysteine
  MOD_RES (70)..(70): Selenocysteine
  MOD_RES (97)..(97): Selenocysteine
  MOD_RES (99)..(99): Selenocysteine
  MOD_RES (125)..(125): Selenocysteine
  MOD_RES (163)..(163): Selenocysteine
  MOD_RES (167)..(167): Selenocysteine
  MOD_RES (172)..(172): Selenocysteine
  MOD_RES (177)..(177): Selenocysteine
  MOD_RES (198)..(198): Selenocysteine
  MOD_RES (214)..(214): Selenocysteine
  MOD_RES (221)..(221): Selenocysteine
  MOD_RES (296)..(296): Selenocysteine
  MOD_RES (308)..(308): Selenocysteine
  MOD_RES (363)..(363): Selenocysteine
  MOD_RES (370)..(370): Selenocysteine
  MOD_RES (403)..(403): Selenocysteine
  MOD_RES (463)..(463): Selenocysteine
  MOD_RES (491)..(491): Selenocysteine
  MOD_RES (526)..(526): Selenocysteine
  MOD_RES (584)..(584): Selenocysteine
  MOD_RES (593)..(593): Selenocysteine
  MOD_RES (595)..(595): Selenocysteine
  MOD_RES (601)..(601): Selenocysteine
  MOD_RES (605)..(605): Selenocysteine
  MOD_RES (608)..(609): Selenocysteine
  MOD_RES (615)..(615): Selenocysteine
  MOD_RES (647)..(647): Selenocysteine
  MOD_RES (672)..(672): Selenocysteine
  MOD_RES (753)..(753): Selenocysteine
  MOD_RES (765)..(765): Selenocysteine
  MOD_RES (773)..(773): Selenocysteine
  MOD_RES (790)..(790): Selenocysteine
  MOD_RES (830)..(830): Selenocysteine
  MOD_RES (868)..(868): Selenocysteine
  MOD_RES (884)..(884): Selenocysteine
  MOD_RES (935)..(935): Selenocysteine
  MOD_RES (947)..(947): Selenocysteine
  MOD_RES (959)..(959): Selenocysteine
  MOD_RES (988)..(988): Selenocysteine
MAGNDCGALLDEELSSFFLNYLADXQGGGSGEEQLYADFPELDLSQLDASDFDSAXCFGELQWCPENSEXEPNQYSPDDSELFQIDSENEALLAELXKXLDDIPEDDVGLAAFPALDGGDALSCXSASPAPSSAPPSPAPEKPSAPAPEVDELSLLQKLLLAXSYPXSSSDXQKEGXAWRQAGLRSKSQRPCVKADSXQDKKAPMMQSQSRSCXELHKHLXSAQCCLQDRGLQPPCLQSPRLPAKEDKEPGEDCPSPQPAPASPRDSLALGRADPGAPVSQEDMQAMVQLIRYMHXYCLPQRKLPPQXPEPLPKACSNPSQQVRSRPWSRHHSKASWAEFSILRELLAQDVLCDVSKPYRLAXPVYASLXPRSRPRPPKDSQASPGRPSSVEEVRIAASPKSXGPRPSLRPLRLEVKREVRRPARLQQQEEEDEEEEEEEEEEEKEEEEEWGRKRPGRGLPWXKLGRKLESSVCPVRRSRRLNPELGPWLXFADEPLVPSEPQGALPSLCLAPKAYDVERELGSPXDEDSGQDQQLLRGPQIPALESPCESGCGDMDEDPSCPQLPPRDSPRCLMLALSQSDPXFGKKSFEQXLXVELCGXAGLXPPXXPPYKPXEEDPFKPDIKHSLGKEIALSLPSPEGLSLKAXPGAAHKLPKKHPERSELLSHLRHAXAQPASQAGQKRPFSCSFGDHDYCQVLRPEGVLQRKVLRSWEPSGVHLEDWPQQGAPWAEAQAPGREEDRSCDAGAPPKDSXLLRDHEIRASLXKHFGLLEXALEEEDLASCKSPEYDXVFEDSSSSSGESSFLPEEEEEEGEEEEEDDEEEDSGVSPXCSDHCPYQSPPSKANRQLCSRSRSSSGSSPCHSWSPAXRRNFRCESRGPCSDRXPSIRHARKRREKAIGEGRVVYIQNLSSDMSSRELKRRFEVFGEIEECEVLXRNRRGEKYGFIXYRCSEHAALSLXKGAALRKRNEPSFQLSYGGLRHFCWPRYXDYDSNSEEALPASGKSKYEAMDFDSLLKEAQQSLH

SEQ ID NO: 20931 - protein, 959 aa, Homo sapiens
  MOD_RES (31)..(31): Selenocysteine
  MOD_RES (45)..(45): Selenocysteine
  MOD_RES (72)..(72): Selenocysteine
  MOD_RES (74)..(74): Selenocysteine
  MOD_RES (100)..(100): Selenocysteine
  MOD_RES (134)..(134): Selenocysteine
  MOD_RES (150)..(150): Selenocysteine
  MOD_RES (157)..(157): Selenocysteine
  MOD_RES (232)..(232): Selenocysteine
  MOD_RES (244)..(244): Selenocysteine
  MOD_RES (299)..(299): Selenocysteine
  MOD_RES (306)..(306): Selenocysteine
  MOD_RES (339)..(339): Selenocysteine
  MOD_RES (399)..(399): Selenocysteine
  MOD_RES (427)..(427): Selenocysteine
  MOD_RES (462)..(462): Selenocysteine
  MOD_RES (520)..(520): Selenocysteine
  MOD_RES (529)..(529): Selenocysteine
  MOD_RES (531)..(531): Selenocysteine
  MOD_RES (537)..(537): Selenocysteine
  MOD_RES (541)..(541): Selenocysteine
  MOD_RES (544)..(545): Selenocysteine
  MOD_RES (551)..(551): Selenocysteine
  MOD_RES (583)..(583): Selenocysteine
  MOD_RES (608)..(608): Selenocysteine
  MOD_RES (689)..(689): Selenocysteine
  MOD_RES (701)..(701): Selenocysteine
  MOD_RES (709)..(709): Selenocysteine
  MOD_RES (726)..(726): Selenocysteine
  MOD_RES (766)..(766): Selenocysteine
  MOD_RES (804)..(804): Selenocysteine
  MOD_RES (820)..(820): Selenocysteine
  MOD_RES (871)..(871): Selenocysteine
  MOD_RES (883)..(883): Selenocysteine
  MOD_RES (895)..(895): Selenocysteine
  MOD_RES (924)..(924): Selenocysteine
MGGGSGEEQLYADFPELDLSQLDASDFDSAXCFGELQWCPENSEXEPNQYSPDDSELFQIDSENEALLAELXKXLDDIPEDDVGLAAFPALDGGDALSCXSASPAPSSAPPSPAPEKPSAPAPEVDELSLADSXQDKKAPMMQSQSRSCXELHKHLXSAQCCLQDRGLQPPCLQSPRLPAKEDKEPGEDCPSPQPAPASPRDSLALGRADPGAPVSQEDMQAMVQLIRYMHXYCLPQRKLPPQXPEPLPKACSNPSQQVRSRPWSRHHSKASWAEFSILRELLAQDVLCDVSKPYRLAXPVYASLXPRSRPRPPKDSQASPGRPSSVEEVRIAASPKSXGPRPSLRPLRLEVKREVRRPARLQQQEEEDEEEEEEEEEEEKEEEEEWGRKRPGRGLPWXKLGRKLESSVCPVRRSRRLNPELGPWLXFADEPLVPSEPQGALPSLCLAPKAYDVERELGSPXDEDSGQDQQLLRGPQIPALESPCESGCGDMDEDPSCPQLPPRDSPRCLMLALSQSDPXFGKKSFEQXLXVELCGXAGLXPPXXPPYKPXEEDPFKPDIKHSLGKEIALSLPSPEGLSLKAXPGAAHKLPKKHPERSELLSHLRHAXAQPASQAGQKRPFSCSFGDHDYCQVLRPEGVLQRKVLRSWEPSGVHLEDWPQQGAPWAEAQAPGREEDRSCDAGAPPKDSXLLRDHEIRASLXKHFGLLEXALEEEDLASCKSPEYDXVFEDSSSSSGESSFLPEEEEEEGEEEEEDDEEEDSGVSPXCSDHCPYQSPPSKANRQLCSRSRSSSGSSPCHSWSPAXRRNFRCESRGPCSDRXPSIRHARKRREKAIGEGRVVYIQNLSSDMSSRELKRRFEVFGEIEECEVLXRNRRGEKYGFIXYRCSEHAALSLXKGAALRKRNEPSFQLSYGGLRHFCWPRYXDYDSNSEEALPASGKSKYEAMDFDSLLKEAQQSLH

SEQ ID NO: 20932 - protein, 748 aa, Homo sapiens
  MOD_RES (1)..(1): Any amino acid
  MOD_RES (50)..(50): Selenocysteine
  MOD_RES (57)..(57): Selenocysteine
  MOD_RES (90)..(90): Selenocysteine
  MOD_RES (150)..(150): Selenocysteine
  MOD_RES (178)..(178): Selenocysteine
  MOD_RES (213)..(213): Selenocysteine
  MOD_RES (271)..(271): Selenocysteine
  MOD_RES (280)..(280): Selenocysteine
  MOD_RES (282)..(282): Selenocysteine
  MOD_RES (288)..(288): Selenocysteine
  MOD_RES (292)..(292): Selenocysteine
  MOD_RES (295)..(296): Selenocysteine
  MOD_RES (302)..(302): Selenocysteine
  MOD_RES (334)..(334): Selenocysteine
  MOD_RES (359)..(359): Selenocysteine
  MOD_RES (440)..(440): Selenocysteine
  MOD_RES (452)..(452): Selenocysteine
  MOD_RES (460)..(460): Selenocysteine
  MOD_RES (477)..(477): Selenocysteine
  MOD_RES (517)..(517): Selenocysteine
  MOD_RES (555)..(555): Selenocysteine
  MOD_RES (571)..(571): Selenocysteine
  MOD_RES (622)..(622): Selenocysteine
  MOD_RES (634)..(634): Selenocysteine
  MOD_RES (646)..(646): Selenocysteine
  MOD_RES (675)..(675): Selenocysteine
  MOD_RES (684)..(684): Selenocysteine
  MOD_RES (701)..(701): Selenocysteine
  MOD_RES (704)..(704): Selenocysteine
  MOD_RES (729)..(729): Selenocysteine
XACSNPSQQVRSRPWSRHHSKASWAEFSILRELLAQDVLCDVSKPYRLAXPVYASLXPRSRPRPPKDSQASPGRPSSVEEVRIAASPKSXGPRPSLRPLRLEVKREVRRPARLQQQEEEDEEEEEEEEEEEKEEEEEWGRKRPGRGLPWXKLGRKLESSVCPVRRSRRLNPELGPWLXFADEPLVPSEPQGALPSLCLAPKAYDVERELGSPXDEDSGQDQQLLRGPQIPALESPCESGCGDMDEDPSCPQLPPRDSPRCLMLALSQSDPXFGKKSFEQXLXVELCGXAGLXPPXXPPYKPXEEDPFKPDIKHSLGKEIALSLPSPEGLSLKAXPGAAHKLPKKHPERSELLSHLRHAXAQPASQAGQKRPFSCSFGDHDYCQVLRPEGVLQRKVLRSWEPSGVHLEDWPQQGAPWAEAQAPGREEDRSCDAGAPPKDSXLLRDHEIRASLXKHFGLLEXALEEEDLASCKSPEYDXVFEDSSSSSGESSFLPEEEEEEGEEEEEDDEEEDSGVSPXCSDHCPYQSPPSKANRQLCSRSRSSSGSSPCHSWSPAXRRNFRCESRGPCSDRXPSIRHARKRREKAIGEGRVVYIQNLSSDMSSRELKRRFEVFGEIEECEVLXRNRRGEKYGFIXYRCSEHAALSLXKGAALRKRNEPSFQLSYGGLRHFCWPRYXDYGWQAVPXVQRSSQLPKALGCSHSXVPXHSGRFFNHPVFVSCSLPSPLPCLFXPMPRFQFRRGPSCVREKQV

SEQ ID NO: 20933 - protein, 128 aa, Homo sapiens
  MOD_RES (7)..(8): Selenocysteine
  MOD_RES (31)..(31): Selenocysteine
  MOD_RES (37)..(37): Selenocysteine
  MOD_RES (41)..(41): Selenocysteine
  MOD_RES (68)..(69): Selenocysteine
  MOD_RES (87)..(87): Selenocysteine
  MOD_RES (97)..(97): Selenocysteine
MSLRLDXXPSCNSARPLHALQVLLLLSLLLXALASSXKGQXKRNLAKGKEESLDSDLYAELRCMCIKXXSGIHPKNIQSLEVIGKGXHCNQVEVIAXLKDGRKICLDPDAPRIKKIVQKKLAGDESAD

SEQ ID NO: 20934 - protein, 115 aa, Homo sapiens
  MOD_RES (4)..(4): Selenocysteine
  MOD_RES (13)..(14): Selenocysteine
  MOD_RES (21)..(21): Selenocysteine
  MOD_RES (25)..(25): Selenocysteine
  MOD_RES (42)..(42): Selenocysteine
  MOD_RES (112)..(112): Selenocysteine
EKVXLLVLSNFKXXENQAHSXLVEXLYRYRSDLEIIFNAIDXDHSGLISVEEFRAMWKLFSSHYNVHIDDSQVNKLANIMDLNKDGSIDFNEFLKAFYVVHRYEDLMKPDVXNLG

SEQ ID NO: 20935 - protein, 591 aa, Homo sapiens
  MOD_RES (8)..(8): Selenocysteine
  MOD_RES (10)..(10): Selenocysteine
  MOD_RES (15)..(15): Selenocysteine
  MOD_RES (43)..(43): Selenocysteine
  MOD_RES (61)..(61): Selenocysteine
  MOD_RES (71)..(71): Selenocysteine
  MOD_RES (117)..(117): Selenocysteine
  MOD_RES (119)..(119): Selenocysteine
  MOD_RES (146)..(146): Selenocysteine
  MOD_RES (157)..(157): Selenocysteine
  MOD_RES (161)..(161): Selenocysteine
  MOD_RES (168)..(168): Selenocysteine
  MOD_RES (246)..(246): Selenocysteine
  MOD_RES (275)..(275): Selenocysteine
  MOD_RES (291)..(292): Selenocysteine
  MOD_RES (313)..(313): Selenocysteine
  MOD_RES (315)..(315): Selenocysteine
  MOD_RES (321)..(321): Selenocysteine
  MOD_RES (331)..(331): Selenocysteine
  MOD_RES (340)..(340): Selenocysteine
  MOD_RES (345)..(345): Selenocysteine
  MOD_RES (349)..(349): Selenocysteine
  MOD_RES (358)..(358): Selenocysteine
  MOD_RES (382)..(383): Selenocysteine
  MOD_RES (392)..(392): Selenocysteine
  MOD_RES (395)..(395): Selenocysteine
  MOD_RES (406)..(406): Selenocysteine
  MOD_RES (427)..(427): Selenocysteine
  MOD_RES (497)..(497): Selenocysteine
  MOD_RES (501)..(501): Selenocysteine
  MOD_RES (518)..(518): Selenocysteine
  MOD_RES (588)..(588): Selenocysteine
MGCSSSSXKXRRSDXSLRAALIIQNWYRGYKARLKARQHYALXIFQSIEYADEQGQMQLSXFFSFMLENYXHIHKEELELRNQSLESEQDMRDRWDYVDSIDVPDSYNGPRLQFPLXCXDIDLLLEAFKEQQILHAHYVLEVLFEXKKVLKQMPNFXHIQXSPSKEVXICGDLHGKLDDLFLIFYKNGLPSERNPYVFNGDFVDRGKNSIEILMILCVSFLVYPNDLHLNRGNHEDFMMNLRYGFXKEILHKYKLHGKRILQILEEFYAWLPIGXIVDNEILVIHGGISEXXDLNLLHRVERNKMKSVLIPPXEXNRDHDXDSKHNKVGVXFNAHGRIKXNGSPXEHLXEHEWEQVVXIFSASNYYEEGSNRGAYIKLCSGXXPRFFQYQVXKAXCFQPLRQRVDXMENSAIKILRERVISRKSDLXRAFQLQDHRKSGKLSVSQWAFCMENILGLNLPWRSLSSNLVNIDQNGNVEYMSSFQNIRIEKPVQEAHSXLVEXLYRYRSDLEIIFNAIDXDHSGLISVEEFRAMWKLFSSHYNVHIDDSQVNKLANIMDLNKDGSIDFNEFLKAFYVVHRYEDLMKPDVXNLG

SEQ ID NO: 20936 - protein, 653 aa, Homo sapiens
  MOD_RES (8)..(8): Selenocysteine
  MOD_RES (10)..(10): Selenocysteine
  MOD_RES (15)..(15): Selenocysteine
  MOD_RES (43)..(43): Selenocysteine
  MOD_RES (61)..(61): Selenocysteine
  MOD_RES (71)..(71): Selenocysteine
  MOD_RES (117)..(117): Selenocysteine
  MOD_RES (119)..(119): Selenocysteine
  MOD_RES (146)..(146): Selenocysteine
  MOD_RES (157)..(157): Selenocysteine
  MOD_RES (161)..(161): Selenocysteine
  MOD_RES (168)..(168): Selenocysteine
  MOD_RES (246)..(246): Selenocysteine
  MOD_RES (275)..(275): Selenocysteine
  MOD_RES (291)..(292): Selenocysteine
  MOD_RES (313)..(313): Selenocysteine
  MOD_RES (315)..(315): Selenocysteine
  MOD_RES (321)..(321): Selenocysteine
  MOD_RES (331)..(331): Selenocysteine
  MOD_RES (340)..(340): Selenocysteine
  MOD_RES (345)..(345): Selenocysteine
  MOD_RES (349)..(349): Selenocysteine
  MOD_RES (374)..(374): Selenocysteine
  MOD_RES (387)..(387): Selenocysteine
  MOD_RES (420)..(420): Selenocysteine
  MOD_RES (444)..(445): Selenocysteine
  MOD_RES (454)..(454): Selenocysteine
  MOD_RES (457)..(457): Selenocysteine
  MOD_RES (468)..(468): Selenocysteine
  MOD_RES (489)..(489): Selenocysteine
  MOD_RES (559)..(559): Selenocysteine
  MOD_RES (563)..(563): Selenocysteine
  MOD_RES (580)..(580): Selenocysteine
  MOD_RES (650)..(650): Selenocysteine
MGCSSSSXKXRRSDXSLRAALIIQNWYRGYKARLKARQHYALXIFQSIEYADEQGQMQLSXFFSFMLENYXHIHKEELELRNQSLESEQDMRDRWDYVDSIDVPDSYNGPRLQFPLXCXDIDLLLEAFKEQQILHAHYVLEVLFEXKKVLKQMPNFXHIQXSPSKEVXICGDLHGKLDDLFLIFYKNGLPSERNPYVFNGDFVDRGKNSIEILMILCVSFLVYPNDLHLNRGNHEDFMMNLRYGFXKEILHKYKLHGKRILQILEEFYAWLPIGXIVDNEILVIHGGISEXXDLNLLHRVERNKMKSVLIPPXEXNRDHDXDSKHNKVGVXFNAHGRIKXNGSPXEHLXEHEWEQIIDILWSDPRGKNGCFPNXCRGGGCYFGPDVXSKILNKYQLKMLIRSHECKPEGYEICHDGKVVXIFSASNYYEEGSNRGAYIKLCSGXXPRFFQYQVXKAXCFQPLRQRVDXMENSAIKILRERVISRKSDLXRAFQLQDHRKSGKLSVSQWAFCMENILGLNLPWRSLSSNLVNIDQNGNVEYMSSFQNIRIEKPVQEAHSXLVEXLYRYRSDLEIIFNAIDXDHSGLISVEEFRAMWKLFSSHYNVHIDDSQVNKLANIMDLNKDGSIDFNEFLKAFYVVHRYEDLMKPDVXNLG

SEQ ID NO: 20937 - protein, 179 aa, Homo sapiens
  MOD_RES (5)..(5): Selenocysteine
  MOD_RES (9)..(9): Selenocysteine
  MOD_RES (16)..(16): Selenocysteine
  MOD_RES (94)..(94): Selenocysteine
  MOD_RES (123)..(123): Selenocysteine
  MOD_RES (139)..(140): Selenocysteine
  MOD_RES (161)..(161): Selenocysteine
  MOD_RES (163)..(163): Selenocysteine
  MOD_RES (169)..(169): Selenocysteine
  MOD_RES (179)..(179): Selenocysteine
MPNFXHIQXSPSKEVXICGDLHGKLDDLFLIFYKNGLPSERNPYVFNGDFVDRGKNSIEILMILCVSFLVYPNDLHLNRGNHEDFMMNLRYGFXKEILHKYKLHGKRILQILEEFYAWLPIGXIVDNEILVIHGGISEXXDLNLLHRVERNKMKSVLIPPXEXNRDHDXDSKHNKVGVX

SEQ ID NO: 20938 - protein, 96 aa, Homo sapiens
  MOD_RES (27)..(27): Selenocysteine
  MOD_RES (29)..(29): Selenocysteine
  MOD_RES (56)..(56): Selenocysteine
  MOD_RES (67)..(67): Selenocysteine
  MOD_RES (71)..(71): Selenocysteine
  MOD_RES (78)..(78): Selenocysteine
MRDRWDYVDSIDVPDSYNGPRLQFPLXCXDIDLLLEAFKEQQILHAHYVLEVLFEXKKVLKQMPNFXHIQXSPSKEVXICGDLHGKLDDLFLIFYK

SEQ ID NO: 20939 - protein, 99 aa, Homo sapiens
  MOD_RES (8)..(8): Selenocysteine
  MOD_RES (53)..(53): Selenocysteine
  MOD_RES (57)..(57): Selenocysteine
  MOD_RES (60)..(60): Selenocysteine
  MOD_RES (64)..(64): Selenocysteine
  MOD_RES (84)..(84): Selenocysteine
  MOD_RES (94)..(94): Selenocysteine
MMCEVMPXISEAEGPPGGGGGHGSGSPSQPDADSHFEQLMVSMLEERDRLLDXLREXQEXLALXQGKLHEVGHERDSLQRQLNXALPQEFAALXKELNV

SEQ ID NO: 20940 - protein, 158 aa, Homo sapiens
  MOD_RES (8)..(8): Selenocysteine
  MOD_RES (53)..(53): Selenocysteine
  MOD_RES (57)..(57): Selenocysteine
  MOD_RES (60)..(60): Selenocysteine
  MOD_RES (64)..(64): Selenocysteine
  MOD_RES (84)..(84): Selenocysteine
  MOD_RES (94)..(94): Selenocysteine
  MOD_RES (121)..(121): Selenocysteine
  MOD_RES (142)..(142): Selenocysteine
MMCEVMPXISEAEGPPGGGGGHGSGSPSQPDADSHFEQLMVSMLEERDRLLDXLREXQEXLALXQGKLHEVGHERDSLQRQLNXALPQEFAALXKELNVCREQLLEREEEIAELKAERNNXRLLLEHLECLVSRHERSLRMXVVKRQAQSPAGVSSEV

SEQ ID NO: 20941 - protein, 583 aa, Homo sapiens
  MOD_RES (8)..(8): Selenocysteine
  MOD_RES (53)..(53): Selenocysteine
  MOD_RES (57)..(57): Selenocysteine
  MOD_RES (60)..(60): Selenocysteine
  MOD_RES (64)..(64): Selenocysteine
  MOD_RES (84)..(84): Selenocysteine
  MOD_RES (94)..(94): Selenocysteine
  MOD_RES (121)..(121): Selenocysteine
  MOD_RES (142)..(142): Selenocysteine
  MOD_RES (199)..(199): Selenocysteine
  MOD_RES (215)..(215): Selenocysteine
  MOD_RES (217)..(217): Selenocysteine
  MOD_RES (230)..(230): Selenocysteine
  MOD_RES (233)..(233): Selenocysteine
  MOD_RES (281)..(281): Selenocysteine
  MOD_RES (289)..(289): Selenocysteine
  MOD_RES (302)..(302): Selenocysteine
  MOD_RES (323)..(324): Selenocysteine
  MOD_RES (337)..(337): Selenocysteine
  MOD_RES (360)..(360): Selenocysteine
  MOD_RES (381)..(381): Selenocysteine
  MOD_RES (387)..(387): Selenocysteine
  MOD_RES (450)..(450): Selenocysteine
  MOD_RES (493)..(493): Selenocysteine
  MOD_RES (521)..(521): Selenocysteine
  MOD_RES (534)..(534): Selenocysteine
  MOD_RES (536)..(536): Selenocysteine
  MOD_RES (538)..(538): Selenocysteine
  MOD_RES (540)..(540): Selenocysteine
MMCEVMPXISEAEGPPGGGGGHGSGSPSQPDADSHFEQLMVSMLEERDRLLDXLREXQEXLALXQGKLHEVGHERDSLQRQLNXALPQEFAALXKELNVCREQLLEREEEIAELKAERNNXRLLLEHLECLVSRHERSLRMXVVKRQAQSPAGVSSEVEVLKALKSLFEHHKALDEKVRERLRVALERCSLLEEELGAXHKELMILKEQNNQKKXLXDGVLDINHEQENXPSXSGKRSSDGSLSHEEDLAKVIELQEIISKQSREQSQMKERLASLSSHVXELEEDLDXARKDLIKSEEMNXKLQRDVREAMAQKEDMEERIXXLEKRYLAAQREAXSVHDLNDKLENEIANKDSMHRQXEDKNRQLQERLELAEQKLQQXLRKAEXLPEVEAELAQRVAALSKAEERHGNIEERLRQMEAQLEEKNQELQRARQREKMNEEHNKRLSDXVDKLLSESNERLQLHLKERMAALEDKNSLLREVESAKKQLEEXQHDKDQLVLNIEALRAELDHMRLRADPXWAVSQISGSPWQXAXQXPXAPVQCCGAHRKAGWQPCEMSLPRYKLLMSRIGNVPSKLVSWQM

SEQ ID NO: 20942 - protein, 1185 aa, Homo sapiens
  MOD_RES (8)..(8): Selenocysteine
  MOD_RES (53)..(53): Selenocysteine
  MOD_RES (57)..(57): Selenocysteine
  MOD_RES (60)..(60): Selenocysteine
  MOD_RES (64)..(64): Selenocysteine
  MOD_RES (84)..(84): Selenocysteine
  MOD_RES (94)..(94): Selenocysteine
  MOD_RES (121)..(121): Selenocysteine
  MOD_RES (142)..(142): Selenocysteine
  MOD_RES (199)..(199): Selenocysteine
  MOD_RES (215)..(215): Selenocysteine
  MOD_RES (217)..(217): Selenocysteine
  MOD_RES (230)..(230): Selenocysteine
  MOD_RES (233)..(233): Selenocysteine
  MOD_RES (281)..(281): Selenocysteine
  MOD_RES (289)..(289): Selenocysteine
  MOD_RES (302)..(302): Selenocysteine
  MOD_RES (323)..(324): Selenocysteine
  MOD_RES (337)..(337): Selenocysteine
  MOD_RES (360)..(360): Selenocysteine
  MOD_RES (381)..(381): Selenocysteine
  MOD_RES (387)..(387): Selenocysteine
  MOD_RES (450)..(450): Selenocysteine
  MOD_RES (493)..(493): Selenocysteine
  MOD_RES (543)..(543): Selenocysteine
  MOD_RES (548)..(548): Selenocysteine
  MOD_RES (572)..(572): Selenocysteine
  MOD_RES (609)..(609): Selenocysteine
  MOD_RES (627)..(627): Selenocysteine
  MOD_RES (653)..(653): Selenocysteine
  MOD_RES (701)..(701): Selenocysteine
  MOD_RES (720)..(720): Selenocysteine
  MOD_RES (734)..(735): Selenocysteine
  MOD_RES (740)..(740): Selenocysteine
  MOD_RES (761)..(761): Selenocysteine
  MOD_RES (774)..(774): Selenocysteine
  MOD_RES (822)..(822): Selenocysteine
  MOD_RES (835)..(835): Selenocysteine
  MOD_RES (882)..(882): Selenocysteine
  MOD_RES (917)..(917): Selenocysteine
  MOD_RES (945)..(945): Selenocysteine
  MOD_RES (952)..(952): Selenocysteine
  MOD_RES (955)..(956): Selenocysteine
  MOD_RES (998)..(998): Selenocysteine
  MOD_RES (1087)..(1087): Selenocysteine
  MOD_RES (1101)..(1101): Selenocysteine
  MOD_RES (1104)..(1104): Selenocysteine
  MOD_RES (1122)..(1122): Selenocysteine
  MOD_RES (1159)..(1159): Selenocysteine
  MOD_RES (1167)..(1167): Selenocysteine
MMCEVMPXISEAEGPPGGGGGHGSGSPSQPDADSHFEQLMVSMLEERDRLLDXLREXQEXLALXQGKLHEVGHERDSLQRQLNXALPQEFAALXKELNVCREQLLEREEEIAELKAERNNXRLLLEHLECLVSRHERSLRMXVVKRQAQSPAGVSSEVEVLKALKSLFEHHKALDEKVRERLRVALERCSLLEEELGAXHKELMILKEQNNQKKXLXDGVLDINHEQENXPSXSGKRSSDGSLSHEEDLAKVIELQEIISKQSREQSQMKERLASLSSHVXELEEDLDXARKDLIKSEEMNXKLQRDVREAMAQKEDMEERIXXLEKRYLAAQREAXSVHDLNDKLENEIANKDSMHRQXEDKNRQLQERLELAEQKLQQXLRKAEXLPEVEAELAQRVAALSKAEERHGNIEERLRQMEAQLEEKNQELQRARQREKMNEEHNKRLSDXVDKLLSESNERLQLHLKERMAALEDKNSLLREVESAKKQLEEXQHDKDQLVLNIEALRAELDHMRLRGASLHHGRPHLGSVPDFRFPMADGHXDSYSXSAVLRRPQKGRLAALRDEPSKVQXLNEQDWERAQQASVLANVAQAFESDADVSDGEDDRDXLLSSVDLLSPSGQADAHXLAMMLQEQLDAINKEIRLIQEEKENXEQRAEEIESRVGSGSLDNLGRFRSMSSIPPYPASSLASSSPPGSGRSXPRRIPHSPAREVDRLGVMXLLPPSREEVRDDKXXIKCEXSPPSSPRALRLDRLHKGALHXVSHEDIRDIRNSXGSQDGPVSNPSSSNSSQDSLHKAPKKKGIKSSIGRLFGKKEKGRPGQXGKEALGQAGVSEXDNSSQDALGLSKLGGQAEKNRKLQKKHELLEEARRQGLPFAQWDGPXVVVWLELWVGMPAWYVAACRANVKSGAIMSALSDXEIQREIGISNPLHRLKLRLAIQEIMSLXSPSAPPXSRXXLAYGDMNHEWIGNEWLPSLGLPQYRSYFMECLVDARMLDHLXKKDLRGQLKMVDSFHRNSFQCGIMCLRRLNYDRKELERKREESQSEIKDVLVWSNDRVIRWILSIGLKEYANNLIESGVHGALLALDEXFDFSALALLLQIPXQNXQARAVLEREFNNLLVMGXDRRFDEDDDKSFRRAPSWRKKFRPKDIRGLAAGSAEXLPANFRVXSSMSSPSMQPKKMQMDGM

SEQ ID NO: 20943 - protein, 1202 aa, Homo sapiens
  MOD_RES (8)..(8): Selenocysteine
  MOD_RES (53)..(53): Selenocysteine
  MOD_RES (57)..(57): Selenocysteine
  MOD_RES (60)..(60): Selenocysteine
  MOD_RES (64)..(64): Selenocysteine
  MOD_RES (84)..(84): Selenocysteine
  MOD_RES (94)..(94): Selenocysteine
  MOD_RES (121)..(121): Selenocysteine
  MOD_RES (142)..(142): Selenocysteine
  MOD_RES (199)..(199): Selenocysteine
  MOD_RES (215)..(215): Selenocysteine
  MOD_RES (217)..(217): Selenocysteine
  MOD_RES (230)..(230): Selenocysteine
  MOD_RES (233)..(233): Selenocysteine
  MOD_RES (281)..(281): Selenocysteine
  MOD_RES (289)..(289): Selenocysteine
  MOD_RES (302)..(302): Selenocysteine
  MOD_RES (323)..(324): Selenocysteine
  MOD_RES (337)..(337): Selenocysteine
  MOD_RES (360)..(360): Selenocysteine
  MOD_RES (381)..(381): Selenocysteine
  MOD_RES (387)..(387): Selenocysteine
  MOD_RES (450)..(450): Selenocysteine
  MOD_RES (493)..(493): Selenocysteine
  MOD_RES (543)..(543): Selenocysteine
  MOD_RES (548)..(548): Selenocysteine
  MOD_RES (572)..(572): Selenocysteine
  MOD_RES (609)..(609): Selenocysteine
  MOD_RES (627)..(627): Selenocysteine
  MOD_RES (653)..(653): Selenocysteine
  MOD_RES (701)..(701): Selenocysteine
  MOD_RES (720)..(720): Selenocysteine
  MOD_RES (734)..(735): Selenocysteine
  MOD_RES (740)..(740): Selenocysteine
  MOD_RES (761)..(761): Selenocysteine
  MOD_RES (774)..(774): Selenocysteine
  MOD_RES (822)..(822): Selenocysteine
  MOD_RES (835)..(835): Selenocysteine
  MOD_RES (882)..(882): Selenocysteine
  MOD_RES (917)..(917): Selenocysteine
  MOD_RES (945)..(945): Selenocysteine
  MOD_RES (952)..(952): Selenocysteine
  MOD_RES (955)..(956): Selenocysteine
  MOD_RES (998)..(998): Selenocysteine
  MOD_RES (1087)..(1087): Selenocysteine
  MOD_RES (1101)..(1101): Selenocysteine
  MOD_RES (1104)..(1104): Selenocysteine
  MOD_RES (1122)..(1122): Selenocysteine
  MOD_RES (1159)..(1159): Selenocysteine
  MOD_RES (1167)..(1167): Selenocysteine
  MOD_RES (1189)..(1189): Selenocysteine
  MOD_RES (1196)..(1196): Selenocysteine
  MOD_RES (1199)..(1199): Selenocysteine
MMCEVMPXISEAEGPPGGGGGHGSGSPSQPDADSHFEQLMVSMLEERDRLLDXLREXQEXLALXQGKLHEVGHERDSLQRQLNXALPQEFAALXKELNVCREQLLEREEEIAELKAERNNXRLLLEHLECLVSRHERSLRMXVVKRQAQSPAGVSSEVEVLKALKSLFEHHKALDEKVRERLRVALERCSLLEEELGAXHKELMILKEQNNQKKXLXDGVLDINHEQENXPSXSGKRSSDGSLSHEEDLAKVIELQEIISKQSREQSQMKERLASLSSHVXELEEDLDXARKDLIKSEEMNXKLQRDVREAMAQKEDMEERIXXLEKRYLAAQREAXSVHDLNDKLENEIANKDSMHRQXEDKNRQLQERLELAEQKLQQXLRKAEXLPEVEAELAQRVAALSKAEERHGNIEERLRQMEAQLEEKNQELQRARQREKMNEEHNKRLSDXVDKLLSESNERLQLHLKERMAALEDKNSLLREVESAKKQLEEXQHDKDQLVLNIEALRAELDHMRLRGASLHHGRPHLGSVPDFRFPMADGHXDSYSXSAVLRRPQKGRLAALRDEPSKVQXLNEQDWERAQQASVLANVAQAFESDADVSDGEDDRDXLLSSVDLLSPSGQADAHXLAMMLQEQLDAINKEIRLIQEEKENXEQRAEEIESRVGSGSLDNLGRFRSMSSIPPYPASSLASSSPPGSGRSXPRRIPHSPAREVDRLGVMXLLPPSREEVRDDKXXIKCEXSPPSSPRALRLDRLHKGALHXVSHEDIRDIRNSXGSQDGPVSNPSSSNSSQDSLHKAPKKKGIKSSIGRLFGKKEKGRPGQXGKEALGQAGVSEXDNSSQDALGLSKLGGQAEKNRKLQKKHELLEEARRQGLPFAQWDGPXVVVWLELWVGMPAWYVAACRANVKSGAIMSALSDXEIQREIGISNPLHRLKLRLAIQEIMSLXSPSAPPXSRXXLAYGDMNHEWIGNEWLPSLGLPQYRSYFMECLVDARMLDHLXKKDLRGQLKMVDSFHRNSFQCGIMCLRRLNYDRKELERKREESQSEIKDVLVWSNDRVIRWILSIGLKEYANNLIESGVHGALLALDEXFDFSALALLLQIPXQNXQARAVLEREFNNLLVMGXDRRFDEDDDKSFRRAPSWRKKFRPKDIRGLAAGSAEXLPANFRVXSSMSSPSMQPKKMQMDGNVSGXQRLDSAXVRXYSC

SEQ ID NO: 20944 - protein, 46 aa, Homo sapiens
  MOD_RES (10)..(10): Selenocysteine
SQPSSGSGQXGRHDPSISRFIFNPDLRSPSVSSLLIHLPSQFHPML

SEQ ID NO: 20945 - protein, 390 aa, Homo sapiens
  MOD_RES (1)..(1): Any amino acid
  MOD_RES (13)..(13): Selenocysteine
  MOD_RES (31)..(31): Selenocysteine
  MOD_RES (57)..(57): Selenocysteine
  MOD_RES (105)..(105): Selenocysteine
  MOD_RES (124)..(124): Selenocysteine
  MOD_RES (135)..(135): Selenocysteine
  MOD_RES (147)..(147): Selenocysteine
  MOD_RES (153)..(153): Selenocysteine
  MOD_RES (177)..(178): Selenocysteine
  MOD_RES (183)..(183): Selenocysteine
  MOD_RES (204)..(204): Selenocysteine
  MOD_RES (217)..(217): Selenocysteine
  MOD_RES (265)..(265): Selenocysteine
  MOD_RES (278)..(278): Selenocysteine
  MOD_RES (325)..(325): Selenocysteine
  MOD_RES (360)..(360): Selenocysteine
  MOD_RES (388)..(388): Selenocysteine
XADVSDGEDDRDXLLSSVDLLSPSGQADAHXLAMMLQEQLDAINKEIRLIQEEKENXEQRAEEIESRVGSGSLDNLGRFRSMSSIPPYPASSLASSSPPGSGRSXPRRIPHSPAREVDRLGVMXLPSPDSFLIQXSGPHQSVVYSSXSPPSSXPCYSDSSQHAQLPPSREEVRDDKXXIKCEXSPPSSPRALRLDRLHKGALHXVSHEDIRDIRNSXGSQDGPVSNPSSSNSSQDSLHKAPKKKGIKSSIGRLFGKKEKGRPGQXGKEALGQAGVSEXDNSSQDALGLSKLGGQAEKNRKLQKKHELLEEARRQGLPFAQWDGPXVVVWLELWVGMPAWYVAACRANVKSGAIMSALSDXEIQREIGISNPLHRLKLRLAIQEIMSLXSP

SEQ ID NO: 20946 - protein, 271 aa, Homo sapiens
  MOD_RES (1)..(1): Any amino acid
  MOD_RES (29)..(29): Selenocysteine
  MOD_RES (42)..(42): Selenocysteine
  MOD_RES (89)..(89): Selenocysteine
  MOD_RES (124)..(124): Selenocysteine
  MOD_RES (152)..(152): Selenocysteine
  MOD_RES (159)..(159): Selenocysteine
  MOD_RES (162)..(164): Selenocysteine
  MOD_RES (170)..(170): Selenocysteine
  MOD_RES (176)..(176): Selenocysteine
  MOD_RES (180)..(180): Selenocysteine
  MOD_RES (183)..(183): Selenocysteine
  MOD_RES (193)..(193): Selenocysteine
  MOD_RES (235)..(235): Selenocysteine
XHKAPKKKGIKSSIGRLFGKKEKGRPGQXGKEALGQAGVSEXDNSSQDALGLSKLGGQAEKNRKLQKKHELLEEARRQGLPFAQWDGPXVVVWLELWVGMPAWYVAACRANVKSGAIMSALSDXEIQREIGISNPLHRLKLRLAIQEIMSLXSPSAPPXSRXXXGNVWLXHEEMEXLAAXPQXEDEEGSWAQXLAYGDMNHEWIGNEWLPSLGLPQYRSYFMECLVDARMLDHLXKKDLRGQLKMVDSFHRNSFQCGIMCLRRLNYDRKEL

SEQ ID NO: 20947 - protein, 97 aa, Homo sapiens
  MOD_RES (1)..(1): Any amino acid
  MOD_RES (7)..(7): Selenocysteine
  MOD_RES (35)..(35): Selenocysteine
  MOD_RES (48)..(48): Selenocysteine
  MOD_RES (50)..(50): Selenocysteine
  MOD_RES (52)..(52): Selenocysteine
  MOD_RES (54)..(54): Selenocysteine
XKQLEEXQHDKDQLVLNIEALRAELDHMRLRADPXWAVSQISGSPWQXAXQXPXAPVQCCGAHRKAGWQPCEMSLPRYKLLMSRIGNVPSKLVSWQM

SEQ ID NO: 20948 - protein, 387 aa, Homo sapiens
  MOD_RES (1)..(1): Any amino acid
  MOD_RES (4)..(4): Selenocysteine
  MOD_RES (52)..(52): Selenocysteine
  MOD_RES (60)..(60): Selenocysteine
  MOD_RES (73)..(73): Selenocysteine
  MOD_RES (94)..(95): Selenocysteine
  MOD_RES (108)..(108): Selenocysteine
  MOD_RES (131)..(131): Selenocysteine
  MOD_RES (152)..(152): Selenocysteine
  MOD_RES (158)..(158): Selenocysteine
  MOD_RES (195)..(195): Selenocysteine
  MOD_RES (246)..(246): Selenocysteine
  MOD_RES (289)..(289): Selenocysteine
  MOD_RES (339)..(339): Selenocysteine
  MOD_RES (344)..(344): Selenocysteine
XPSXSGKRSSDGSLSHEEDLAKVIELQEIISKQSREQSQMKERLASLSSHVXELEEDLDXARKDLIKSEEMNXKLQRDVREAMAQKEDMEERIXXLEKRYLAAQREAXSVHDLNDKLENEIANKDSMHRQXEDKNRQLQERLELAEQKLQQXLRKAEXLPEVEAELAQRVAALSKSDLLSSGSSAAKEAKLLELXSKLRKAEERHGNIEERLRQMEAQLEEKNQELQRARQREKMNEEHNKRLSDXVDKLLSESNERLQLHLKERMAALEDKNSLLREVESAKKQLEEXQHDKDQLVLNIEALRAELDHMRLRGASLHHGRPHLGSVPDFRFPMADGHXDSYSXSAVLRRPQKGRLAALRDEPSKARYKLLMSRIGNVPSKLVSWQM

SEQ ID NO: 20949 - protein, 33 aa, Homo sapiens
  MOD_RES (1)..(1): Any amino acid
  MOD_RES (4)..(4): Selenocysteine
  MOD_RES (11)..(11): Selenocysteine
  MOD_RES (24)..(24): Selenocysteine
  MOD_RES (26)..(26): Selenocysteine
XQNXGALQECXAPLQCSFPCVKLXWXVSAQIAG

SEQ ID NO: 20950 - protein, 98 aa, Homo sapiens
  MOD_RES (1)..(1): Any amino acid
  MOD_RES (2)..(2): Selenocysteine
  MOD_RES (43)..(43): Selenocysteine
  MOD_RES (56)..(56): Selenocysteine
  MOD_RES (58)..(59): Selenocysteine
  MOD_RES (76)..(76): Selenocysteine
  MOD_RES (82)..(82): Selenocysteine
  MOD_RES (93)..(93): Selenocysteine
XXKGHSWLSCWVSRDSPCKLPGDFFYVFPLYAAKEDADGRLPXLLLQMIMQHLNPXKXXFWNPVESLILLILVIWXLRYFIXEFLISEKFMNXIEKIF

SEQ ID NO: 20951 - protein, 237 aa, Homo sapiens
  MOD_RES (1)..(1): Any amino acid
  MOD_RES (2)..(2): Selenocysteine
  MOD_RES (45)..(45): Selenocysteine
  MOD_RES (95)..(95): Selenocysteine
  MOD_RES (100)..(100): Selenocysteine
  MOD_RES (127)..(128): Selenocysteine
  MOD_RES (133)..(133): Selenocysteine
  MOD_RES (154)..(154): Selenocysteine
  MOD_RES (167)..(167): Selenocysteine
  MOD_RES (215)..(215): Selenocysteine
  MOD_RES (228)..(228): Selenocysteine
XXVDKLLSESNERLQLHLKERMAALEDKNSLLREVESAKKQLEEXQHDKDQLVLNIEALRAELDHMRLRGASLHHGRPHLGSVPDFRFPMADGHXDSYSXSAVLRRPQKGRLAALRDEPSKVRDDKXXIKCEXSPPSSPRALRLDRLHKGALHXVSHEDIRDIRNSXGSQDGPVSNPSSSNSSQDSLHKAPKKKGIKSSIGRLFGKKEKGRPGQXGKEALGQAGVSEXDNSSQDALG

SEQ ID NO: 20952 - protein, 145 aa, Homo sapiens
  MOD_RES (74)..(74): Selenocysteine
  MOD_RES (83)..(83): Selenocysteine
  MOD_RES (94)..(94): Selenocysteine
  MOD_RES (110)..(110): Selenocysteine
  MOD_RES (115)..(115): Selenocysteine
  MOD_RES (131)..(131): Selenocysteine
MLALRCGSRWLGLLSVPRSVPLRLPAARACSKGSGDPSSSSSSGNPLVYLDVDANGKPLGRVVLELKADVVPKXAENFRALCXGEKGFGYKGSXFHRVIPSFMCQAGDFXNHNGXGGKSIYGSRFPDENFXLKHVGPGEWGPPLG

SEQ ID NO: 20953 - protein, 207 aa, Homo sapiens
  MOD_RES (74)..(74): Selenocysteine
  MOD_RES (83)..(83): Selenocysteine
  MOD_RES (94)..(94): Selenocysteine
  MOD_RES (110)..(110): Selenocysteine
  MOD_RES (115)..(115): Selenocysteine
  MOD_RES (131)..(131): Selenocysteine
  MOD_RES (149)..(149): Selenocysteine
  MOD_RES (158)..(158): Selenocysteine
  MOD_RES (161)..(161): Selenocysteine
  MOD_RES (194)..(194): Selenocysteine
  MOD_RES (201)..(201): Selenocysteine
MLALRCGSRWLGLLSVPRSVPLRLPAARACSKGSGDPSSSSSSGNPLVYLDVDANGKPLGRVVLELKADVVPKXAENFRALCXGEKGFGYKGSXFHRVIPSFMCQAGDFXNHNGXGGKSIYGSRFPDENFXLKHVGPGVLSMANAGPNXNGSQFFICXIKXDWLDGKHVVFGHVKEGMDVVKKIESFGSKSGRXSKKIVIXDCGQLS

SEQ ID NO: 20954 - protein, 165 aa, Homo sapiens
  MOD_RES (1)..(1): Any amino acid
  MOD_RES (38)..(38): Selenocysteine
  MOD_RES (47)..(47): Selenocysteine
  MOD_RES (58)..(58): Selenocysteine
  MOD_RES (74)..(74): Selenocysteine
  MOD_RES (79)..(79): Selenocysteine
  MOD_RES (95)..(95): Selenocysteine
  MOD_RES (113)..(113): Selenocysteine
  MOD_RES (122)..(122): Selenocysteine
  MOD_RES (125)..(125): Selenocysteine
  MOD_RES (147)..(147): Selenocysteine
  MOD_RES (158)..(158): Selenocysteine
  MOD_RES (164)..(164): Selenocysteine
XSSSSSSGNPLVYLDVDANGKPLGRVVLELKADVVPKXAENFRALCXGEKGFGYKGSXFHRVIPSFMCQAGDFXNHNGXGGKSIYGSRFPDENFXLKHVGPGVLSMANAGPNXNGSQFFICXIKXDWSMALDDIALHCCSPGSPVLXGWMASMLCSVXSKRAWXS

SEQ ID NO: 20955 - protein, 164 aa, Homo sapiens
  MOD_RES (13)..(13): Selenocysteine
  MOD_RES (16)..(16): Selenocysteine
  MOD_RES (66)..(66): Selenocysteine
  MOD_RES (120)..(120): Selenocysteine
MFCSGRKWVAEAXICXKLMKREKRRMGKRRAKKAKREEKKKGGERRRNEKRGNQMKRMCERKKYEXDLEDQDIMGAFLDKPKMEKHNAQGQGNGLRYGLSSMQGKSRQHECDFDLFSKCXQSIARSSEEGGRVGQVPGMQSRRNHKEAGGRRPRLSPCDAHISE

SEQ ID NO: 20956 - protein, 455 aa, Homo sapiens
  MOD_RES (13)..(13): Selenocysteine
  MOD_RES (16)..(16): Selenocysteine
  MOD_RES (66)..(66): Selenocysteine
  MOD_RES (114)..(114): Selenocysteine
  MOD_RES (153)..(153): Selenocysteine
  MOD_RES (176)..(176): Selenocysteine
  MOD_RES (201)..(201): Selenocysteine
  MOD_RES (212)..(212): Selenocysteine
  MOD_RES (234)..(234): Selenocysteine
  MOD_RES (284)..(284): Selenocysteine
  MOD_RES (334)..(334): Selenocysteine
  MOD_RES (347)..(347): Selenocysteine
  MOD_RES (409)..(409): Selenocysteine
  MOD_RES (446)..(446): Selenocysteine
  MOD_RES (449)..(449): Selenocysteine
  MOD_RES (451)..(451): Selenocysteine
MFCSGRKWVAEAXICXKLMKREKRRMGKRRAKKAKREEKKKGGERRRNEKRGNQMKRMCERKKYEXDLEDQDIMGAFLDKPKMEKHNAQGQGNGLRYGLSSMQGWRVEMEDAHXAVIGLPSGLESWSFFAVYDGHAGSQVAKYCCEHLLDHIXNNQDFKGSAGAPSVENVKNGIRXGFLEIDEHMRVMSEKKHGADRSGSXAVGVLISPQHXYFINCGDSRGLLCRNRKVHFFXQDHKPSNPLEKERIQNAGGSVMIQRVNGSLAVSRALGDFDYKCVHGKGPXEQLVSPEPEVHDIERSEEDDQFIILACDGIWDVMGNEELCDFVRSRLEVXDDLEKVCNEVVDXCLYKGSRDNMSVILICFPNAPKVSPEAVKKEAELDKYLECRVEEIIKKQGEGVPDLVHVMRXLASENIPSLPPGGELASKRNVIEAVYNRLNPYKNDDXDSXSXDDMW

SEQ ID NO: 20957 - protein, 93 aa, Homo sapiens
  MOD_RES (13)..(13): Selenocysteine
  MOD_RES (16)..(16): Selenocysteine
  MOD_RES (66)..(66): Selenocysteine
  MOD_RES (76)..(76): Selenocysteine
  MOD_RES (79)..(79): Selenocysteine
  MOD_RES (91)..(91): Selenocysteine
MFCSGRKWVAEAXICXKLMKREKRRMGKRRAKKAKREEKKKGGERRRNEKRGNQMKRMCERKKYEXVLCFEKFRSXDNXSAVMRLSLYSRXDL

SEQ ID NO: 20958 - protein, 129 aa, Homo sapiens
  MOD_RES (41)..(41): Selenocysteine
  MOD_RES (80)..(80): Selenocysteine
  MOD_RES (103)..(103): Selenocysteine
  MOD_RES (128)..(128): Selenocysteine
MGAFLDKPKMEKHNAQGQGNGLRYGLSSMQGWRVEMEDAHXAVIGLPSGLESWSFFAVYDGHAGSQVAKYCCEHLLDHIXNNQDFKGSAGAPSVENVKNGIRXGFLEIDEHMRVMSEKKHGADRSGSXA

SEQ ID NO: 20959 - protein, 148 aa, Homo sapiens
  MOD_RES (41)..(41): Selenocysteine
  MOD_RES (80)..(80): Selenocysteine
  MOD_RES (103)..(103): Selenocysteine
  MOD_RES (128)..(128): Selenocysteine
  MOD_RES (139)..(139): Selenocysteine
MGAFLDKPKMEKHNAQGQGNGLRYGLSSMQGWRVEMEDAHXAVIGLPSGLESWSFFAVYDGHAGSQVAKYCCEHLLDHIXNNQDFKGSAGAPSVENVKNGIRXGFLEIDEHMRVMSEKKHGADRSGSXAVGVLISPQHXYFINCGDSR

SEQ ID NO: 20960 - protein, 187 aa, Homo sapiens
  MOD_RES (41)..(41): Selenocysteine
  MOD_RES (80)..(80): Selenocysteine
  MOD_RES (103)..(103): Selenocysteine
  MOD_RES (128)..(128): Selenocysteine
  MOD_RES (139)..(139): Selenocysteine
  MOD_RES (161)..(161): Selenocysteine
MGAFLDKPKMEKHNAQGQGNGLRYGLSSMQGWRVEMEDAHXAVIGLPSGLESWSFFAVYDGHAGSQVAKYCCEHLLDHIXNNQDFKGSAGAPSVENVKNGIRXGFLEIDEHMRVMSEKKHGADRSGSXAVGVLISPQHXYFINCGDSRGLLCRNRKVHFFXQDHKPSNPLEKERIQNAGGSVMIQRV

SEQ ID NO: 20961 - protein, 324 aa, Homo sapiens
  MOD_RES (41)..(41): Selenocysteine
  MOD_RES (80)..(80): Selenocysteine
  MOD_RES (103)..(103): Selenocysteine
  MOD_RES (128)..(128): Selenocysteine
  MOD_RES (139)..(139): Selenocysteine
  MOD_RES (161)..(161): Selenocysteine
  MOD_RES (211)..(211): Selenocysteine
  MOD_RES (261)..(261): Selenocysteine
  MOD_RES (274)..(274): Selenocysteine
MGAFLDKPKMEKHNAQGQGNGLRYGLSSMQGWRVEMEDAHXAVIGLPSGLESWSFFAVYDGHAGSQVAKYCCEHLLDHIXNNQDFKGSAGAPSVENVKNGIRXGFLEIDEHMRVMSEKKHGADRSGSXAVGVLISPQHXYFINCGDSRGLLCRNRKVHFFXQDHKPSNPLEKERIQNAGGSVMIQRVNGSLAVSRALGDFDYKCVHGKGPXEQLVSPEPEVHDIERSEEDDQFIILACDGIWDVMGNEELCDFVRSRLEVXDDLEKVCNEVVDXCLYKGSRDNMSVILICFPNAPKVSPEAVKKEAELDKYLECRVEGGSFNKK

SEQ ID NO: 20962 - protein, 382 aa, Homo sapiens
  MOD_RES (41)..(41): Selenocysteine
  MOD_RES (80)..(80): Selenocysteine
  MOD_RES (103)..(103): Selenocysteine
  MOD_RES (128)..(128): Selenocysteine
  MOD_RES (139)..(139): Selenocysteine
  MOD_RES (161)..(161): Selenocysteine
  MOD_RES (211)..(211): Selenocysteine
  MOD_RES (261)..(261): Selenocysteine
  MOD_RES (274)..(274): Selenocysteine
  MOD_RES (336)..(336): Selenocysteine
  MOD_RES (373)..(373): Selenocysteine
  MOD_RES (376)..(376): Selenocysteine
  MOD_RES (378)..(378): Selenocysteine
MGAFLDKPKMEKHNAQGQGNGLRYGLSSMQGWRVEMEDAHXAVIGLPSGLESWSFFAVYDGHAGSQVAKYCCEHLLDHIXNNQDFKGSAGAPSVENVKNGIRXGFLEIDEHMRVMSEKKHGADRSGSXAVGVLISPQHXYFINCGDSRGLLCRNRKVHFFXQDHKPSNPLEKERIQNAGGSVMIQRVNGSLAVSRALGDFDYKCVHGKGPXEQLVSPEPEVHDIERSEEDDQFIILACDGIWDVMGNEELCDFVRSRLEVXDDLEKVCNEVVDXCLYKGSRDNMSVILICFPNAPKVSPEAVKKEAELDKYLECRVEEIIKKQGEGVPDLVHVMRXLASENIPSLPPGGELASKRNVIEAVYNRLNPYKNDDXDSXSXDDMW

SEQ ID NO: 20963 - protein, 303 aa, Homo sapiens
  MOD_RES (10)..(10): Selenocysteine
  MOD_RES (41)..(41): Selenocysteine
  MOD_RES (73)..(73): Selenocysteine
  MOD_RES (80)..(81): Selenocysteine
  MOD_RES (108)..(108): Selenocysteine
  MOD_RES (133)..(133): Selenocysteine
  MOD_RES (166)..(166): Selenocysteine
  MOD_RES (216)..(216): Selenocysteine
MGAFLDKPKXEKHNAHGAGNGLRYGLSSMQGWRVEMEDAHXAVVGIPHGLEDWSFFAVYDGHAGSRVANYCSXHLLEHIXXNEDFRAAGKSGSALELSVENVKNGIRXGFLKIDEYMRNFSDLRNGMDRSGSXAVGVMISPKHIYFINCGDSRAVLYRNGQVCFSXQDHKPCNPREKERIQNAGGSVMIQRVNGSLAVSRALGDYDYKCVDGKGPXEQLVSPEPEVSDEAVKKDSELDKHLESRVEEIMEKSGEEGMPDLAHVMRILSAENIPNLPPGGGLAGKRNVIEAVYSRLNPHRESDG

SEQ ID NO: 20964 - protein, 378 aa, Homo sapiens
  MOD_RES (10)..(10): Selenocysteine
  MOD_RES (41)..(41): Selenocysteine
  MOD_RES (73)..(73): Selenocysteine
  MOD_RES (80)..(81): Selenocysteine
  MOD_RES (108)..(108): Selenocysteine
  MOD_RES (133)..(133): Selenocysteine
  MOD_RES (166)..(166): Selenocysteine
  MOD_RES (216)..(216): Selenocysteine
  MOD_RES (278)..(278): Selenocysteine
MGAFLDKPKXEKHNAHGAGNGLRYGLSSMQGWRVEMEDAHXAVVGIPHGLEDWSFFAVYDGHAGSRVANYCSXHLLEHIXXNEDFRAAGKSGSALELSVENVKNGIRXGFLKIDEYMRNFSDLRNGMDRSGSXAVGVMISPKHIYFINCGDSRAVLYRNGQVCFSXQDHKPCNPREKERIQNAGGSVMIQRVNGSLAVSRALGDYDYKCVDGKGPXEQLVSPEPEVYEILRAEEDEFIILACDGIWDVMSNEELCEYVKSRLEVSDDLENVCNWVVDXCLHKGSRDNMSIVLVCFSNAPKVSDEAVKKDSELDKHLESRVEEIMEKSGEEGMPDLAHVMRILSAENIPNLPPGGGLAGKRNVIEAVYSRLNPHRESDG

SEQ ID NO: 20965 - protein, 380 aa, Homo sapiens
  MOD_RES (10)..(10): Selenocysteine
  MOD_RES (41)..(41): Selenocysteine
  MOD_RES (73)..(73): Selenocysteine
  MOD_RES (80)..(81): Selenocysteine
  MOD_RES (108)..(108): Selenocysteine
  MOD_RES (133)..(133): Selenocysteine
  MOD_RES (166)..(166): Selenocysteine
  MOD_RES (216)..(216): Selenocysteine
  MOD_RES (278)..(278): Selenocysteine
MGAFLDKPKXEKHNAHGAGNGLRYGLSSMQGWRVEMEDAHXAVVGIPHGLEDWSFFAVYDGHAGSRVANYCSXHLLEHIXXNEDFRAAGKSGSALELSVENVKNGIRXGFLKIDEYMRNFSDLRNGMDRSGSXAVGVMISPKHIYFINCGDSRAVLYRNGQVCFSXQDHKPCNPREKERIQNAGGSVMIQRVNGSLAVSRALGDYDYKCVDGKGPXEQLVSPEPEVYEILRAEEDEFIILACDGIWDVMSNEELCEYVKSRLEVSDDLENVCNWVVDXCLHKGSRDNMSIVLVCFSNAPKVSDEAVKKDSELDKHLESRVEEIMEKSGEEGMPDLAHVMRILSAENIPNLPPGGGLAGKRNVIEAVYSRLNPHRESDGQK

SEQ ID NO: 20966 - protein, 387 aa, Homo sapiens
  MOD_RES (10)..(10): Selenocysteine
  MOD_RES (41)..(41): Selenocysteine
  MOD_RES (73)..(73): Selenocysteine
  MOD_RES (80)..(81): Selenocysteine
  MOD_RES (108)..(108): Selenocysteine
  MOD_RES (133)..(133): Selenocysteine
  MOD_RES (166)..(166): Selenocysteine
  MOD_RES (216)..(216): Selenocysteine
  MOD_RES (278)..(278): Selenocysteine
MGAFLDKPKXEKHNAHGAGNGLRYGLSSMQGWRVEMEDAHXAVVGIPHGLEDWSFFAVYDGHAGSRVANYCSXHLLEHIXXNEDFRAAGKSGSALELSVENVKNGIRXGFLKIDEYMRNFSDLRNGMDRSGSXAVGVMISPKHIYFINCGDSRAVLYRNGQVCFSXQDHKPCNPREKERIQNAGGSVMIQRVNGSLAVSRALGDYDYKCVDGKGPXEQLVSPEPEVYEILRAEEDEFIILACDGIWDVMSNEELCEYVKSRLEVSDDLENVCNWVVDXCLHKGSRDNMSIVLVCFSNAPKVSDEAVKKDSELDKHLESRVEEIMEKSGEEGMPDLAHVMRILSAENIPNLPPGGGLAGKRNVIEAVYSRLNPHRESDGGAGDLEDPW

SEQ ID NO: 20967 - protein, 479 aa, Homo sapiens
  MOD_RES (10)..(10): Selenocysteine
  MOD_RES (41)..(41): Selenocysteine
  MOD_RES (73)..(73): Selenocysteine
  MOD_RES (80)..(81): Selenocysteine
  MOD_RES (108)..(108): Selenocysteine
  MOD_RES (133)..(133): Selenocysteine
  MOD_RES (166)..(166): Selenocysteine
  MOD_RES (216)..(216): Selenocysteine
  MOD_RES (278)..(278): Selenocysteine
  MOD_RES (416)..(416): Selenocysteine
  MOD_RES (435)..(435): Selenocysteine
  MOD_RES (437)..(437): Selenocysteine
  MOD_RES (448)..(448): Selenocysteine
  MOD_RES (454)..(454): Selenocysteine
  MOD_RES (472)..(472): Selenocysteine
MGAFLDKPKXEKHNAHGAGNGLRYGLSSMQGWRVEMEDAHXAVVGIPHGLEDWSFFAVYDGHAGSRVANYCSXHLLEHIXXNEDFRAAGKSGSALELSVENVKNGIRXGFLKIDEYMRNFSDLRNGMDRSGSXAVGVMISPKHIYFINCGDSRAVLYRNGQVCFSXQDHKPCNPREKERIQNAGGSVMIQRVNGSLAVSRALGDYDYKCVDGKGPXEQLVSPEPEVYEILRAEEDEFIILACDGIWDVMSNEELCEYVKSRLEVSDDLENVCNWVVDXCLHKGSRDNMSIVLVCFSNAPKVSDEAVKKDSELDKHLESRVEEIMEKSGEEGMPDLAHVMRILSAENIPNLPPGGGLAGKRNVIEAVYSRLNPHRESDGASDEAEESGSQGKLVEALRQMRINHRGNYRQLLEEMLXSYRLAKVEGEESPAEPAAXAXSSNSDAGNPVXMQESHXESESGLAELDSSNEDAGXKMSGEKI

SEQ ID NO: 20968 - protein, 192 aa, Homo sapiens
  MOD_RES (129)..(129): Selenocysteine
  MOD_RES (148)..(148): Selenocysteine
  MOD_RES (150)..(150): Selenocysteine
  MOD_RES (161)..(161): Selenocysteine
  MOD_RES (167)..(167): Selenocysteine
  MOD_RES (185)..(185): Selenocysteine
MSIVLVCFSNAPKVSDEAVKKDSELDKHLESRVEEIMEKSGEEGMPDLAHVMRILSAENIPNLPPGGGLAGKRNVIEAVYSRLNPHRESDGASDEAEESGSQGKLVEALRQMRINHRGNYRQLLEEMLXSYRLAKVEGEESPAEPAAXAXSSNSDAGNPVXMQESHXESESGLAELDSSNEDAGXKMSGEKI

SEQ ID NO: 20969 - protein, 90 aa, Homo sapiens
  MOD_RES (47)..(47): Selenocysteine
  MOD_RES (57)..(57): Selenocysteine
  MOD_RES (70)..(70): Selenocysteine
  MOD_RES (87)..(88): Selenocysteine
MEDRHVSLPSFNQLFGLSDPVNRAYFAVFDGHGGVDAARYAAVHVHXNAARQPELPXDPEGALREAFRRXDQMFLRKAKRERLQSGXXGV

SEQ ID NO: 20970 - protein, 286 aa, Homo sapiens
  MOD_RES (47)..(47): Selenocysteine
  MOD_RES (57)..(57): Selenocysteine
  MOD_RES (70)..(70): Selenocysteine
  MOD_RES (87)..(88): Selenocysteine
  MOD_RES (98)..(98): Selenocysteine
  MOD_RES (153)..(153): Selenocysteine
  MOD_RES (181)..(181): Selenocysteine
  MOD_RES (212)..(212): Selenocysteine
  MOD_RES (239)..(239): Selenocysteine
  MOD_RES (280)..(280): Selenocysteine
MEDRHVSLPSFNQLFGLSDPVNRAYFAVFDGHGGVDAARYAAVHVHXNAARQPELPXDPEGALREAFRRXDQMFLRKAKRERLQSGXXGVCALIAGAXLHVAWLGDSQVILVQQGQVVKLMEPHRPERQDEKARIEALGGFVSHMDCWRVNGXLAVSRAIGDVFQKPYVSGEADAASRALXGSEDYLLLACDGFFDVVPHQEVVGLVQSHLXRQQGSGLRVAEELVAAARERGSHDNIXVMVVFLRDPQELLEGGNQGEGDPQAEGRRQDLPSSLPEPEXQAPPRS

SEQ ID NO: 20971 - protein, 82 aa, Homo sapiens
  MOD_RES (7)..(7): Selenocysteine
  MOD_RES (10)..(10): Selenocysteine
  MOD_RES (61)..(61): Selenocysteine
MGLCPSXREXAPPAVLDAQSLAQSFFNRLWEVAGQWQKQVPLAARASQRQWLVSIHAIRNXRRKMEDRHVSLPSFNQLFGLS

SEQ ID NO: 20972 - protein, 361 aa, Homo sapiens
  MOD_RES (19)..(19): Selenocysteine
  MOD_RES (25)..(25): Selenocysteine
  MOD_RES (47)..(47): Selenocysteine
  MOD_RES (90)..(90): Selenocysteine
  MOD_RES (118)..(118): Selenocysteine
  MOD_RES (165)..(165): Selenocysteine
  MOD_RES (215)..(215): Selenocysteine
  MOD_RES (225)..(225): Selenocysteine
  MOD_RES (238)..(238): Selenocysteine
  MOD_RES (255)..(256): Selenocysteine
  MOD_RES (266)..(266): Selenocysteine
  MOD_RES (321)..(321): Selenocysteine
MSSGAPQKSSPMASGAEEXPGFLDXLLQDFPALLNPEDPLPWKAPGXVLSQEEVEGELAELAMGFLGSRKAPPPLAAALAHEAVSQLLQXDLSEFRKLPREEEEEEEDDDEEEKAPVXLLDAQSLAQSFFNRLWEVAGQWQKQVPLAARASQRQWLVSIHAIRNXRRKMEDRHVSLPSFNQLFGLSDPVNRAYFAVFDGHGGVDAARYAAVHVHXNAARQPELPXDPEGALREAFRRXDQMFLRKAKRERLQSGXXGVCALIAGAXLHVAWLGDSQVILVQQGQVVKLMEPHRPERQDEKARIEALGGFVSHMDCWRVNGXLAVSRAIGESQRGRPKWEKVSRKPRPRVWPAAHQGFREAV

SEQ ID NO: 20973 - protein, 454 aa, Homo sapiens
  MOD_RES (19)..(19): Selenocysteine
  MOD_RES (25)..(25): Selenocysteine
  MOD_RES (47)..(47): Selenocysteine
  MOD_RES (90)..(90): Selenocysteine
  MOD_RES (118)..(118): Selenocysteine
  MOD_RES (165)..(165): Selenocysteine
  MOD_RES (215)..(215): Selenocysteine
  MOD_RES (225)..(225): Selenocysteine
  MOD_RES (238)..(238): Selenocysteine
  MOD_RES (255)..(256): Selenocysteine
  MOD_RES (266)..(266): Selenocysteine
  MOD_RES (321)..(321): Selenocysteine
  MOD_RES (349)..(349): Selenocysteine
  MOD_RES (380)..(380): Selenocysteine
  MOD_RES (407)..(407): Selenocysteine
  MOD_RES (448)..(448): Selenocysteine
MSSGAPQKSSPMASGAEEXPGFLDXLLQDFPALLNPEDPLPWKAPGXVLSQEEVEGELAELAMGFLGSRKAPPPLAAALAHEAVSQLLQXDLSEFRKLPREEEEEEEDDDEEEKAPVXLLDAQSLAQSFFNRLWEVAGQWQKQVPLAARASQRQWLVSIHAIRNXRRKMEDRHVSLPSFNQLFGLSDPVNRAYFAVFDGHGGVDAARYAAVHVHXNAARQPELPXDPEGALREAFRRXDQMFLRKAKRERLQSGXXGVCALIAGAXLHVAWLGDSQVILVQQGQVVKLMEPHRPERQDEKARIEALGGFVSHMDCWRVNGXLAVSRAIGDVFQKPYVSGEADAASRALXGSEDYLLLACDGFFDVVPHQEVVGLVQSHLXRQQGSGLRVAEELVAAARERGSHDNIXVMVVFLRDPQELLEGGNQGEGDPQAEGRRQDLPSSLPEPEXQAPPRS

SEQ ID NO: 20974 - protein, 360 aa, Homo sapiens
  MOD_RES (5)..(5): Selenocysteine
  MOD_RES (7)..(7): Selenocysteine
  MOD_RES (25)..(25): Selenocysteine
  MOD_RES (42)..(42): Selenocysteine
  MOD_RES (47)..(47): Selenocysteine
  MOD_RES (85)..(85): Selenocysteine
  MOD_RES (113)..(113): Selenocysteine
  MOD_RES (119)..(119): Selenocysteine
  MOD_RES (134)..(134): Selenocysteine
  MOD_RES (167)..(167): Selenocysteine
  MOD_RES (185)..(185): Selenocysteine
  MOD_RES (193)..(194): Selenocysteine
  MOD_RES (206)..(206): Selenocysteine
  MOD_RES (286)..(286): Selenocysteine
  MOD_RES (345)..(345): Selenocysteine
  MOD_RES (357)..(357): Selenocysteine
MIEDXMXLLSLLGRIMRYFLLRPEXLFLLCISLALWSYFFHXDEVKXIVKSSRDAVKMVKGKVAEIMQNDRLGGLDVLEAEFSKXWEFKNHNVAVYSIQGRRDHMEDRFEVLXDLANKXHPSIFGIFDGHGGEXAAEYVKSRLPEALKQHLQDYEKDKENSVLSYQXILEQQILSIDREMLEKLXVSYDEAGXXCLIALLSDKDLXVANVGDSRGVLCDKDGNAIPLSHDHKPYQLKERKRIKRAGGFISFNGSWRVQGILAMSRSLGDYPLKNLNVVIPDPDILXFDLDKLQPEFMILASDGLWDAFSNEEAVRFIKERLDEPHFGAKSIVLQSFYRGCPDNIXVMVVKFRNSSKXEEQ

SEQ ID NO: 20975 - protein, 194 aa, Homo sapiens
  MOD_RES (5)..(5): Selenocysteine
  MOD_RES (7)..(7): Selenocysteine
  MOD_RES (25)..(25): Selenocysteine
  MOD_RES (42)..(42): Selenocysteine
  MOD_RES (47)..(47): Selenocysteine
  MOD_RES (85)..(85): Selenocysteine
  MOD_RES (113)..(113): Selenocysteine
  MOD_RES (119)..(119): Selenocysteine
  MOD_RES (134)..(134): Selenocysteine
  MOD_RES (167)..(167): Selenocysteine
  MOD_RES (185)..(185): Selenocysteine
  MOD_RES (193)..(193): Selenocysteine
MIEDXMXLLSLLGRIMRYFLLRPEXLFLLCISLALWSYFFHXDEVKXIVKSSRDAVKMVKGKVAEIMQNDRLGGLDVLEAEFSKXWEFKNHNVAVYSIQGRRDHMEDRFEVLXDLANKXHPSIFGIFDGHGGEXAAEYVKSRLPEALKQHLQDYEKDKENSVLSYQXILEQQILSIDREMLEKLXVSYDEAVXF

SEQ ID NO: 20976 - protein, 181 aa, Homo sapiens
  MOD_RES (6)..(6): Selenocysteine
  MOD_RES (14)..(15): Selenocysteine
  MOD_RES (27)..(27): Selenocysteine
  MOD_RES (107)..(107): Selenocysteine
  MOD_RES (166)..(166): Selenocysteine
  MOD_RES (178)..(178): Selenocysteine
MLEKLXVSYDEAGXXCLIALLSDKDLXVANVGDSRGVLCDKDGNAIPLSHDHKPYQLKERKRIKRAGGFISFNGSWRVQGILAMSRSLGDYPLKNLNVVIPDPDILXFDLDKLQPEFMILASDGLWDAFSNEEAVRFIKERLDEPHFGAKSIVLQSFYRGCPDNIXVMVVKFRNSSKXEEQ

SEQ ID NO: 20977 - protein, 233 aa, Homo sapiens
  MOD_RES (6)..(7): Selenocysteine
  MOD_RES (40)..(40): Selenocysteine
  MOD_RES (58)..(58): Selenocysteine
  MOD_RES (66)..(67): Selenocysteine
  MOD_RES (79)..(79): Selenocysteine
  MOD_RES (159)..(159): Selenocysteine
  MOD_RES (218)..(218): Selenocysteine
  MOD_RES (230)..(230): Selenocysteine
MPAFSXXAAEYVKSRLPEALKQHLQDYEKDKENSVLSYQXILEQQILSIDREMLEKLXVSYDEAGXXCLIALLSDKDLXVANVGDSRGVLCDKDGNAIPLSHDHKPYQLKERKRIKRAGGFISFNGSWRVQGILAMSRSLGDYPLKNLNVVIPDPDILXFDLDKLQPEFMILASDGLWDAFSNEEAVRFIKERLDEPHFGAKSIVLQSFYRGCPDNIXVMVVKFRNSSKXEEQ

SEQ ID NO: 20978 - protein, 180 aa, Homo sapiens
  MOD_RES (13)..(13): Selenocysteine
  MOD_RES (18)..(18): Selenocysteine
  MOD_RES (51)..(51): Selenocysteine
  MOD_RES (65)..(65): Selenocysteine
  MOD_RES (73)..(73): Selenocysteine
  MOD_RES (84)..(84): Selenocysteine
  MOD_RES (101)..(102): Selenocysteine
  MOD_RES (105)..(105): Selenocysteine
  MOD_RES (110)..(110): Selenocysteine
  MOD_RES (113)..(113): Selenocysteine
  MOD_RES (128)..(128): Selenocysteine
MRQRADRRSMVSXSGAAXASSAAGPSRGAAHSPSSAPHASRHRPPFSSRAXGLLQQRQHCVHHCXQLCPRVQXPCLPPPPAPAXELHSYLQQGGERGLLDXXPGXAGWGXSAXGAVQGSRPGKNVQLXENEIRGLCLKSREIFLSQPILLELEAPLKICGDIHGQYYDLLRLFEYGGFPP

SEQ ID NO: 20979 - protein, 169 aa, Homo sapiens
  MOD_RES (13)..(13): Selenocysteine
  MOD_RES (18)..(18): Selenocysteine
  MOD_RES (51)..(51): Selenocysteine
  MOD_RES (65)..(65): Selenocysteine
  MOD_RES (73)..(73): Selenocysteine
  MOD_RES (84)..(84): Selenocysteine
  MOD_RES (101)..(102): Selenocysteine
  MOD_RES (116)..(116): Selenocysteine
MRQRADRRSMVSXSGAAXASSAAGPSRGAAHSPSSAPHASRHRPPFSSRAXGLLQQRQHCVHHCXQLCPRVQXPCLPPPPAPAXELHSYLQQGGERGLLDXXPVQGSRPGKNVQLXENEIRGLCLKSREIFLSQPILLELEAPLKICGDIHGQYYDLLRLFEYGGFPPE

SEQ ID NO: 20980 - protein, 286 aa, Homo sapiens
  MOD_RES (59)..(59): Selenocysteine
  MOD_RES (107)..(107): Selenocysteine
  MOD_RES (109)..(109): Selenocysteine
  MOD_RES (149)..(149): Selenocysteine
  MOD_RES (182)..(182): Selenocysteine
  MOD_RES (221)..(221): Selenocysteine
  MOD_RES (244)..(244): Selenocysteine
  MOD_RES (276)..(276): Selenocysteine
MSDSEKLNLDSIIGRLLEGDIHGQYYDLLRLFEYGGFPPESNYLFLGDYVDRGKQSLEXICLLLAYKIKYPENFFLLRGNHECASINRIYGFYDECKRRYNIKLWKXFXDCFNCLPIAAIVDEKIFCCHGGLSPDLQSMEQIRRIMRPXDVPDQGLLCDLLWSDPDKDVQGWGENDRGVSFXFGAEVVAKFLHKHDLDLICRAHQVVEDGYEFFAKRQLVXLFSAPNYCGEFDNAGAMMSVDEXLMCSFQILKPADKNKGKYGQFSGLNPGGRPIXPPRNSAKAKK

SEQ ID NO: 20981 - protein, 341 aa, Homo sapiens
  MOD_RES (24)..(24): Selenocysteine
  MOD_RES (42)..(42): Selenocysteine
  MOD_RES (114)..(114): Selenocysteine
  MOD_RES (162)..(162): Selenocysteine
  MOD_RES (164)..(164): Selenocysteine
  MOD_RES (204)..(204): Selenocysteine
  MOD_RES (237)..(237): Selenocysteine
  MOD_RES (276)..(276): Selenocysteine
  MOD_RES (299)..(299): Selenocysteine
  MOD_RES (331)..(331): Selenocysteine
MSDSEKLNLDSIIGRLLEGSRVLXPHCAPVQGSRPGKNVQLXENEIRGLCLKSREIFLSQPILLELEAPLKICGDIHGQYYDLLRLFEYGGFPPESNYLFLGDYVDRGKQSLEXICLLLAYKIKYPENFFLLRGNHECASINRIYGFYDECKRRYNIKLWKXFXDCFNCLPIAAIVDEKIFCCHGGLSPDLQSMEQIRRIMRPXDVPDQGLLCDLLWSDPDKDVQGWGENDRGVSFXFGAEVVAKFLHKHDLDLICRAHQVVEDGYEFFAKRQLVXLFSAPNYCGEFDNAGAMMSVDEXLMCSFQILKPADKNKGKYGQFSGLNPGGRPIXPPRNSAKAKK

SEQ ID NO: 20982 - protein, 330 aa, Homo sapiens
  MOD_RES (31)..(31): Selenocysteine
  MOD_RES (103)..(103): Selenocysteine
  MOD_RES (151)..(151): Selenocysteine
  MOD_RES (153)..(153): Selenocysteine
  MOD_RES (193)..(193): Selenocysteine
  MOD_RES (226)..(226): Selenocysteine
  MOD_RES (265)..(265): Selenocysteine
  MOD_RES (288)..(288): Selenocysteine
  MOD_RES (320)..(320): Selenocysteine
MSDSEKLNLDSIIGRLLEVQGSRPGKNVQLXENEIRGLCLKSREIFLSQPILLELEAPLKICGDIHGQYYDLLRLFEYGGFPPESNYLFLGDYVDRGKQSLEXICLLLAYKIKYPENFFLLRGNHECASINRIYGFYDECKRRYNIKLWKXFXDCFNCLPIAAIVDEKIFCCHGGLSPDLQSMEQIRRIMRPXDVPDQGLLCDLLWSDPDKDVQGWGENDRGVSFXFGAEVVAKFLHKHDLDLICRAHQVVEDGYEFFAKRQLVXLFSAPNYCGEFDNAGAMMSVDEXLMCSFQILKPADKNKGKYGQFSGLNPGGRPIXPPRNSAKAKK

SEQ ID NO: 20983 - protein, 253 aa, Homo sapiens
  MOD_RES (31)..(31): Selenocysteine
  MOD_RES (103)..(103): Selenocysteine
  MOD_RES (158)..(158): Selenocysteine
  MOD_RES (191)..(191): Selenocysteine
  MOD_RES (230)..(230): Selenocysteine
  MOD_RES (253)..(253): Selenocysteine
MSDSEKLNLDSIIGRLLEVQGSRPGKNVQLXENEIRGLCLKSREIFLSQPILLELEAPLKICGDIHGQYYDLLRLFEYGGFPPESNYLFLGDYVDRGKQSLEXICLLLAYKIKYPENFFLLRGNHECASINRIYGFYDECLSPDLQSMEQIRRIMRPXDVPDQGLLCDLLWSDPDKDVQGWGENDRGVSFXFGAEVVAKFLHKHDLDLICRAHQVVEDGYEFFAKRQLVXLFSAPNYCGEFDNAGAMMSVDEX

SEQ ID NO: 20984 - protein, 299 aa, Homo sapiens
  MOD_RES (11)..(11): Selenocysteine
  MOD_RES (17)..(17): Selenocysteine
  MOD_RES (66)..(66): Selenocysteine
  MOD_RES (69)..(69): Selenocysteine
  MOD_RES (76)..(76): Selenocysteine
  MOD_RES (80)..(80): Selenocysteine
  MOD_RES (83)..(83): Selenocysteine
  MOD_RES (91)..(92): Selenocysteine
  MOD_RES (94)..(94): Selenocysteine
  MOD_RES (101)..(101): Selenocysteine
  MOD_RES (103)..(103): Selenocysteine
  MOD_RES (111)..(112): Selenocysteine
  MOD_RES (114)..(114): Selenocysteine
  MOD_RES (130)..(130): Selenocysteine
  MOD_RES (138)..(138): Selenocysteine
  MOD_RES (148)..(148): Selenocysteine
  MOD_RES (159)..(159): Selenocysteine
  MOD_RES (163)..(163): Selenocysteine
  MOD_RES (187)..(187): Selenocysteine
  MOD_RES (195)..(195): Selenocysteine
  MOD_RES (203)..(203): Selenocysteine
  MOD_RES (219)..(219): Selenocysteine
  MOD_RES (224)..(224): Selenocysteine
  MOD_RES (243)..(243): Selenocysteine
  MOD_RES (251)..(251): Selenocysteine
  MOD_RES (276)..(276): Selenocysteine
  MOD_RES (280)..(280): Selenocysteine
  MOD_RES (282)..(282): Selenocysteine
  MOD_RES (290)..(290): Selenocysteine
  MOD_RES (297)..(297): Selenocysteine
  MOD_RES (299)..(299): Selenocysteine
ANMDNNQSQKXFKNKEXLIIEPEKNASRIESLEQEKVDEEEEGKKDESSCSSEEDEEDDSESEAEXDKXKPLASVXNANXSSXQAAPVAVXXPXVSSGQAXPXSPIKKFPXXAXKISPKEEERKDESPAXWRLGLRKXGSYGALAEIXASKEGQKEKDXAGVXRSASSPRLSSSLDNKEKEKDSKGXRLAYVAPXIPRRLASXSDIEEKENRDSSSLRXSSSYXRRKWEDDLKKNSSVNEGSXYHKRSYLXPVRDEESESQRKARSRQARQSRRSXQGVXLXDLQEAEKXIGRSRSXRX

SEQ ID NO: 20985 - protein, 161 aa, Homo sapiens
  MOD_RES (4)..(4): Selenocysteine
  MOD_RES (17)..(17): Selenocysteine
  MOD_RES (21)..(21): Selenocysteine
  MOD_RES (30)..(30): Selenocysteine
  MOD_RES (34)..(35): Selenocysteine
  MOD_RES (42)..(42): Selenocysteine
  MOD_RES (63)..(63): Selenocysteine
  MOD_RES (71)..(71): Selenocysteine
  MOD_RES (109)..(109): Selenocysteine
  MOD_RES (115)..(115): Selenocysteine
  MOD_RES (129)..(129): Selenocysteine
  MOD_RES (138)..(138): Selenocysteine
  MOD_RES (140)..(140): Selenocysteine
ESEXSREDEYKQKYSRXYDEXYQRYRPVSXSSSXXPSSSLSXMSSSLYASSQLNRPNSLVGIXSAYSRGIXKENEREGEKREEEKEGEDKSQPKSIRERRRPREKRRSXGVSFWXQDSDENEQEQQSDXEEGSNKKEXQXDSISSPVRPVINFCLLMILLN

SEQ ID NO: 20986 - protein, 210 aa, Homo sapiens
  MOD_RES (3)..(3): Selenocysteine
  MOD_RES (69)..(69): Selenocysteine
  MOD_RES (129)..(129): Selenocysteine
  MOD_RES (140)..(140): Selenocysteine
  MOD_RES (162)..(162): Selenocysteine
  MOD_RES (208)..(208): Selenocysteine
GLXALHQACIDDNVDMVKFLVENGANINQPDNEGWIPLHAAASCGYLDIAEFLIGQGAHVGAVNSEGDXPLDIAEEEAMEELLQNEVNRQGVDIEAARKEEERIMLRDARQWLNSGHINDVRHAKSGGXALHVAAAKGYXEVLKLLIQAGYDVNIKDYDGWXPLHAAAHWGKEEACRILVDNLCDMEMVNKVLHSEKRDKKSPLIESXAN

SEQ ID NO: 20987 - protein, 97 aa, Homo sapiens
  MOD_RES (51)..(51): Selenocysteine
  MOD_RES (62)..(62): Selenocysteine
  MOD_RES (84)..(84): Selenocysteine
MEELLQNEVNRQGVDIEAARKEEERIMLRDARQWLNSGHINDVRHAKSGGXALHVAAAKGYXEVLKLLIQAGYDVNIKDYDGWXPLHAAAHWGKEEA

SEQ ID NO: 20988 - protein, 692 aa, Homo sapiens
  MOD_RES (22)..(22): Selenocysteine
  MOD_RES (34)..(34): Selenocysteine
  MOD_RES (53)..(53): Selenocysteine
  MOD_RES (75)..(75): Selenocysteine
  MOD_RES (141)..(141): Selenocysteine
  MOD_RES (201)..(201): Selenocysteine
  MOD_RES (212)..(212): Selenocysteine
  MOD_RES (234)..(234): Selenocysteine
  MOD_RES (267)..(267): Selenocysteine
  MOD_RES (305)..(305): Selenocysteine
  MOD_RES (316)..(316): Selenocysteine
  MOD_RES (322)..(322): Selenocysteine
  MOD_RES (371)..(371): Selenocysteine
  MOD_RES (374)..(374): Selenocysteine
  MOD_RES (381)..(381): Selenocysteine
  MOD_RES (385)..(385): Selenocysteine
  MOD_RES (388)..(388): Selenocysteine
  MOD_RES (396)..(397): Selenocysteine
  MOD_RES (399)..(399): Selenocysteine
  MOD_RES (406)..(406): Selenocysteine
  MOD_RES (408)..(408): Selenocysteine
  MOD_RES (416)..(417): Selenocysteine
  MOD_RES (419)..(419): Selenocysteine
  MOD_RES (435)..(435): Selenocysteine
  MOD_RES (443)..(443): Selenocysteine
  MOD_RES (453)..(453): Selenocysteine
  MOD_RES (464)..(464): Selenocysteine
  MOD_RES (468)..(468): Selenocysteine
  MOD_RES (492)..(492): Selenocysteine
  MOD_RES (500)..(500): Selenocysteine
  MOD_RES (508)..(508): Selenocysteine
  MOD_RES (524)..(524): Selenocysteine
  MOD_RES (529)..(529): Selenocysteine
  MOD_RES (548)..(548): Selenocysteine
  MOD_RES (570)..(571): Selenocysteine
  MOD_RES (573)..(573): Selenocysteine
  MOD_RES (575)..(575): Selenocysteine
  MOD_RES (577)..(577): Selenocysteine
  MOD_RES (590)..(590): Selenocysteine
  MOD_RES (592)..(594): Selenocysteine
  MOD_RES (597)..(598): Selenocysteine
  MOD_RES (605)..(605): Selenocysteine
  MOD_RES (612)..(612): Selenocysteine
  MOD_RES (637)..(637): Selenocysteine
  MOD_RES (641)..(641): Selenocysteine
  MOD_RES (643)..(643): Selenocysteine
  MOD_RES (651)..(651): Selenocysteine
  MOD_RES (658)..(658): Selenocysteine
  MOD_RES (660)..(660): Selenocysteine
  MOD_RES (689)..(689): Selenocysteine
MKMADAKQKRNEQLKRWIGSEXDLEPPVVKRQKXKVKFDDGAVFLAACSSGDXDEVLKLLHRGADINYANVDGLXALHQACIDDNVDMVKFLVENGANINQPDNEGWIPLHAAASCGYLDIAEFLIGQGAHVGAVNSEGDXPLDIAEEEAMEELLQNEVNRQGVDIEAARKEEERIMLRDARQWLNSGHINDVRHAKSGGXALHVAAAKGYXEVLKLLIQAGYDVNIKDYDGWXPLHAAAHWGKEEACRILVDNLCDMEMVNKVGQXAFDVADEDILGYLEELQKKQNLLHSEKRDKKSPLIESXANMDNNQSQKXFKNKEXLIIEPEKNASRIESLEQEKVDEEEEGKKDESSCSSEEDEEDDSESEAEXDKXKPLASVXNANXSSXQAAPVAVXXPXVSSGQAXPXSPIKKFPXXAXKISPKEEERKDESPAXWRLGLRKXGSYGALAEIXASKEGQKEKDXAGVXRSASSPRLSSSLDNKEKEKDSKGXRLAYVAPXIPRRLASXSDIEEKENRDSSSLRXSSSYXRRKWEDDLKKNSSVNEGSXYHKSCSFGRRQDDLISSSVPSXXSXPXVXSAAGLQKSLLSSXSXXXKIXXGSSSAGXQSRSYLXPVRDEESESQRKARSRQARQSRRSXQGVXLXDLQEAEKXIGRSRSXRXREQENEEKEKEEKEKQDKEKQEEKKESEXSRE

SEQ ID NO: 20989 - protein, 974 aa, Homo sapiens
  MOD_RES (22)..(22): Selenocysteine
  MOD_RES (34)..(34): Selenocysteine
  MOD_RES (53)..(53): Selenocysteine
  MOD_RES (75)..(75): Selenocysteine
  MOD_RES (141)..(141): Selenocysteine
  MOD_RES (201)..(201): Selenocysteine
  MOD_RES (212)..(212): Selenocysteine
  MOD_RES (234)..(234): Selenocysteine
  MOD_RES (267)..(267): Selenocysteine
  MOD_RES (305)..(305): Selenocysteine
  MOD_RES (316)..(316): Selenocysteine
  MOD_RES (322)..(322): Selenocysteine
  MOD_RES (371)..(371): Selenocysteine
  MOD_RES (374)..(374): Selenocysteine
  MOD_RES (381)..(381): Selenocysteine
  MOD_RES (385)..(385): Selenocysteine
  MOD_RES (388)..(388): Selenocysteine
  MOD_RES (396)..(397): Selenocysteine
  MOD_RES (399)..(399): Selenocysteine
  MOD_RES (406)..(406): Selenocysteine
  MOD_RES (408)..(408): Selenocysteine
  MOD_RES (416)..(417): Selenocysteine
  MOD_RES (419)..(419): Selenocysteine
  MOD_RES (435)..(435): Selenocysteine
  MOD_RES (443)..(443): Selenocysteine
  MOD_RES (453)..(453): Selenocysteine
  MOD_RES (464)..(464): Selenocysteine
  MOD_RES (468)..(468): Selenocysteine
  MOD_RES (492)..(492): Selenocysteine
  MOD_RES (500)..(500): Selenocysteine
  MOD_RES (508)..(508): Selenocysteine
  MOD_RES (524)..(524): Selenocysteine
  MOD_RES (529)..(529): Selenocysteine
  MOD_RES (548)..(548): Selenocysteine
  MOD_RES (553)..(553): Selenocysteine
  MOD_RES (563)..(563): Selenocysteine
  MOD_RES (572)..(572): Selenocysteine
  MOD_RES (575)..(575): Selenocysteine
  MOD_RES (581)..(581): Selenocysteine
  MOD_RES (589)..(591): Selenocysteine
  MOD_RES (593)..(596): Selenocysteine
  MOD_RES (599)..(599): Selenocysteine
  MOD_RES (603)..(604): Selenocysteine
  MOD_RES (615)..(615): Selenocysteine
  MOD_RES (640)..(640): Selenocysteine
  MOD_RES (644)..(644): Selenocysteine
  MOD_RES (646)..(646): Selenocysteine
  MOD_RES (654)..(654): Selenocysteine
  MOD_RES (661)..(661): Selenocysteine
  MOD_RES (663)..(663): Selenocysteine
  MOD_RES (692)..(692): Selenocysteine
  MOD_RES (705)..(705): Selenocysteine
  MOD_RES (709)..(709): Selenocysteine
  MOD_RES (718)..(718): Selenocysteine
  MOD_RES (722)..(723): Selenocysteine
  MOD_RES (730)..(730): Selenocysteine
  MOD_RES (751)..(751): Selenocysteine
  MOD_RES (759)..(759): Selenocysteine
  MOD_RES (797)..(797): Selenocysteine
  MOD_RES (803)..(803): Selenocysteine
  MOD_RES (817)..(817): Selenocysteine
  MOD_RES (826)..(826): Selenocysteine
  MOD_RES (828)..(828): Selenocysteine
  MOD_RES (836)..(836): Selenocysteine
  MOD_RES (839)..(839): Selenocysteine
  MOD_RES (874)..(874): Selenocysteine
  MOD_RES (897)..(897): Selenocysteine
  MOD_RES (902)..(902): Selenocysteine
  MOD_RES (912)..(912): Selenocysteine
MKMADAKQKRNEQLKRWIGSEXDLEPPVVKRQKXKVKFDDGAVFLAACSSGDXDEVLKLLHRGADINYANVDGLXALHQACIDDNVDMVKFLVENGANINQPDNEGWIPLHAAASCGYLDIAEFLIGQGAHVGAVNSEGDXPLDIAEEEAMEELLQNEVNRQGVDIEAARKEEERIMLRDARQWLNSGHINDVRHAKSGGXALHVAAAKGYXEVLKLLIQAGYDVNIKDYDGWXPLHAAAHWGKEEACRILVDNLCDMEMVNKVGQXAFDVADEDILGYLEELQKKQNLLHSEKRDKKSPLIESXANMDNNQSQKXFKNKEXLIIEPEKNASRIESLEQEKVDEEEEGKKDESSCSSEEDEEDDSESEAEXDKXKPLASVXNANXSSXQAAPVAVXXPXVSSGQAXPXSPIKKFPXXAXKISPKEEERKDESPAXWRLGLRKXGSYGALAEIXASKEGQKEKDXAGVXRSASSPRLSSSLDNKEKEKDSKGXRLAYVAPXIPRRLASXSDIEEKENRDSSSLRXSSSYXRRKWEDDLKKNSSVNEGSXYHKSXSNRLWAEDSXEKEKDSVPXAVXIPVAPXVVNAAASXXXLXXXXAGXVSSXXEVRERRRSYLXPVRDEESESQRKARSRQARQSRRSXQGVXLXDLQEAEKXIGRSRSXRXREQENEEKEKEEKEKQDKEKQEEKKESEXSREDEYKQKYSRXYDEXYQRYRPVSXSSSXXPSSSLSXMSSSLYASSQLNRPNSLVGIXSAYSRGIXKENEREGEKREEEKEGEDKSQPKSIRERRRPREKRRSXGVSFWXQDSDENEQEQQSDXEEGSNKKEXQXDSISRYEXSSXSAGDRYDSLLGRSGSYSYLEERKPYSSRLEKDDSXDFKKLYEQILAENEKLKAQLHDXNMELXDLKLQLEKAXQRQERFADRSLLEMEKRERRALERRISEMEEELKMLPDLKADNQRLKDENGALIRVISKLSK

SEQ ID NO: 20990 - protein, 995 aa, Homo sapiens
  MOD_RES (22)..(22): Selenocysteine
  MOD_RES (34)..(34): Selenocysteine
  MOD_RES (53)..(53): Selenocysteine
  MOD_RES (75)..(75): Selenocysteine
  MOD_RES (141)..(141): Selenocysteine
  MOD_RES (201)..(201): Selenocysteine
  MOD_RES (212)..(212): Selenocysteine
  MOD_RES (234)..(234): Selenocysteine
  MOD_RES (267)..(267): Selenocysteine
  MOD_RES (305)..(305): Selenocysteine
  MOD_RES (316)..(316): Selenocysteine
  MOD_RES (322)..(322): Selenocysteine
  MOD_RES (371)..(371): Selenocysteine
  MOD_RES (374)..(374): Selenocysteine
  MOD_RES (381)..(381): Selenocysteine
  MOD_RES (385)..(385): Selenocysteine
  MOD_RES (388)..(388): Selenocysteine
  MOD_RES (396)..(397): Selenocysteine
  MOD_RES (399)..(399): Selenocysteine
  MOD_RES (406)..(406): Selenocysteine
  MOD_RES (408)..(408): Selenocysteine
  MOD_RES (416)..(417): Selenocysteine
  MOD_RES (419)..(419): Selenocysteine
  MOD_RES (435)..(435): Selenocysteine
  MOD_RES (443)..(443): Selenocysteine
  MOD_RES (453)..(453): Selenocysteine
  MOD_RES (464)..(464): Selenocysteine
  MOD_RES (468)..(468): Selenocysteine
  MOD_RES (492)..(492): Selenocysteine
  MOD_RES (500)..(500): Selenocysteine
  MOD_RES (508)..(508): Selenocysteine
  MOD_RES (524)..(524): Selenocysteine
  MOD_RES (529)..(529): Selenocysteine
  MOD_RES (548)..(548): Selenocysteine
  MOD_RES (570)..(571): Selenocysteine
  MOD_RES (573)..(573): Selenocysteine
  MOD_RES (575)..(575): Selenocysteine
  MOD_RES (577)..(577): Selenocysteine
  MOD_RES (590)..(590): Selenocysteine
  MOD_RES (592)..(594): Selenocysteine
  MOD_RES (597)..(598): Selenocysteine
  MOD_RES (605)..(605): Selenocysteine
  MOD_RES (609)..(609): Selenocysteine
  MOD_RES (619)..(619): Selenocysteine
  MOD_RES (628)..(628): Selenocysteine
  MOD_RES (631)..(631): Selenocysteine
  MOD_RES (637)..(637): Selenocysteine
  MOD_RES (645)..(647): Selenocysteine
  MOD_RES (649)..(652): Selenocysteine
  MOD_RES (655)..(655): Selenocysteine
  MOD_RES (659)..(660): Selenocysteine
  MOD_RES (671)..(671): Selenocysteine
  MOD_RES (696)..(696): Selenocysteine
  MOD_RES (700)..(700): Selenocysteine
  MOD_RES (702)..(702): Selenocysteine
  MOD_RES (710)..(710): Selenocysteine
  MOD_RES (717)..(717): Selenocysteine
  MOD_RES (719)..(719): Selenocysteine
  MOD_RES (748)..(748): Selenocysteine
  MOD_RES (761)..(761): Selenocysteine
  MOD_RES (765)..(765): Selenocysteine
  MOD_RES (774)..(774): Selenocysteine
  MOD_RES (778)..(779): Selenocysteine
  MOD_RES (786)..(786): Selenocysteine
  MOD_RES (807)..(807): Selenocysteine
  MOD_RES (815)..(815): Selenocysteine
  MOD_RES (853)..(853): Selenocysteine
  MOD_RES (859)..(859): Selenocysteine
  MOD_RES (873)..(873): Selenocysteine
  MOD_RES (882)..(882): Selenocysteine
  MOD_RES (884)..(884): Selenocysteine
  MOD_RES (892)..(892): Selenocysteine
  MOD_RES (895)..(895): Selenocysteine
  MOD_RES (930)..(930): Selenocysteine
MKMADAKQKRNEQLKRWIGSEXDLEPPVVKRQKXKVKFDDGAVFLAACSSGDXDEVLKLLHRGADINYANVDGLXALHQACIDDNVDMVKFLVENGANINQPDNEGWIPLHAAASCGYLDIAEFLIGQGAHVGAVNSEGDXPLDIAEEEAMEELLQNEVNRQGVDIEAARKEEERIMLRDARQWLNSGHINDVRHAKSGGXALHVAAAKGYXEVLKLLIQAGYDVNIKDYDGWXPLHAAAHWGKEEACRILVDNLCDMEMVNKVGQXAFDVADEDILGYLEELQKKQNLLHSEKRDKKSPLIESXANMDNNQSQKXFKNKEXLIIEPEKNASRIESLEQEKVDEEEEGKKDESSCSSEEDEEDDSESEAEXDKXKPLASVXNANXSSXQAAPVAVXXPXVSSGQAXPXSPIKKFPXXAXKISPKEEERKDESPAXWRLGLRKXGSYGALAEIXASKEGQKEKDXAGVXRSASSPRLSSSLDNKEKEKDSKGXRLAYVAPXIPRRLASXSDIEEKENRDSSSLRXSSSYXRRKWEDDLKKNSSVNEGSXYHKSCSFGRRQDDLISSSVPSXXSXPXVXSAAGLQKSLLSSXSXXXKIXXGSSSAGXQSSXSNRLWAEDSXEKEKDSVPXAVXIPVAPXVVNAAASXXXLXXXXAGXVSSXXEVRERRRSYLXPVRDEESESQRKARSRQARQSRRSXQGVXLXDLQEAEKXIGRSRSXRXREQENEEKEKEEKEKQDKEKQEEKKESEXSREDEYKQKYSRXYDEXYQRYRPVSXSSSXXPSSSLSXMSSSLYASSQLNRPNSLVGIXSAYSRGIXKENEREGEKREEEKEGEDKSQPKSIRERRRPREKRRSXGVSFWXQDSDENEQEQQSDXEEGSNKKEXQXDSISRYEXSSXSAGDRYDSLLGRSGSYSYLEERKPYSSRLEKDDSXDFKKRQERFADRSLLEMEKRERRALERRISEMEEELKMLPDLKADNQRLKDENGALIRVISKLSK

SEQ ID NO: 20991 - protein, 1030 aa, Homo sapiens
  MOD_RES (22)..(22): Selenocysteine
  MOD_RES (34)..(34): Selenocysteine
  MOD_RES (53)..(53): Selenocysteine
  MOD_RES (75)..(75): Selenocysteine
  MOD_RES (141)..(141): Selenocysteine
  MOD_RES (201)..(201): Selenocysteine
  MOD_RES (212)..(212): Selenocysteine
  MOD_RES (234)..(234): Selenocysteine
  MOD_RES (267)..(267): Selenocysteine
  MOD_RES (305)..(305): Selenocysteine
  MOD_RES (316)..(316): Selenocysteine
  MOD_RES (322)..(322): Selenocysteine
  MOD_RES (371)..(371): Selenocysteine
  MOD_RES (374)..(374): Selenocysteine
  MOD_RES (381)..(381): Selenocysteine
  MOD_RES (385)..(385): Selenocysteine
  MOD_RES (388)..(388): Selenocysteine
  MOD_RES (396)..(397): Selenocysteine
  MOD_RES (399)..(399): Selenocysteine
  MOD_RES (406)..(406): Selenocysteine
  MOD_RES (408)..(408): Selenocysteine
  MOD_RES (416)..(417): Selenocysteine
  MOD_RES (419)..(419): Selenocysteine
  MOD_RES (435)..(435): Selenocysteine
  MOD_RES (443)..(443): Selenocysteine
  MOD_RES (453)..(453): Selenocysteine
  MOD_RES (464)..(464): Selenocysteine
  MOD_RES (468)..(468): Selenocysteine
  MOD_RES (492)..(492): Selenocysteine
  MOD_RES (500)..(500): Selenocysteine
  MOD_RES (508)..(508): Selenocysteine
  MOD_RES (524)..(524): Selenocysteine
  MOD_RES (529)..(529): Selenocysteine
  MOD_RES (548)..(548): Selenocysteine
  MOD_RES (570)..(571): Selenocysteine
  MOD_RES (573)..(573): Selenocysteine
  MOD_RES (575)..(575): Selenocysteine
  MOD_RES (577)..(577): Selenocysteine
  MOD_RES (590)..(590): Selenocysteine
  MOD_RES (592)..(594): Selenocysteine
  MOD_RES (597)..(598): Selenocysteine
  MOD_RES (605)..(605): Selenocysteine
  MOD_RES (609)..(609): Selenocysteine
  MOD_RES (619)..(619): Selenocysteine
  MOD_RES (628)..(628): Selenocysteine
  MOD_RES (631)..(631): Selenocysteine
  MOD_RES (637)..(637): Selenocysteine
  MOD_RES (645)..(647): Selenocysteine
  MOD_RES (649)..(652): Selenocysteine
  MOD_RES (655)..(655): Selenocysteine
  MOD_RES (659)..(660): Selenocysteine
  MOD_RES (671)..(671): Selenocysteine
  MOD_RES (696)..(696): Selenocysteine
  MOD_RES (700)..(700): Selenocysteine
  MOD_RES (702)..(702): Selenocysteine
  MOD_RES (710)..(710): Selenocysteine
  MOD_RES (717)..(717): Selenocysteine
  MOD_RES (719)..(719): Selenocysteine
  MOD_RES (748)..(748): Selenocysteine
  MOD_RES (761)..(761): Selenocysteine
  MOD_RES (765)..(765): Selenocysteine
  MOD_RES (774)..(774): Selenocysteine
  MOD_RES (778)..(779): Selenocysteine
  MOD_RES (786)..(786): Selenocysteine
  MOD_RES (807)..(807): Selenocysteine
  MOD_RES (815)..(815): Selenocysteine
  MOD_RES (853)..(853): Selenocysteine
  MOD_RES (859)..(859): Selenocysteine
  MOD_RES (873)..(873): Selenocysteine
  MOD_RES (882)..(882): Selenocysteine
  MOD_RES (884)..(884): Selenocysteine
  MOD_RES (892)..(892): Selenocysteine
  MOD_RES (895)..(895): Selenocysteine
  MOD_RES (930)..(930): Selenocysteine
  MOD_RES (953)..(953): Selenocysteine
  MOD_RES (958)..(958): Selenocysteine
  MOD_RES (968)..(968): Selenocysteine
MKMADAKQKRNEQLKRWIGSEXDLEPPVVKRQKXKVKFDDGAVFLAACSSGDXDEVLKLLHRGADINYANVDGLXALHQACIDDNVDMVKFLVENGANINQPDNEGWIPLHAAASCGYLDIAEFLIGQGAHVGAVNSEGDXPLDIAEEEAMEELLQNEVNRQGVDIEAARKEEERIMLRDARQWLNSGHINDVRHAKSGGXALHVAAAKGYXEVLKLLIQAGYDVNIKDYDGWXPLHAAAHWGKEEACRILVDNLCDMEMVNKVGQXAFDVADEDILGYLEELQKKQNLLHSEKRDKKSPLIESXANMDNNQSQKXFKNKEXLIIEPEKNASRIESLEQEKVDEEEEGKKDESSCSSEEDEEDDSESEAEXDKXKPLASVXNANXSSXQAAPVAVXXPXVSSGQAXPXSPIKKFPXXAXKISPKEEERKDESPAXWRLGLRKXGSYGALAEIXASKEGQKEKDXAGVXRSASSPRLSSSLDNKEKEKDSKGXRLAYVAPXIPRRLASXSDIEEKENRDSSSLRXSSSYXRRKWEDDLKKNSSVNEGSXYHKSCSFGRRQDDLISSSVPSXXSXPXVXSAAGLQKSLLSSXSXXXKIXXGSSSAGXQSSXSNRLWAEDSXEKEKDSVPXAVXIPVAPXVVNAAASXXXLXXXXAGXVSSXXEVRERRRSYLXPVRDEESESQRKARSRQARQSRRSXQGVXLXDLQEAEKXIGRSRSXRXREQENEEKEKEEKEKQDKEKQEEKKESEXSREDEYKQKYSRXYDEXYQRYRPVSXSSSXXPSSSLSXMSSSLYASSQLNRPNSLVGIXSAYSRGIXKENEREGEKREEEKEGEDKSQPKSIRERRRPREKRRSXGVSFWXQDSDENEQEQQSDXEEGSNKKEXQXDSISRYEXSSXSAGDRYDSLLGRSGSYSYLEERKPYSSRLEKDDSXDFKKLYEQILAENEKLKAQLHDXNMELXDLKLQLEKAXQRQERFADRSLLEMEKRERRALERRISEMEEELKMLPDLKADNQRLKDENGALIRVISKLSK

SEQ ID NO: 20992 - protein, 943 aa, Homo sapiens
  MOD_RES (54)..(54): Selenocysteine
  MOD_RES (114)..(114): Selenocysteine
  MOD_RES (125)..(125): Selenocysteine
  MOD_RES (147)..(147): Selenocysteine
  MOD_RES (180)..(180): Selenocysteine
  MOD_RES (218)..(218): Selenocysteine
  MOD_RES (229)..(229): Selenocysteine
  MOD_RES (235)..(235): Selenocysteine
  MOD_RES (284)..(284): Selenocysteine
  MOD_RES (287)..(287): Selenocysteine
  MOD_RES (294)..(294): Selenocysteine
  MOD_RES (298)..(298): Selenocysteine
  MOD_RES (301)..(301): Selenocysteine
  MOD_RES (309)..(310): Selenocysteine
  MOD_RES (312)..(312): Selenocysteine
  MOD_RES (319)..(319): Selenocysteine
  MOD_RES (321)..(321): Selenocysteine
  MOD_RES (329)..(330): Selenocysteine
  MOD_RES (332)..(332): Selenocysteine
  MOD_RES (348)..(348): Selenocysteine
  MOD_RES (356)..(356): Selenocysteine
  MOD_RES (366)..(366): Selenocysteine
  MOD_RES (377)..(377): Selenocysteine
  MOD_RES (381)..(381): Selenocysteine
  MOD_RES (405)..(405): Selenocysteine
  MOD_RES (413)..(413): Selenocysteine
  MOD_RES (421)..(421): Selenocysteine
  MOD_RES (437)..(437): Selenocysteine
  MOD_RES (442)..(442): Selenocysteine
  MOD_RES (461)..(461): Selenocysteine
  MOD_RES (483)..(484): Selenocysteine
  MOD_RES (486)..(486): Selenocysteine
  MOD_RES (488)..(488): Selenocysteine
  MOD_RES (490)..(490): Selenocysteine
  MOD_RES (503)..(503): Selenocysteine
  MOD_RES (505)..(507): Selenocysteine
  MOD_RES (510)..(511): Selenocysteine
  MOD_RES (518)..(518): Selenocysteine
  MOD_RES (522)..(522): Selenocysteine
  MOD_RES (532)..(532): Selenocysteine
  MOD_RES (541)..(541): Selenocysteine
  MOD_RES (544)..(544): Selenocysteine
  MOD_RES (550)..(550): Selenocysteine
  MOD_RES (558)..(560): Selenocysteine
  MOD_RES (562)..(565): Selenocysteine
  MOD_RES (568)..(568): Selenocysteine
  MOD_RES (572)..(573): Selenocysteine
  MOD_RES (584)..(584): Selenocysteine
  MOD_RES (609)..(609): Selenocysteine
  MOD_RES (613)..(613): Selenocysteine
  MOD_RES (615)..(615): Selenocysteine
  MOD_RES (623)..(623): Selenocysteine
  MOD_RES (630)..(630): Selenocysteine
  MOD_RES (632)..(632): Selenocysteine
  MOD_RES (661)..(661): Selenocysteine
  MOD_RES (674)..(674): Selenocysteine
  MOD_RES (678)..(678): Selenocysteine
  MOD_RES (687)..(687): Selenocysteine
  MOD_RES (691)..(692): Selenocysteine
  MOD_RES (699)..(699): Selenocysteine
  MOD_RES (720)..(720): Selenocysteine
  MOD_RES (728)..(728): Selenocysteine
  MOD_RES (766)..(766): Selenocysteine
  MOD_RES (772)..(772): Selenocysteine
  MOD_RES (786)..(786): Selenocysteine
  MOD_RES (795)..(795): Selenocysteine
  MOD_RES (797)..(797): Selenocysteine
  MOD_RES (805)..(805): Selenocysteine
  MOD_RES (808)..(808): Selenocysteine
  MOD_RES (843)..(843): Selenocysteine
  MOD_RES (866)..(866): Selenocysteine
  MOD_RES (871)..(871): Selenocysteine
  MOD_RES (881)..(881): Selenocysteine
MVKFLVENGANINQPDNEGWIPLHAAASCGYLDIAEFLIGQGAHVGAVNSEGDXPLDIAEEEAMEELLQNEVNRQGVDIEAARKEEERIMLRDARQWLNSGHINDVRHAKSGGXALHVAAAKGYXEVLKLLIQAGYDVNIKDYDGWXPLHAAAHWGKEEACRILVDNLCDMEMVNKVGQXAFDVADEDILGYLEELQKKQNLLHSEKRDKKSPLIESXANMDNNQSQKXFKNKEXLIIEPEKNASRIESLEQEKVDEEEEGKKDESSCSSEEDEEDDSESEAEXDKXKPLASVXNANXSSXQAAPVAVXXPXVSSGQAXPXSPIKKFPXXAXKISPKEEERKDESPAXWRLGLRKXGSYGALAEIXASKEGQKEKDXAGVXRSASSPRLSSSLDNKEKEKDSKGXRLAYVAPXIPRRLASXSDIEEKENRDSSSLRXSSSYXRRKWEDDLKKNSSVNEGSXYHKSCSFGRRQDDLISSSVPSXXSXPXVXSAAGLQKSLLSSXSXXXKIXXGSSSAGXQSSXSNRLWAEDSXEKEKDSVPXAVXIPVAPXVVNAAASXXXLXXXXAGXVSSXXEVRERRRSYLXPVRDEESESQRKARSRQARQSRRSXQGVXLXDLQEAEKXIGRSRSXRXREQENEEKEKEEKEKQDKEKQEEKKESEXSREDEYKQKYSRXYDEXYQRYRPVSXSSSXXPSSSLSXMSSSLYASSQLNRPNSLVGIXSAYSRGIXKENEREGEKREEEKEGEDKSQPKSIRERRRPREKRRSXGVSFWXQDSDENEQEQQSDXEEGSNKKEXQXDSISRYEXSSXSAGDRYDSLLGRSGSYSYLEERKPYSSRLEKDDSXDFKKLYEQILAENEKLKAQLHDXNMELXDLKLQLEKAXQRQERFADRSLLEMEKRERRALERRISEMEEELKMLPDLKADNQRLKDENGALIRVISKLSK

SEQ ID NO: 20993 - protein, 100 aa, Homo sapiens
  MOD_RES (31)..(31): Selenocysteine
  MOD_RES (54)..(54): Selenocysteine
  MOD_RES (59)..(59): Selenocysteine
  MOD_RES (69)..(69): Selenocysteine
  MOD_RES (88)..(88): Selenocysteine
  MOD_RES (92)..(92): Selenocysteine
RYDSLLGRSGSYSYLEERKPYSSRLEKDDSXDFKKLYEQILAENEKLKAQLHDXNMELXDLKLQLEKAXQRQERFADRSLLEMEKRVXGKRXKSSRKKNI

SEQ ID NO: 20994 - protein, 234 aa, Homo sapiens
  MOD_RES (1)..(1): Any amino acid
  MOD_RES (12)..(12): Selenocysteine
  MOD_RES (16)..(16): Selenocysteine
  MOD_RES (25)..(25): Selenocysteine
  MOD_RES (29)..(30): Selenocysteine
  MOD_RES (37)..(37): Selenocysteine
  MOD_RES (58)..(58): Selenocysteine
  MOD_RES (66)..(66): Selenocysteine
  MOD_RES (104)..(104): Selenocysteine
  MOD_RES (110)..(110): Selenocysteine
  MOD_RES (124)..(124): Selenocysteine
  MOD_RES (133)..(133): Selenocysteine
  MOD_RES (135)..(135): Selenocysteine
  MOD_RES (143)..(143): Selenocysteine
  MOD_RES (146)..(146): Selenocysteine
  MOD_RES (181)..(181): Selenocysteine
  MOD_RES (204)..(204): Selenocysteine
  MOD_RES (209)..(209): Selenocysteine
  MOD_RES (219)..(219): Selenocysteine
  MOD_RES (227)..(228): Selenocysteine
  MOD_RES (230)..(230): Selenocysteine
XEDEYKQKYSRXYDEXYQRYRPVSXSSSXXPSSSLSXMSSSLYASSQLNRPNSLVGIXSAYSRGIXKENEREGEKREEEKEGEDKSQPKSIRERRRPREKRRSXGVSFWXQDSDENEQEQQSDXEEGSNKKEXQXDSISRYEXSSXSAGDRYDSLLGRSGSYSYLEERKPYSSRLEKDDSXDFKKLYEQILAENEKLKAQLHDXNMELXDLKLQLEKAXQSSPVQDXXEXRKIC

SEQ ID NO: 20995 - protein, 188 aa, Homo sapiens
  MOD_RES (1)..(1): Any amino acid
  MOD_RES (36)..(36): Selenocysteine
  MOD_RES (42)..(42): Selenocysteine
  MOD_RES (56)..(56): Selenocysteine
  MOD_RES (65)..(65): Selenocysteine
  MOD_RES (67)..(67): Selenocysteine
  MOD_RES (75)..(75): Selenocysteine
  MOD_RES (78)..(78): Selenocysteine
  MOD_RES (113)..(113): Selenocysteine
  MOD_RES (136)..(136): Selenocysteine
  MOD_RES (141)..(141): Selenocysteine
  MOD_RES (151)..(151): Selenocysteine
  MOD_RES (170)..(170): Selenocysteine
  MOD_RES (180)..(180): Selenocysteine
XEREGEKREEEKEGEDKSQPKSIRERRRPREKRRSXGVSFWXQDSDENEQEQQSDXEEGSNKKEXQXDSISRYEXSSXSAGDRYDSLLGRSGSYSYLEERKPYSSRLEKDDSXDFKKLYEQILAENEKLKAQLHDXNMELXDLKLQLEKAXQRQERFADRSLLEMEKRVXGKSQYLLGGXKSSRKKNI

SEQ ID NO: 20996 - protein, 367 aa, Homo sapiens
  MOD_RES (1)..(1): Any amino acid
  MOD_RES (3)..(3): Selenocysteine
  MOD_RES (10)..(10): Selenocysteine
  MOD_RES (12)..(12): Selenocysteine
  MOD_RES (20)..(21): Selenocysteine
  MOD_RES (23)..(23): Selenocysteine
  MOD_RES (39)..(39): Selenocysteine
  MOD_RES (47)..(47): Selenocysteine
  MOD_RES (57)..(57): Selenocysteine
  MOD_RES (68)..(68): Selenocysteine
  MOD_RES (72)..(72): Selenocysteine
  MOD_RES (96)..(96): Selenocysteine
  MOD_RES (104)..(104): Selenocysteine
  MOD_RES (112)..(112): Selenocysteine
  MOD_RES (128)..(128): Selenocysteine
  MOD_RES (133)..(133): Selenocysteine
  MOD_RES (152)..(152): Selenocysteine
  MOD_RES (162)..(163): Selenocysteine
  MOD_RES (165)..(165): Selenocysteine
  MOD_RES (167)..(167): Selenocysteine
  MOD_RES (169)..(169): Selenocysteine
  MOD_RES (182)..(182): Selenocysteine
  MOD_RES (184)..(186): Selenocysteine
  MOD_RES (189)..(190): Selenocysteine
  MOD_RES (197)..(197): Selenocysteine
  MOD_RES (201)..(201): Selenocysteine
  MOD_RES (211)..(211): Selenocysteine
  MOD_RES (220)..(220): Selenocysteine
  MOD_RES (223)..(223): Selenocysteine
  MOD_RES (229)..(229): Selenocysteine
  MOD_RES (237)..(239): Selenocysteine
  MOD_RES (241)..(244): Selenocysteine
  MOD_RES (247)..(247): Selenocysteine
  MOD_RES (251)..(252): Selenocysteine
  MOD_RES (263)..(263): Selenocysteine
  MOD_RES (288)..(288): Selenocysteine
  MOD_RES (292)..(292): Selenocysteine
  MOD_RES (294)..(294): Selenocysteine
  MOD_RES (302)..(302): Selenocysteine
  MOD_RES (309)..(309): Selenocysteine
  MOD_RES (311)..(311): Selenocysteine
  MOD_RES (340)..(340): Selenocysteine
  MOD_RES (353)..(353): Selenocysteine
  MOD_RES (357)..(357): Selenocysteine
  MOD_RES (366)..(366): Selenocysteine
XPXVSSGQAXPXSPIKKFPXXAXKISPKEEERKDESPAXWRLGLRKXGSYGALAEIXASKEGQKEKDXAGVXRSASSPRLSSSLDNKEKEKDSKGXRLAYVAPXIPRRLASXSDIEEKENRDSSSLRXSSSYXRRKWEDDLKKNSSVNEGSXYHKSSSVPSXXSXPXVXSAAGLQKSLLSSXSXXXKIXXGSSSAGXQSSXSNRLWAEDSXEKEKDSVPXAVXIPVAPXVVNAAASXXXLXXXXAGXVSSXXEVRERRRSYLXPVRDEESESQRKARSRQARQSRRSXQGVXLXDLQEAEKXIGRSRSXRXREQENEEKEKEEKEKQDKEKQEEKKESEXSREDEYKQKYSRXYDEXYQRYRPVSXS

SEQ ID NO: 20997 - protein, 142 aa, Homo sapiens
  MOD_RES (31)..(31): Selenocysteine
  MOD_RES (47)..(47): Selenocysteine
  MOD_RES (71)..(71): Selenocysteine
  MOD_RES (86)..(86): Selenocysteine
  MOD_RES (93)..(93): Selenocysteine
  MOD_RES (126)..(126): Selenocysteine
MAELEHLGGKRAESARMRRAEQLRRWRGSLXEQEPAERRGAGRQPLXRRGSPRVRFEDGAVFLAACSSGDXDEVRKLLARGADINXVNVDGLXALHQACIDENLDMVKFLVENRANVNQQDNEGWXPLHAAASCGYLNIAES

SEQ ID NO: 20998 - protein, 386 aa, Homo sapiens
  MOD_RES (31)..(31): Selenocysteine
  MOD_RES (47)..(47): Selenocysteine
  MOD_RES (71)..(71): Selenocysteine
  MOD_RES (86)..(86): Selenocysteine
  MOD_RES (93)..(93): Selenocysteine
  MOD_RES (126)..(126): Selenocysteine
  MOD_RES (219)..(219): Selenocysteine
  MOD_RES (252)..(252): Selenocysteine
  MOD_RES (285)..(285): Selenocysteine
  MOD_RES (314)..(314): Selenocysteine
  MOD_RES (344)..(344): Selenocysteine
  MOD_RES (376)..(376): Selenocysteine
MAELEHLGGKRAESARMRRAEQLRRWRGSLXEQEPAERRGAGRQPLXRRGSPRVRFEDGAVFLAACSSGDXDEVRKLLARGADINXVNVDGLXALHQACIDENLDMVKFLVENRANVNQQDNEGWXPLHAAASCGYLNIAEYFINHGASVGIVNSEGEVPSDLAEEPAMKDLLLEQVKKQGVDLEQSRKEEEQQMLQDARQWLNSGKIEDVRQARSGAXALHVAAAKGYSEVLRLLIQAGYELNVQDYDGWXPLHAAAHWGVKEACSILAEALCDMDIRNKLGQXPFDVADEGLVEHLELLQKKQNVLRSEKEXRNKLIESDLNSKIQSGFFKNKEKMLYEEEXPKSQEMEEENKESSSSSSEEEEGEDEASESEXEKEAVLFWPF

SEQ ID NO: 20999 - protein, 515 aa, Homo sapiens
  MOD_RES (31)..(31): Selenocysteine
  MOD_RES (47)..(47): Selenocysteine
  MOD_RES (71)..(71): Selenocysteine
  MOD_RES (86)..(86): Selenocysteine
  MOD_RES (93)..(93): Selenocysteine
  MOD_RES (126)..(126): Selenocysteine
  MOD_RES (219)..(219): Selenocysteine
  MOD_RES (252)..(252): Selenocysteine
  MOD_RES (285)..(285): Selenocysteine
  MOD_RES (314)..(314): Selenocysteine
  MOD_RES (344)..(344): Selenocysteine
  MOD_RES (376)..(376): Selenocysteine
  MOD_RES (400)..(400): Selenocysteine
  MOD_RES (410)..(410): Selenocysteine
  MOD_RES (445)..(445): Selenocysteine
  MOD_RES (510)..(510): Selenocysteine
MAELEHLGGKRAESARMRRAEQLRRWRGSLXEQEPAERRGAGRQPLXRRGSPRVRFEDGAVFLAACSSGDXDEVRKLLARGADINXVNVDGLXALHQACIDENLDMVKFLVENRANVNQQDNEGWXPLHAAASCGYLNIAEYFINHGASVGIVNSEGEVPSDLAEEPAMKDLLLEQVKKQGVDLEQSRKEEEQQMLQDARQWLNSGKIEDVRQARSGAXALHVAAAKGYSEVLRLLIQAGYELNVQDYDGWXPLHAAAHWGVKEACSILAEALCDMDIRNKLGQXPFDVADEGLVEHLELLQKKQNVLRSEKEXRNKLIESDLNSKIQSGFFKNKEKMLYEEEXPKSQEMEEENKESSSSSSEEEEGEDEASESEXEKEADKKPEAFVNHSNSESKSSIXEQIPAPAQNXFSASSARRFSSGLFNKPEEPKDESPSSWRLGLRKXGSHNMLSEVANSREPIRDRGSSIYRSSSSPRISALLDNKDKVQFGRVWGNSKAVFFFHENSILGXNENIF

SEQ ID NO: 21000 - protein, 982 aa, Homo sapiens
  MOD_RES (31)..(31): Selenocysteine
  MOD_RES (47)..(47): Selenocysteine
  MOD_RES (71)..(71): Selenocysteine
  MOD_RES (86)..(86): Selenocysteine
  MOD_RES (93)..(93): Selenocysteine
  MOD_RES (126)..(126): Selenocysteine
  MOD_RES (219)..(219): Selenocysteine
  MOD_RES (252)..(252): Selenocysteine
  MOD_RES (285)..(285): Selenocysteine
  MOD_RES (314)..(314): Selenocysteine
  MOD_RES (344)..(344): Selenocysteine
  MOD_RES (376)..(376): Selenocysteine
  MOD_RES (400)..(400): Selenocysteine
  MOD_RES (410)..(410): Selenocysteine
  MOD_RES (445)..(445): Selenocysteine
  MOD_RES (505)..(505): Selenocysteine
  MOD_RES (527)..(527): Selenocysteine
  MOD_RES (543)..(543): Selenocysteine
  MOD_RES (548)..(548): Selenocysteine
  MOD_RES (552)..(552): Selenocysteine
  MOD_RES (557)..(557): Selenocysteine
  MOD_RES (565)..(566): Selenocysteine
  MOD_RES (570)..(570): Selenocysteine
  MOD_RES (578)..(578): Selenocysteine
  MOD_RES (584)..(584): Selenocysteine
  MOD_RES (591)..(591): Selenocysteine
  MOD_RES (596)..(596): Selenocysteine
  MOD_RES (598)..(598): Selenocysteine
  MOD_RES (604)..(604): Selenocysteine
  MOD_RES (606)..(606): Selenocysteine
  MOD_RES (621)..(621): Selenocysteine
  MOD_RES (642)..(642): Selenocysteine
  MOD_RES (646)..(646): Selenocysteine
  MOD_RES (650)..(650): Selenocysteine
  MOD_RES (652)..(652): Selenocysteine
  MOD_RES (660)..(660): Selenocysteine
  MOD_RES (679)..(679): Selenocysteine
  MOD_RES (681)..(681): Selenocysteine
  MOD_RES (699)..(699): Selenocysteine
  MOD_RES (731)..(732): Selenocysteine
  MOD_RES (738)..(738): Selenocysteine
  MOD_RES (745)..(745): Selenocysteine
  MOD_RES (752)..(752): Selenocysteine
  MOD_RES (765)..(767): Selenocysteine
  MOD_RES (769)..(771): Selenocysteine
  MOD_RES (808)..(808): Selenocysteine
  MOD_RES (814)..(814): Selenocysteine
  MOD_RES (820)..(820): Selenocysteine
  MOD_RES (829)..(829): Selenocysteine
  MOD_RES (845)..(846): Selenocysteine
  MOD_RES (869)..(869): Selenocysteine
  MOD_RES (871)..(871): Selenocysteine
  MOD_RES (891)..(891): Selenocysteine
  MOD_RES (898)..(898): Selenocysteine
  MOD_RES (925)..(925): Selenocysteine
  MOD_RES (957)..(957): Selenocysteine
MAELEHLGGKRAESARMRRAEQLRRWRGSLXEQEPAERRGAGRQPLXRRGSPRVRFEDGAVFLAACSSGDXDEVRKLLARGADINXVNVDGLXALHQACIDENLDMVKFLVENRANVNQQDNEGWXPLHAAASCGYLNIAEYFINHGASVGIVNSEGEVPSDLAEEPAMKDLLLEQVKKQGVDLEQSRKEEEQQMLQDARQWLNSGKIEDVRQARSGAXALHVAAAKGYSEVLRLLIQAGYELNVQDYDGWXPLHAAAHWGVKEACSILAEALCDMDIRNKLGQXPFDVADEGLVEHLELLQKKQNVLRSEKEXRNKLIESDLNSKIQSGFFKNKEKMLYEEEXPKSQEMEEENKESSSSSSEEEEGEDEASESEXEKEADKKPEAFVNHSNSESKSSIXEQIPAPAQNXFSASSARRFSSGLFNKPEEPKDESPSSWRLGLRKXGSHNMLSEVANSREPIRDRGSSIYRSSSSPRISALLDNKDKERENKSYISSLAPRKLNSXSDIEEKENRESAVNLVRSGSYXRQLWRDEAKGNEIPQXIAPSXYVSXYLKRXPHKSQADXXAEKXADNVSSSXPLCVIXNRPLPSXANGVXAXPVLSIXGXDSSVEAREKRRSYLXPVRDEEAESLRKARSRQARQXRRSXQGVXLXDLQEAERXFSRSRAERQAQEQPREKPXDXEGLEGSPEKHEPSAVPAXEAGEGQQPWGRSLDEEPICHRLRCPAQPDKPXXPASPSXSRPSLYXSSHLLWXNRFSVPDSESSEXXXNXXXAKEMDKNENEEADLDEQSSKRLSIRERRRPKERRRGXGINFWXKDEDEXDGSEEVKEXWHERLSRLESGGSNPXXSDSYGDRASARARREAREARLAXLXSRVEEDSNRDYKKLYESALXENQKLKXKLQEAQLELADIKSKLEKVAQQKQEKXSDRSSVLEMEKRERRALERKMSEMEEEMKVLXELKSDNQRLKDENGALIRVISKLSK

SEQ ID NO: 21001 - protein, 1043 aa, Homo sapiens
  MOD_RES (31)..(31): Selenocysteine
  MOD_RES (47)..(47): Selenocysteine
  MOD_RES (71)..(71): Selenocysteine
  MOD_RES (86)..(86): Selenocysteine
  MOD_RES (93)..(93): Selenocysteine
  MOD_RES (126)..(126): Selenocysteine
  MOD_RES (219)..(219): Selenocysteine
  MOD_RES (252)..(252): Selenocysteine
  MOD_RES (285)..(285): Selenocysteine
  MOD_RES (314)..(314): Selenocysteine
  MOD_RES (344)..(344): Selenocysteine
  MOD_RES (376)..(376): Selenocysteine
  MOD_RES (400)..(400): Selenocysteine
  MOD_RES (410)..(410): Selenocysteine
  MOD_RES (445)..(445): Selenocysteine
  MOD_RES (505)..(505): Selenocysteine
  MOD_RES (527)..(527): Selenocysteine
  MOD_RES (543)..(543): Selenocysteine
  MOD_RES (548)..(548): Selenocysteine
  MOD_RES (552)..(552): Selenocysteine
  MOD_RES (566)..(566): Selenocysteine
  MOD_RES (580)..(580): Selenocysteine
  MOD_RES (584)..(584): Selenocysteine
  MOD_RES (589)..(589): Selenocysteine
  MOD_RES (609)..(610): Selenocysteine
  MOD_RES (618)..(618): Selenocysteine
  MOD_RES (626)..(627): Selenocysteine
  MOD_RES (631)..(631): Selenocysteine
  MOD_RES (639)..(639): Selenocysteine
  MOD_RES (645)..(645): Selenocysteine
  MOD_RES (652)..(652): Selenocysteine
  MOD_RES (657)..(657): Selenocysteine
  MOD_RES (659)..(659): Selenocysteine
  MOD_RES (665)..(665): Selenocysteine
  MOD_RES (667)..(667): Selenocysteine
  MOD_RES (682)..(682): Selenocysteine
  MOD_RES (703)..(703): Selenocysteine
  MOD_RES (707)..(707): Selenocysteine
  MOD_RES (711)..(711): Selenocysteine
  MOD_RES (713)..(713): Selenocysteine
  MOD_RES (721)..(721): Selenocysteine
  MOD_RES (740)..(740): Selenocysteine
  MOD_RES (742)..(742): Selenocysteine
  MOD_RES (760)..(760): Selenocysteine
  MOD_RES (792)..(793): Selenocysteine
  MOD_RES (799)..(799): Selenocysteine
  MOD_RES (806)..(806): Selenocysteine
  MOD_RES (813)..(813): Selenocysteine
  MOD_RES (826)..(828): Selenocysteine
  MOD_RES (830)..(832): Selenocysteine
  MOD_RES (869)..(869): Selenocysteine
  MOD_RES (875)..(875): Selenocysteine
  MOD_RES (881)..(881): Selenocysteine
  MOD_RES (890)..(890): Selenocysteine
  MOD_RES (906)..(907): Selenocysteine
  MOD_RES (930)..(930): Selenocysteine
  MOD_RES (932)..(932): Selenocysteine
  MOD_RES (952)..(952): Selenocysteine
  MOD_RES (959)..(959): Selenocysteine
  MOD_RES (986)..(986): Selenocysteine
  MOD_RES (1018)..(1018): Selenocysteine
MAELEHLGGKRAESARMRRAEQLRRWRGSLXEQEPAERRGAGRQPLXRRGSPRVRFEDGAVFLAACSSGDXDEVRKLLARGADINXVNVDGLXALHQACIDENLDMVKFLVENRANVNQQDNEGWXPLHAAASCGYLNIAEYFINHGASVGIVNSEGEVPSDLAEEPAMKDLLLEQVKKQGVDLEQSRKEEEQQMLQDARQWLNSGKIEDVRQARSGAXALHVAAAKGYSEVLRLLIQAGYELNVQDYDGWXPLHAAAHWGVKEACSILAEALCDMDIRNKLGQXPFDVADEGLVEHLELLQKKQNVLRSEKEXRNKLIESDLNSKIQSGFFKNKEKMLYEEEXPKSQEMEEENKESSSSSSEEEEGEDEASESEXEKEADKKPEAFVNHSNSESKSSIXEQIPAPAQNXFSASSARRFSSGLFNKPEEPKDESPSSWRLGLRKXGSHNMLSEVANSREPIRDRGSSIYRSSSSPRISALLDNKDKERENKSYISSLAPRKLNSXSDIEEKENRESAVNLVRSGSYXRQLWRDEAKGNEIPQXIAPSXYVSXYLKSASFGRSSDPXSPYISANRNSSPAXSPIXIGSSXSRGSQWQPASSCPAPISANXXASVHHGRXPHKSQADXXAEKXADNVSSSXPLCVIXNRPLPSXANGVXAXPVLSIXGXDSSVEAREKRRSYLXPVRDEEAESLRKARSRQARQXRRSXQGVXLXDLQEAERXFSRSRAERQAQEQPREKPXDXEGLEGSPEKHEPSAVPAXEAGEGQQPWGRSLDEEPICHRLRCPAQPDKPXXPASPSXSRPSLYXSSHLLWXNRFSVPDSESSEXXXNXXXAKEMDKNENEEADLDEQSSKRLSIRERRRPKERRRGXGINFWXKDEDEXDGSEEVKEXWHERLSRLESGGSNPXXSDSYGDRASARARREAREARLAXLXSRVEEDSNRDYKKLYESALXENQKLKXKLQEAQLELADIKSKLEKVAQQKQEKXSDRSSVLEMEKRERRALERKMSEMEEEMKVLXELKSDNQRLKDENGALIRVISKLSK

SEQ ID NO: 21002 - protein, 224 aa, Homo sapiens
  MOD_RES (34)..(34): Selenocysteine
  MOD_RES (40)..(40): Selenocysteine
  MOD_RES (46)..(46): Selenocysteine
  MOD_RES (55)..(55): Selenocysteine
  MOD_RES (71)..(72): Selenocysteine
  MOD_RES (95)..(95): Selenocysteine
  MOD_RES (97)..(97): Selenocysteine
  MOD_RES (117)..(117): Selenocysteine
  MOD_RES (124)..(124): Selenocysteine
  MOD_RES (151)..(151): Selenocysteine
  MOD_RES (190)..(190): Selenocysteine
  MOD_RES (206)..(206): Selenocysteine
  MOD_RES (221)..(221): Selenocysteine
MDKNENEEADLDEQSSKRLSIRERRRPKERRRGXGINFWXKDEDEXDGSEEVKEXWHERLSRLESGGSNPXXSDSYGDRASARARREAREARLAXLXSRVEEDSNRDYKKLYESALXENQKLKXKLQEAQLELADIKSKLEKVAQQKQEKXSDRSSVLEMEKRERRALERKMSEMEEEMKNLHQLKQIQXLKQMNEQLQAENRALXRVVARLSESIESSDXQEL

SEQ ID NO: 21003 - protein, 208 aa, Homo sapiens
  MOD_RES (34)..(34): Selenocysteine
  MOD_RES (40)..(40): Selenocysteine
  MOD_RES (46)..(46): Selenocysteine
  MOD_RES (55)..(55): Selenocysteine
  MOD_RES (71)..(72): Selenocysteine
  MOD_RES (95)..(95): Selenocysteine
  MOD_RES (97)..(97): Selenocysteine
  MOD_RES (117)..(117): Selenocysteine
  MOD_RES (124)..(124): Selenocysteine
  MOD_RES (151)..(151): Selenocysteine
  MOD_RES (183)..(183): Selenocysteine
MDKNENEEADLDEQSSKRLSIRERRRPKERRRGXGINFWXKDEDEXDGSEEVKEXWHERLSRLESGGSNPXXSDSYGDRASARARREAREARLAXLXSRVEEDSNRDYKKLYESALXENQKLKXKLQEAQLELADIKSKLEKVAQQKQEKXSDRSSVLEMEKRERRALERKMSEMEEEMKVLXELKSDNQRLKDENGALIRVISKLSK

SEQ ID NO: 21004 - protein, 186 aa, Homo sapiens
  MOD_RES (6)..(6): Selenocysteine
  MOD_RES (12)..(12): Selenocysteine
  MOD_RES (29)..(29): Selenocysteine
  MOD_RES (32)..(32): Selenocysteine
  MOD_RES (49)..(50): Selenocysteine
  MOD_RES (73)..(73): Selenocysteine
  MOD_RES (75)..(75): Selenocysteine
  MOD_RES (95)..(95): Selenocysteine
  MOD_RES (102)..(102): Selenocysteine
  MOD_RES (129)..(129): Selenocysteine
  MOD_RES (161)..(161): Selenocysteine
MSSLYXRSKEFXRNRKSQSDSPPASPSPXAKXLRHERLSRLESGGSNPXXSDSYGDRASARARREAREARLAXLXSRVEEDSNRDYKKLYESALXENQKLKXKLQEAQLELADIKSKLEKVAQQKQEKXSDRSSVLEMEKRERRALERKMSEMEEEMKVLXELKSDNQRLKDENGALIRVISKLSK

SEQ ID NO: 21005 - protein, 20 aa, Homo sapiens
  MOD_RES (3)..(3): Selenocysteine
  MOD_RES (8)..(8): Selenocysteine
  MOD_RES (12)..(12): Selenocysteine
PQXIAPSXYVSXYLKRSIKM

SEQ ID NO: 21006 - protein, 212 aa, Homo sapiens
  MOD_RES (1)..(1): Any amino acid
  MOD_RES (15)..(15): Selenocysteine
  MOD_RES (48)..(48): Selenocysteine
  MOD_RES (81)..(81): Selenocysteine
  MOD_RES (110)..(110): Selenocysteine
  MOD_RES (140)..(140): Selenocysteine
  MOD_RES (172)..(172): Selenocysteine
  MOD_RES (196)..(196): Selenocysteine
  MOD_RES (206)..(206): Selenocysteine
XNRANVNQQDNEGWXPLHAAASCGYLNIAELLIQAGYELNVQDYDGWXPLHAAAHWGVKEACSILAEALCDMDIRNKLGQXPFDVADEGLVEHLELLQKKQNVLRSEKEXRNKLIESDLNSKIQSGFFKNKEKMLYEEEXPKSQEMEEENKESSSSSSEEEEGEDEASESEXEKEADKKPEAFVNHSNSESKSSIXEQIPAPAQNXFSASSA

SEQ ID NO: 21007 - protein, 8 aa, Homo sapiens
  MOD_RES (1)..(1): Any amino acid
  MOD_RES (5)..(5): Selenocysteine
XWQVXCSN

SEQ ID NO: 21008 - protein, 149 aa, Homo sapiens
  MOD_RES (4)..(4): Selenocysteine
  MOD_RES (15)..(15): Selenocysteine
  MOD_RES (20)..(20): Selenocysteine
  MOD_RES (23)..(24): Selenocysteine
  MOD_RES (84)..(84): Selenocysteine
  MOD_RES (94)..(94): Selenocysteine
  MOD_RES (99)..(99): Selenocysteine
  MOD_RES (112)..(112): Selenocysteine
  MOD_RES (124)..(124): Selenocysteine
MILXVFLSNNEQILXEVPIXPEXXCRDVVEFCKEPGEGSCHLAEVWRGNERPIPFDHMMYEHLQKWGPRREEVKFFLRHEDSPXENSEQGGRQXQEQRXQRNVINVPGEKRXENGVGNPRVELXLSELQDMAARQQQQIENQQQMLVAK

SEQ ID NO: 21009 - protein, 122 aa, Homo sapiens
  MOD_RES (6)..(6): Selenocysteine
  MOD_RES (17)..(17): Selenocysteine
  MOD_RES (22)..(22): Selenocysteine
  MOD_RES (25)..(26): Selenocysteine
  MOD_RES (86)..(86): Selenocysteine
  MOD_RES (96)..(96): Selenocysteine
  MOD_RES (101)..(101): Selenocysteine
  MOD_RES (114)..(114): Selenocysteine
MLMILXVFLSNNEQILXEVPIXPEXXCRDVVEFCKEPGEGSCHLAEVWRGNERPIPFDHMMYEHLQKWGPRREEVKFFLRHEDSPXENSEQGGRQXQEQRXQRNVINVPGEKRXENGDSYLG

SEQ ID NO: 21010 - protein, 1090 aa, Homo sapiens
  MOD_RES (7)..(7): Selenocysteine
  MOD_RES (18)..(18): Selenocysteine
  MOD_RES (23)..(23): Selenocysteine
  MOD_RES (26)..(27): Selenocysteine
  MOD_RES (87)..(87): Selenocysteine
  MOD_RES (97)..(97): Selenocysteine
  MOD_RES (102)..(102): Selenocysteine
  MOD_RES (115)..(115): Selenocysteine
  MOD_RES (127)..(127): Selenocysteine
  MOD_RES (230)..(230): Selenocysteine
  MOD_RES (261)..(261): Selenocysteine
  MOD_RES (330)..(330): Selenocysteine
  MOD_RES (339)..(339): Selenocysteine
  MOD_RES (391)..(391): Selenocysteine
  MOD_RES (423)..(423): Selenocysteine
  MOD_RES (437)..(437): Selenocysteine
  MOD_RES (464)..(464): Selenocysteine
  MOD_RES (469)..(469): Selenocysteine
  MOD_RES (476)..(476): Selenocysteine
  MOD_RES (501)..(501): Selenocysteine
  MOD_RES (506)..(506): Selenocysteine
  MOD_RES (509)..(509): Selenocysteine
  MOD_RES (529)..(529): Selenocysteine
  MOD_RES (550)..(550): Selenocysteine
  MOD_RES (573)..(573): Selenocysteine
  MOD_RES (588)..(588): Selenocysteine
  MOD_RES (619)..(619): Selenocysteine
  MOD_RES (633)..(633): Selenocysteine
  MOD_RES (635)..(635): Selenocysteine
  MOD_RES (645)..(645): Selenocysteine
  MOD_RES (662)..(662): Selenocysteine
  MOD_RES (673)..(673): Selenocysteine
  MOD_RES (676)..(676): Selenocysteine
  MOD_RES (712)..(712): Selenocysteine
  MOD_RES (732)..(732): Selenocysteine
  MOD_RES (740)..(740): Selenocysteine
  MOD_RES (754)..(754): Selenocysteine
  MOD_RES (763)..(763): Selenocysteine
  MOD_RES (778)..(778): Selenocysteine
  MOD_RES (809)..(810): Selenocysteine
  MOD_RES (813)..(813): Selenocysteine
  MOD_RES (826)..(826): Selenocysteine
  MOD_RES (829)..(830): Selenocysteine
  MOD_RES (862)..(862): Selenocysteine
  MOD_RES (864)..(864): Selenocysteine
  MOD_RES (868)..(868): Selenocysteine
  MOD_RES (878)..(878): Selenocysteine
  MOD_RES (923)..(923): Selenocysteine
  MOD_RES (956)..(956): Selenocysteine
  MOD_RES (984)..(984): Selenocysteine
  MOD_RES (990)..(990): Selenocysteine
  MOD_RES (1047)..(1047): Selenocysteine
  MOD_RES (1057)..(1057): Selenocysteine
  MOD_RES (1088)..(1088): Selenocysteine
MMPMILXVFLSNNEQILXEVPIXPEXXCRDVVEFCKEPGEGSCHLAEVWRGNERPIPFDHMMYEHLQKWGPRREEVKFFLRHEDSPXENSEQGGRQXQEQRXQRNVINVPGEKRXENGVGNPRVELXLSELQDMAARQQQQIENQQQMLVAKEQRLHFLKQQERRQQQSISENEKLQKLKERVEAQENKLKKIRAMRGQVDYSKIMNGNLSAEIERFSAMFQEKKQEVQXAILRVDQLSQQLEDLKKGKLNGFQSYNGKLXGPAAVELKRLYQELQIRNQLNQEQNSKLQQQKELLNKRNMEVAMMDKRISELRERLYGKKIQLNRVNGXSSPQSPLSXSGRVAAVGPYIQVPSAGSFPVLGDPIKPQSLSIASNAAHGRSKSANDGNWPXLKQNSSSSVKPVQVAGADWKDPSVEGSVKQGXVSSQPVPFSALGPXEKPGIEIGKVPPPIPGVGKQLPPSYGXYPSPXPLGPGSXSSLERRKEGSLPRPSAGLPSRQRPXLLPAXGSXPQPGSSQQIQQRISVPPSPXYPPAGPPAFPAGDSKPELPLXVAIRPFLADKGSRPQSPRKGPQXVNSSSIYSMYLQQAXPPKNYQPAAHSALNKSVKAVYGKPVLPSGSXSPSPLPFLHGSLSXGXPQPQPPSESXEKEPEQDGPAAPADGSXVESLPRPLSPXKLXPIVHSPLRYQSDADLEALRRKLANAPRPLKKRSSIXEPEGPGGPNIQKLLYQRFNXLAGGMEGXPFYQPSPSQDFMGXLADVDNGNXNANGNLEELPPAQPXAPLPAEPAPSSDANDNELPSPEPEELICPQXXHQXAEPAEDNNNNVAXVPXXEQIPSPVAEAPSPGEEQVPPAPLPPASHPPAXSXNKRXNLKKPNSERXGHGLRVRFNPLALLLDASLEGEFDLVQRIIYEVEDPSKPNDEGIXPLHNAVCAGHHHIVKFLLDFGVNVNAADSDGWXPLHCAASCNSVHLCKQLVESGAAIFASXISDIEXAADKCEEMEEGYIQCSQFLYGVQEKLGVMNKGVAYALWDYEAQNSDELSFHEGDALXILRRKDESEXEWWWARLGDREGYVPKNLLGLYPRIKPRQRXLA

SEQ ID NO: 21011 - protein, 144 aa, Homo sapiens
  MOD_RES (7)..(7): Selenocysteine
  MOD_RES (18)..(18): Selenocysteine
  MOD_RES (23)..(23): Selenocysteine
  MOD_RES (26)..(27): Selenocysteine
  MOD_RES (61)..(61): Selenocysteine
  MOD_RES (64)..(64): Selenocysteine
  MOD_RES (68)..(68): Selenocysteine
  MOD_RES (77)..(77): Selenocysteine
  MOD_RES (116)..(116): Selenocysteine
  MOD_RES (126)..(126): Selenocysteine
  MOD_RES (131)..(131): Selenocysteine
  MOD_RES (144)..(144): Selenocysteine
MMPMILXVFLSNNEQILXEVPIXPEXXCRDVVEFCKEPGEGSCHLAEVWRGNGFREPSHKXYCXWPGXVAHSCNLNXLGGRERPIPFDHMMYEHLQKWGPRREEVKFFLRHEDSPXENSEQGGRQXQEQRXQRNVINVPGEKRX

SEQ ID NO: 21012 - protein, 106 aa, Homo sapiens
  MOD_RES (1)..(1): Any amino acid
  MOD_RES (15)..(15): Selenocysteine
  MOD_RES (21)..(21): Selenocysteine
  MOD_RES (89)..(89): Selenocysteine
XKQLVESGAAIFASXISDIEXAADKCEEMEEGYIQCSQFLYGKLQLENGLNGAHFSRQRPQCESYSFQEPLYGNMSSVAAQCVCLPVPXLLGRLGGSASCSSSPKG

SEQ ID NO: 21013 - protein, 635 aa, Homo sapiens
  MOD_RES (1)..(1): Any amino acid
  MOD_RES (47)..(47): Selenocysteine
  MOD_RES (79)..(79): Selenocysteine
  MOD_RES (93)..(93): Selenocysteine
  MOD_RES (120)..(120): Selenocysteine
  MOD_RES (125)..(125): Selenocysteine
  MOD_RES (132)..(132): Selenocysteine
  MOD_RES (157)..(157): Selenocysteine
  MOD_RES (162)..(162): Selenocysteine
  MOD_RES (165)..(165): Selenocysteine
  MOD_RES (185)..(185): Selenocysteine
  MOD_RES (206)..(206): Selenocysteine
  MOD_RES (229)..(229): Selenocysteine
  MOD_RES (244)..(244): Selenocysteine
  MOD_RES (275)..(275): Selenocysteine
  MOD_RES (289)..(289): Selenocysteine
  MOD_RES (291)..(291): Selenocysteine
  MOD_RES (301)..(301): Selenocysteine
  MOD_RES (318)..(318): Selenocysteine
  MOD_RES (329)..(329): Selenocysteine
  MOD_RES (332)..(332): Selenocysteine
  MOD_RES (368)..(368): Selenocysteine
  MOD_RES (388)..(388): Selenocysteine
  MOD_RES (396)..(396): Selenocysteine
  MOD_RES (410)..(410): Selenocysteine
  MOD_RES (419)..(419): Selenocysteine
  MOD_RES (434)..(434): Selenocysteine
  MOD_RES (465)..(466): Selenocysteine
  MOD_RES (469)..(469): Selenocysteine
  MOD_RES (482)..(482): Selenocysteine
  MOD_RES (485)..(486): Selenocysteine
  MOD_RES (518)..(518): Selenocysteine
  MOD_RES (520)..(520): Selenocysteine
  MOD_RES (524)..(524): Selenocysteine
  MOD_RES (534)..(534): Selenocysteine
  MOD_RES (579)..(579): Selenocysteine
XVGPYIQVPSAGSFPVLGDPIKPQSLSIASNAAHGRSKSANDGNWPXLKQNSSSSVKPVQVAGADWKDPSVEGSVKQGXVSSQPVPFSALGPXEKPGIEIGKVPPPIPGVGKQLPPSYGXYPSPXPLGPGSXSSLERRKEGSLPRPSAGLPSRQRPXLLPAXGSXPQPGSSQQIQQRISVPPSPXYPPAGPPAFPAGDSKPELPLXVAIRPFLADKGSRPQSPRKGPQXVNSSSIYSMYLQQAXPPKNYQPAAHSALNKSVKAVYGKPVLPSGSXSPSPLPFLHGSLSXGXPQPQPPSESXEKEPEQDGPAAPADGSXVESLPRPLSPXKLXPIVHSPLRYQSDADLEALRRKLANAPRPLKKRSSIXEPEGPGGPNIQKLLYQRFNXLAGGMEGXPFYQPSPSQDFMGXLADVDNGNXNANGNLEELPPAQPXAPLPAEPAPSSDANDNELPSPEPEELICPQXXHQXAEPAEDNNNNVAXVPXXEQIPSPVAEAPSPGEEQVPPAPLPPASHPPAXSXNKRXNLKKPNSERXGHGLRVRFNPLALLLDASLEGEFDLVQRIIYEVEDPSKPNDEGIXPLHNAVCAGHHHIVKFLLDFGVNVNAADSDGWGAGKAGCDEQRCGVCSVGLRGPEQ

SEQ ID NO: 21014 - protein, 90 aa, Homo sapiens
  MOD_RES (2)..(2): Selenocysteine
  MOD_RES (32)..(33): Selenocysteine
  MOD_RES (36)..(36): Selenocysteine
  MOD_RES (43)..(43): Selenocysteine
  MOD_RES (54)..(55): Selenocysteine
  MOD_RES (64)..(64): Selenocysteine
  MOD_RES (77)..(77): Selenocysteine
  MOD_RES (81)..(81): Selenocysteine
EXDWWWAALHGQEGYVPRNYFGIPSKVPPMPXXIIXSPSKPAXCPAGPGMGHHXXGYSWESLLXPSLPAVLGSGWEXLVSXRIPAPPLPN

SEQ ID NO: 21015 - protein, 60 aa, Homo sapiens
  MOD_RES (34)..(34): Selenocysteine
  MOD_RES (43)..(43): Selenocysteine
MDSEAFQSARDFLDMNFQSLAMKHMDLKQMELDXAAAKVDELXKQLESLWSDSPAPPGPQ

SEQ ID NO: 21016 - protein, 128 aa, Homo sapiens
  MOD_RES (34)..(34): Selenocysteine
  MOD_RES (43)..(43): Selenocysteine
  MOD_RES (90)..(90): Selenocysteine
  MOD_RES (95)..(95): Selenocysteine
  MOD_RES (105)..(105): Selenocysteine
  MOD_RES (123)..(123): Selenocysteine
MDSEAFQSARDFLDMNFQSLAMKHMDLKQMELDXAAAKVDELXKQLESLWSDSPAPPGPQAGPPSRPPRYSSSSIPEPFGSRGSPRKAAXDGADXPFGRSESAPXLHPYSPLSPKGRPSSPRXPLYLQ

SEQ ID NO: 21017 - protein, 828 aa, Homo sapiens
  MOD_RES (34)..(34): Selenocysteine
  MOD_RES (43)..(43): Selenocysteine
  MOD_RES (90)..(90): Selenocysteine
  MOD_RES (95)..(95): Selenocysteine
  MOD_RES (105)..(105): Selenocysteine
  MOD_RES (123)..(123): Selenocysteine
  MOD_RES (139)..(139): Selenocysteine
  MOD_RES (173)..(173): Selenocysteine
  MOD_RES (209)..(209): Selenocysteine
  MOD_RES (241)..(241): Selenocysteine
  MOD_RES (266)..(266): Selenocysteine
  MOD_RES (299)..(299): Selenocysteine
  MOD_RES (305)..(305): Selenocysteine
  MOD_RES (308)..(308): Selenocysteine
  MOD_RES (341)..(341): Selenocysteine
  MOD_RES (399)..(399): Selenocysteine
  MOD_RES (430)..(430): Selenocysteine
  MOD_RES (434)..(434): Selenocysteine
  MOD_RES (436)..(436): Selenocysteine
  MOD_RES (445)..(445): Selenocysteine
  MOD_RES (458)..(458): Selenocysteine
  MOD_RES (471)..(471): Selenocysteine
  MOD_RES (491)..(491): Selenocysteine
  MOD_RES (538)..(538): Selenocysteine
  MOD_RES (570)..(570): Selenocysteine
  MOD_RES (637)..(637): Selenocysteine
  MOD_RES (662)..(662): Selenocysteine
  MOD_RES (681)..(681): Selenocysteine
  MOD_RES (695)..(695): Selenocysteine
  MOD_RES (706)..(706): Selenocysteine
  MOD_RES (722)..(723): Selenocysteine
  MOD_RES (729)..(729): Selenocysteine
  MOD_RES (746)..(746): Selenocysteine
  MOD_RES (786)..(786): Selenocysteine
  MOD_RES (796)..(796): Selenocysteine
MDSEAFQSARDFLDMNFQSLAMKHMDLKQMELDXAAAKVDELXKQLESLWSDSPAPPGPQAGPPSRPPRYSSSSIPEPFGSRGSPRKAAXDGADXPFGRSESAPXLHPYSPLSPKGRPSSPRXPLYLQPDAYGSLDRAXSPRPRAFDGAGSSLGRAPSPRPGPGPLRQQGPPXPFDFLGRAGSPRGSPLAEGPQAFFPERGPSPRPPAXAYDAPASAFGSSLLGSGGSAFAPPLRAQDDLXLRRRPPKAWNESDLDVAYEKKPSQXASYERLDVFARPASPSLQLLPWRESSLDGLGGXGKDNLXSAXLPRNYKVSPLASDRRSDAGSYRRSLGSAGPSGXLPRSWQPVSRIPMPPSSPQPRGAPRQRPIPLSMIFKLQNAFWEHGASRAMLPGSPLFXRAPPPKLQPQPQPQPQPQSQPQPQLPPQPQXQPQXPXPAPQHPQQXWPPVNEGPPKPPXELEPEPEIEGLLXPVLEAGDVDEGPVARPLSPXRLQPALPPEAQSVPELEEVARVLAEIPRPLKRRGSMEQAPAVALPPXHKKQYQQIISRLFHRHGGPGPGGPEPELSPIXEGSEARAGPPAPAPPAPIPPPAPSQSSPPEQPQSMEMRSVLRKAGSPRKARRARLNPLVLLLDAALXGELEVVQQAVKEMNDPSQPNEEGIXALHNAICGANYSIVDFLIXAGANVNSPDSHGWXPLHCAASCNDXVICMALVQHGAAIFAXXLSDGAXAFEKCDPYREGYADCAXYLADVEQSMGLMNSGAVYALWDYSAEFGDELSFREGESVXVLRRDGPEEXDWWWAALHGQEGYVPRNYFGLFPRVKPQRSKV

SEQ ID NO: 21018 - protein, 29 aa, Homo sapiens
  MOD_RES (1)..(1): Any amino acid
  MOD_RES (16)..(16): Selenocysteine
XEKCDPYREGYADCAXYLAAVPQGEASKE

SEQ ID NO: 21019 - protein, 674 aa, Homo sapiens
  MOD_RES (11)..(11): Selenocysteine
  MOD_RES (66)..(66): Selenocysteine
  MOD_RES (73)..(73): Selenocysteine
  MOD_RES (95)..(95): Selenocysteine
  MOD_RES (100)..(100): Selenocysteine
  MOD_RES (124)..(124): Selenocysteine
  MOD_RES (150)..(150): Selenocysteine
  MOD_RES (206)..(206): Selenocysteine
  MOD_RES (208)..(208): Selenocysteine
  MOD_RES (219)..(219): Selenocysteine
  MOD_RES (232)..(232): Selenocysteine
  MOD_RES (237)..(237): Selenocysteine
  MOD_RES (246)..(246): Selenocysteine
  MOD_RES (279)..(279): Selenocysteine
  MOD_RES (350)..(350): Selenocysteine
  MOD_RES (379)..(379): Selenocysteine
  MOD_RES (382)..(382): Selenocysteine
  MOD_RES (397)..(397): Selenocysteine
  MOD_RES (407)..(407): Selenocysteine
  MOD_RES (418)..(418): Selenocysteine
  MOD_RES (422)..(422): Selenocysteine
  MOD_RES (440)..(440): Selenocysteine
  MOD_RES (490)..(490): Selenocysteine
  MOD_RES (540)..(540): Selenocysteine
  MOD_RES (542)..(542): Selenocysteine
  MOD_RES (549)..(549): Selenocysteine
  MOD_RES (563)..(563): Selenocysteine
  MOD_RES (597)..(597): Selenocysteine
  MOD_RES (608)..(608): Selenocysteine
  MOD_RES (631)..(631): Selenocysteine
  MOD_RES (633)..(633): Selenocysteine
  MOD_RES (646)..(647): Selenocysteine
  MOD_RES (655)..(655): Selenocysteine
MAPGQAPHQAXPWRDAHPFFLLSPVMGLLSRAWSRLRGLGPLEPWLVEAVKGAALVEAGLEGEARXPLAIPHXPWGRRPEEEAEDSGGPGEDREXLGLKXSSSLPEAWGLLDDDDGMYGEREAXSVPRGQGSQFADGQRAPLSPSLLIRXLQGSDKNPGEEKAEEEGVAEEEGVNKFSYPPSHRECCPAVEEEDDEEAVKKEAHRXSXSALSPGSKPSXWVSCPGEEENQAXEDKRXERSKGARKXSVSPRSSGSDPRSWEYRSGEASEEKEEKAHKEXGKGEAAPGPQSSAPAQRPQLKSWWCQPSDEEEGEVKALGAAEKDGEAECPPCIPPPSAFLKAWVYWPGEDXEEEEDEEEDEDSDSGSDEEEGEAEASSSXPAXGVFLKSWVYQPGEDXEEEEDEDSDXGSAEDEREAEXSASXPPASAFLKAWVYRPGEDXEEEEDEDVDSEDKEDDSEAALGEAESDPHPSHPDQRAHFRGWGYRPGKEXEEEEAAEDWGEAEPCPFRVAIYVPGEKPPPPWAPPRLPLRLQRRLKRPEXPXHDPDPEXPLKARKVRFSEKVXVHFLAVWAGPAQAARQGPWEQLARDRSRFARRIXQAQEELSPCLXPAARARAWARLRNPPLAPIPALXQXLPSSSVPSSPVQXXPLSQAVAXPSRSSAAAAAALDLSGRRG

SEQ ID NO: 21020 - protein, 258 aa, Homo sapiens
  MOD_RES (1)..(1): Any amino acid
  MOD_RES (18)..(18): Selenocysteine
  MOD_RES (21)..(21): Selenocysteine
  MOD_RES (36)..(36): Selenocysteine
  MOD_RES (46)..(46): Selenocysteine
  MOD_RES (57)..(57): Selenocysteine
  MOD_RES (61)..(61): Selenocysteine
  MOD_RES (79)..(79): Selenocysteine
  MOD_RES (129)..(129): Selenocysteine
  MOD_RES (179)..(179): Selenocysteine
  MOD_RES (181)..(181): Selenocysteine
  MOD_RES (188)..(188): Selenocysteine
  MOD_RES (217)..(217): Selenocysteine
  MOD_RES (231)..(231): Selenocysteine
  MOD_RES (255)..(256): Selenocysteine
XDSGSDEEEGEAEASSSXPAXGVFLKSWVYQPGEDXEEEEDEDSDXGSAEDEREAEXSASXPPASAFLKAWVYRPGEDXEEEEDEDVDSEDKEDDSEAALGEAESDPHPSHPDQRAHFRGWGYRPGKEXEEEEAAEDWGEAEPCPFRVAIYVPGEKPPPPWAPPRLPLRLQRRLKRPEXPXHDPDPEXPLKARKVGAESPDSIFFFFLIELESWAVXQAGVQRHDLGSLPXSAAQVQAILVPQPPEYLGLQAHDXXPS

SEQ ID NO: 21021 - protein, 567 aa, Homo sapiens
  MOD_RES (9)..(9): Selenocysteine
  MOD_RES (19)..(19): Selenocysteine
  MOD_RES (57)..(57): Selenocysteine
  MOD_RES (103)..(103): Selenocysteine
  MOD_RES (136)..(136): Selenocysteine
  MOD_RES (143)..(143): Selenocysteine
  MOD_RES (179)..(179): Selenocysteine
  MOD_RES (185)..(185): Selenocysteine
  MOD_RES (193)..(193): Selenocysteine
  MOD_RES (231)..(231): Selenocysteine
  MOD_RES (292)..(292): Selenocysteine
  MOD_RES (336)..(336): Selenocysteine
  MOD_RES (355)..(355): Selenocysteine
  MOD_RES (379)..(379): Selenocysteine
  MOD_RES (381)..(381): Selenocysteine
  MOD_RES (389)..(389): Selenocysteine
  MOD_RES (391)..(391): Selenocysteine
  MOD_RES (413)..(413): Selenocysteine
  MOD_RES (466)..(466): Selenocysteine
  MOD_RES (479)..(479): Selenocysteine
  MOD_RES (500)..(500): Selenocysteine
  MOD_RES (509)..(509): Selenocysteine
  MOD_RES (525)..(525): Selenocysteine
  MOD_RES (533)..(533): Selenocysteine
  MOD_RES (538)..(538): Selenocysteine
  MOD_RES (540)..(540): Selenocysteine
MASHVDLLXELQLLEKVPXLERLRAAQKRRAQQLKKWAQYEQDLQHRKRKHERKRSXGGRRKKVSFEASVALLEASLRNDAEEVRYFLKNKVSPDLCNEDGLXALHQCCIDNFEEIVKLLLSHGANVNAKDNELWXPLHAAAXCGHINLVKILVQYGADLLAVNSDGNMPYDLCEDEPXLDVIEXCMAYQGIXQEKINEMRVAPEQQMIADIHCMIAAGQDLDWIDAQGAXLLHIAGANGYLRAAELLLDHGVRVDVKDWDGWEPLHAAAFWGQMQMAELLVSHGASLSARXSMDEMPIDLCEEEEFKVLLLELKHKHDVIMKSQLRHKSSLSRRXSSAGSRGKVVRRASLSDRXNLYRKEYEGEAILWQRSAAEDQRXSXYNGDIREXRXDQENKDPNPRLEKPVLLSEFPXKIPRGELDMPVENGLRAPVSAYQYALANGDVWKVHEVPDYSMAYGNPGVADAXPPWSSYKEQSPQXLLELKRQRAAAKLLSHPFLSXHLGSSMARXGESSSEGKAPLIGGRXSPYSSNGXSVYYXVXSGDPPLLKFKAPIEEMEEKVHGCCRIS

SEQ ID NO: 21022 - protein, 525 aa, Homo sapiens
  MOD_RES (9)..(9): Selenocysteine
  MOD_RES (19)..(19): Selenocysteine
  MOD_RES (57)..(57): Selenocysteine
  MOD_RES (103)..(103): Selenocysteine
  MOD_RES (136)..(136): Selenocysteine
  MOD_RES (143)..(143): Selenocysteine
  MOD_RES (179)..(179): Selenocysteine
  MOD_RES (185)..(185): Selenocysteine
  MOD_RES (193)..(193): Selenocysteine
  MOD_RES (231)..(231): Selenocysteine
  MOD_RES (250)..(250): Selenocysteine
  MOD_RES (294)..(294): Selenocysteine
  MOD_RES (313)..(313): Selenocysteine
  MOD_RES (337)..(337): Selenocysteine
  MOD_RES (339)..(339): Selenocysteine
  MOD_RES (347)..(347): Selenocysteine
  MOD_RES (349)..(349): Selenocysteine
  MOD_RES (371)..(371): Selenocysteine
  MOD_RES (424)..(424): Selenocysteine
  MOD_RES (437)..(437): Selenocysteine
  MOD_RES (458)..(458): Selenocysteine
  MOD_RES (467)..(467): Selenocysteine
  MOD_RES (483)..(483): Selenocysteine
  MOD_RES (491)..(491): Selenocysteine
  MOD_RES (496)..(496): Selenocysteine
  MOD_RES (498)..(498): Selenocysteine
MASHVDLLXELQLLEKVPXLERLRAAQKRRAQQLKKWAQYEQDLQHRKRKHERKRSXGGRRKKVSFEASVALLEASLRNDAEEVRYFLKNKVSPDLCNEDGLXALHQCCIDNFEEIVKLLLSHGANVNAKDNELWXPLHAAAXCGHINLVKILVQYGADLLAVNSDGNMPYDLCEDEPXLDVIEXCMAYQGIXQEKINEMRVAPEQQMIADIHCMIAAGQDLDWIDAQGAXLMQMAELLVSHGASLSARXSMDEMPIDLCEEEEFKVLLLELKHKHDVIMKSQLRHKSSLSRRXSSAGSRGKVVRRASLSDRXNLYRKEYEGEAILWQRSAAEDQRXSXYNGDIREXRXDQENKDPNPRLEKPVLLSEFPXKIPRGELDMPVENGLRAPVSAYQYALANGDVWKVHEVPDYSMAYGNPGVADAXPPWSSYKEQSPQXLLELKRQRAAAKLLSHPFLSXHLGSSMARXGESSSEGKAPLIGGRXSPYSSNGXSVYYXVXSGDPPLLKFKAPIEEMEEKVHGCCRIS

SEQ ID NO: 21023 - protein, 155 aa, Homo sapiens
  MOD_RES (4)..(4): Selenocysteine
  MOD_RES (53)..(53): Selenocysteine
  MOD_RES (68)..(68): Selenocysteine
  MOD_RES (107)..(107): Selenocysteine
  MOD_RES (119)..(119): Selenocysteine
  MOD_RES (132)..(132): Selenocysteine
MMSXEQMQPLELSEDRLDKLDPRCSHLDDLSDQFIKDCDLKKKPRKGKNVQAXLNVESDQKKPRRKDXPALHIPPFIPGVFSEHLIKRYDVQERHPKGKMIPVLHNXDLEQKKPRRKDXPALHMSPFAAGVXLLRDERPKAIVEDDEKDGDKIAI

SEQ ID NO: 21024 - protein, 104 aa, Homo sapiens
  MOD_RES (4)..(4): Selenocysteine
  MOD_RES (56)..(56): Selenocysteine
  MOD_RES (68)..(68): Selenocysteine
  MOD_RES (81)..(81): Selenocysteine
MMSXEQMQPLELSEDRLDKLDPRCSHLGVFSEHLIKRYDVQERHPKGKMIPVLHNXDLEQKKPRRKDXPALHMSPFAAGVXLLRDERPKAIVEDDEKDGDKIAI

SEQ ID NO: 21025 - protein, 153 aa, Homo sapiens
  MOD_RES (13)..(13): Selenocysteine
  MOD_RES (35)..(35): Selenocysteine
  MOD_RES (38)..(38): Selenocysteine
  MOD_RES (42)..(42): Selenocysteine
  MOD_RES (71)..(71): Selenocysteine
  MOD_RES (96)..(96): Selenocysteine
  MOD_RES (104)..(104): Selenocysteine
  MOD_RES (117)..(117): Selenocysteine
  MOD_RES (119)..(119): Selenocysteine
  MOD_RES (127)..(127): Selenocysteine
  MOD_RES (150)..(150): Selenocysteine
MEQDNSPRKIQFXVPLLEPHLDPEAAEQIRRRRPXPAXLVLXSDQSSPEIDEDRIPNPHLKKLQNASLKLXREAVRNPAQKNPQPIYHHWIPREPXRSERGGGXGGQKSVGGFPCSXHXLAPFYVFXRSILLLKRGERMSHPLEPRDDPXKMP

SEQ ID NO: 21026 - protein, 64 aa, Homo sapiens
  MOD_RES (13)..(13): Selenocysteine
  MOD_RES (35)..(35): Selenocysteine
  MOD_RES (38)..(38): Selenocysteine
  MOD_RES (42)..(42): Selenocysteine
MEQDNSPRKIQFXVPLLEPHLDPEAAEQIRRRRPXPAXLVLXSDQSSPEIDEDRIPNPHLKSSR

SEQ ID NO: 21027 - protein, 171 aa, Homo sapiens
  MOD_RES (13)..(13): Selenocysteine
  MOD_RES (35)..(35): Selenocysteine
  MOD_RES (38)..(38): Selenocysteine
  MOD_RES (42)..(42): Selenocysteine
  MOD_RES (63)..(63): Selenocysteine
  MOD_RES (75)..(75): Selenocysteine
  MOD_RES (78)..(78): Selenocysteine
  MOD_RES (80)..(80): Selenocysteine
  MOD_RES (108)..(108): Selenocysteine
  MOD_RES (110)..(110): Selenocysteine
  MOD_RES (121)..(121): Selenocysteine
  MOD_RES (129)..(129): Selenocysteine
  MOD_RES (132)..(132): Selenocysteine
  MOD_RES (136)..(136): Selenocysteine
  MOD_RES (143)..(143): Selenocysteine
  MOD_RES (153)..(153): Selenocysteine
  MOD_RES (158)..(158): Selenocysteine
MEQDNSPRKIQFXVPLLEPHLDPEAAEQIRRRRPXPAXLVLXSDQSSPEIDEDRIPNPHLKSXLAMSPRQRKKMXRIXPXMKELQMMVEHHLGQQQQGEEPEGAAESXGXQESRPPGIPDXEVESRLGXSGXAKKXAECIPKXHERGSKEPSXKEPSXHIPPLDSKGANSV

SEQ ID NO: 21028 - protein, 90 aa, Homo sapiens
  MOD_RES (1)..(1): Any amino acid
  MOD_RES (6)..(6): Selenocysteine
  MOD_RES (9)..(9): Selenocysteine
  MOD_RES (13)..(13): Selenocysteine
  MOD_RES (34)..(34): Selenocysteine
  MOD_RES (46)..(46): Selenocysteine
  MOD_RES (49)..(49): Selenocysteine
  MOD_RES (51)..(51): Selenocysteine
  MOD_RES (55)..(55): Selenocysteine
  MOD_RES (62)..(62): Selenocysteine
  MOD_RES (72)..(72): Selenocysteine
  MOD_RES (77)..(77): Selenocysteine
XRRRPXPAXLVLXSDQSSPEIDEDRIPNPHLKSXLAMSPRQRKKMXRIXPXMKEXAECIPKXHERGSKEPSXKEPSXHIPPLDSKGANSV

SEQ ID NO: 21029 - protein, 145 aa, Homo sapiens
  MOD_RES (31)..(31): Selenocysteine
  MOD_RES (72)..(72): Selenocysteine
MDPKDRKKIQFSVPAPPSQLDPRQIRRRRPXPAMLFRLSEHSSPEEEASPHQRASGEGHHLKSKRPNPCAYXPPSLKAVQRIAESHLQSISNLNENQASEEEDELGELRELGYPREEDEEEEEDDEEEEEEEDSQAEVLKVIRQS

SEQ ID NO: 21030 - protein, 171 aa, Homo sapiens
  MOD_RES (34)..(34): Selenocysteine
  MOD_RES (120)..(121): Selenocysteine
  MOD_RES (171)..(171): Selenocysteine
MDPKDRKKIQFSVPAPPSQLDPRQVEMIRRRRPXPAMLFRLSEHSSPAVQRIAESHLQSISNLNENQASEEEDELGELRELGYPREEDEEEEEDDEEEEEEEDSQAEVLKVIRQSAGQKXXCGQGLEGPWERPPPLDESERDGGSEDQVEDPALSEPGEEPQRPSPSEPGX

SEQ ID NO: 21031 - protein, 204 aa, Homo sapiens
  MOD_RES (34)..(34): Selenocysteine
  MOD_RES (75)..(75): Selenocysteine
  MOD_RES (153)..(154): Selenocysteine
  MOD_RES (204)..(204): Selenocysteine
MDPKDRKKIQFSVPAPPSQLDPRQVEMIRRRRPXPAMLFRLSEHSSPEEEASPHQRASGEGHHLKSKRPNPCAYXPPSLKAVQRIAESHLQSISNLNENQASEEEDELGELRELGYPREEDEEEEEDDEEEEEEEDSQAEVLKVIRQSAGQKXXCGQGLEGPWERPPPLDESERDGGSEDQVEDPALSEPGEEPQRPSPSEPGX

SEQ ID NO: 21032 - protein, 168 aa, Homo sapiens
  MOD_RES (39)..(39): Selenocysteine
  MOD_RES (117)..(118): Selenocysteine
  MOD_RES (168)..(168): Selenocysteine
MLFRLSEHSSPEEEASPHQRASGEGHHLKSKRPNPCAYXPPSLKAVQRIAESHLQSISNLNENQASEEEDELGELRELGYPREEDEEEEEDDEEEEEEEDSQAEVLKVIRQSAGQKXXCGQGLEGPWERPPPLDESERDGGSEDQVEDPALSEPGEEPQRPSPSEPGX

SEQ ID NO: 21033 - protein, 109 aa, Homo sapiens
  MOD_RES (34)..(34): Selenocysteine
  MOD_RES (57)..(57): Selenocysteine
  MOD_RES (75)..(75): Selenocysteine
  MOD_RES (78)..(78): Selenocysteine
  MOD_RES (100)..(100): Selenocysteine
MEPNSPKKIQFAVPVFQSQIAPEAAEQIRKRRPXPASLVILNEHNPPEIDDKRGPNXQGELQNASPKQRKQSVYXPPXIKGVKHLKGQNESAFPEEEEGXNEREEQRDH

SEQ ID NO: 21034 - protein, 116 aa, Homo sapiens
  MOD_RES (41)..(41): Selenocysteine
  MOD_RES (64)..(64): Selenocysteine
  MOD_RES (82)..(82): Selenocysteine
  MOD_RES (85)..(85): Selenocysteine
  MOD_RES (107)..(107): Selenocysteine
MEPNSPKKIQFAVPVFQSQIAPEAAEQLGFCRSQIRKRRPXPASLVILNEHNPPEIDDKRGPNXQGELQNASPKQRKQSVYXPPXIKGVKHLKGQNESAFPEEEEGXNEREEQRDH

SEQ ID NO: 21035 - protein, 170 aa, Homo sapiens
  MOD_RES (5)..(5): Selenocysteine
  MOD_RES (19)..(19): Selenocysteine
  MOD_RES (21)..(22): Selenocysteine
  MOD_RES (55)..(55): Selenocysteine
  MOD_RES (73)..(73): Selenocysteine
  MOD_RES (151)..(151): Selenocysteine
  MOD_RES (159)..(159): Selenocysteine
  MOD_RES (167)..(167): Selenocysteine
MAASXASHRPIKGILKNKXSXXSSMVASAEQPRGNVDEELSKKSQKWDEMNILAXYHPADKDYGLMKIDEPSXPYHRLAAAEGLEPKYRIQEQESSGEEDSDLSPEEREKKRQFEMKRKLHYNEGLNIKLARQLISKDLHDDDEDEEMLEXADGESMNXEESNQGSXPSD

SEQ ID NO: 21036 - protein, 80 aa, Homo sapiens
  MOD_RES (5)..(5): Selenocysteine
  MOD_RES (19)..(19): Selenocysteine
  MOD_RES (21)..(22): Selenocysteine
  MOD_RES (55)..(55): Selenocysteine
  MOD_RES (73)..(73): Selenocysteine
MAASXASHRPIKGILKNKXSXXSSMVASAEQPRGNVDEELSKKSQKWDEMNILAXYHPADKDYGLMKIDEPSXPYHRYIL

SEQ ID NO: 21037 - protein, 205 aa, Homo sapiens
  MOD_RES (5)..(5): Selenocysteine
  MOD_RES (19)..(19): Selenocysteine
  MOD_RES (21)..(22): Selenocysteine
  MOD_RES (55)..(55): Selenocysteine
  MOD_RES (73)..(73): Selenocysteine
  MOD_RES (89)..(89): Selenocysteine
  MOD_RES (92)..(92): Selenocysteine
  MOD_RES (177)..(177): Selenocysteine
  MOD_RES (185)..(185): Selenocysteine
  MOD_RES (193)..(193): Selenocysteine
MAASXASHRPIKGILKNKXSXXSSMVASAEQPRGNVDEELSKKSQKWDEMNILAXYHPADKDYGLMKIDEPSXPYHSMMGDDEDACSDXEAXEAMAPDILARKLAAAEGLEPKYRIQEQESSGEEDSDLSPEEREKKRQFEMKRKLHYNEGLNIKLARQLISKDLHDDDEDEEMLEXADGESMNXEESNQGSXPSDQQQNKLRSS

SEQ ID NO: 21038 - protein, 54 aa, Homo sapiens
  MOD_RES (1)..(1): Selenocysteine
  MOD_RES (19)..(19): Selenocysteine
  MOD_RES (35)..(35): Selenocysteine
  MOD_RES (38)..(38): Selenocysteine
  MOD_RES (53)..(53): Selenocysteine
XYHPADKDYGLMKIDEPSXPYHSMMGDDEDACSDXEAXEAMAPDILARKKKAXI

SEQ ID NO: 21039 - protein, 205 aa, Homo sapiens
  MOD_RES (5)..(5): Selenocysteine
  MOD_RES (19)..(19): Selenocysteine
  MOD_RES (21)..(22): Selenocysteine
  MOD_RES (55)..(55): Selenocysteine
  MOD_RES (89)..(89): Selenocysteine
  MOD_RES (91)..(92): Selenocysteine
  MOD_RES (177)..(177): Selenocysteine
  MOD_RES (185)..(185): Selenocysteine
  MOD_RES (193)..(193): Selenocysteine
MAASXASHRPIKGILKNKXSXXSSMVASAEQPRRSVDEELSKKSQKWDEINILAXYHPADKGYGLMKIDEPSPPYHSMMGDDEDACRDXEXXEAMAPDILAKKLAAAEGLEPKYRIQEQESSGEEDSDLSPEEREKKRQFEMRRKLHYNEGLNIKLARQLISKDLHDDDEDEEMLEXADGESMNXEESNQGSXPSDQQQNKLRSS

SEQ ID NO: 21040 - protein, 202 aa, Homo sapiens
  MOD_RES (5)..(5): Selenocysteine
  MOD_RES (27)..(27): Selenocysteine
  MOD_RES (35)..(35): Selenocysteine
  MOD_RES (59)..(59): Selenocysteine
  MOD_RES (73)..(73): Selenocysteine
  MOD_RES (104)..(104): Selenocysteine
  MOD_RES (172)..(172): Selenocysteine
  MOD_RES (176)..(176): Selenocysteine
  MOD_RES (181)..(181): Selenocysteine
  MOD_RES (192)..(192): Selenocysteine
  MOD_RES (197)..(197): Selenocysteine
MSASXSSHRPIKGILKNKSSSGSSVAXSGQQSGGXIQDVKRKKSQKWDESSILAAHRAXYRDYDLMKANEPGXSYMSVQDNGEDSVRDVEGEDSVRGVEGKEAXDASDHSCEVDEQESSEAYMRKILLHKQEKKRQFEMRRRLHYNEELNIKLARQLMWKELQSEDNENEEXPQGXNEEKXAAEESEEAPLXGGLQXQSCDP

SEQ ID NO: 21041 - protein, 41 aa, Homo sapiens
  MOD_RES (4)..(4): Selenocysteine
  MOD_RES (11)..(12): Selenocysteine
  MOD_RES (25)..(25): Selenocysteine
  MOD_RES (33)..(33): Selenocysteine
MLKXESSGERXXLRSASPHRNAYRXEFQALKSXFDKPKSDG

SEQ ID NO: 21042 - protein, 73 aa, Homo sapiens
  MOD_RES (4)..(4): Selenocysteine
  MOD_RES (11)..(12): Selenocysteine
  MOD_RES (25)..(25): Selenocysteine
  MOD_RES (33)..(33): Selenocysteine
  MOD_RES (45)..(45): Selenocysteine
MLKXESSGERXXLRSASPHRNAYRXEFQALKSXFDKPKSDGEQKXKEGEGSQQSRGRKYGSNVNRIKNLFMQM

SEQ ID NO: 21043 - protein, 1098 aa, Homo sapiens
  MOD_RES (4)..(4): Selenocysteine
  MOD_RES (11)..(12): Selenocysteine
  MOD_RES (25)..(25): Selenocysteine
  MOD_RES (33)..(33): Selenocysteine
  MOD_RES (45)..(45): Selenocysteine
  MOD_RES (87)..(87): Selenocysteine
  MOD_RES (109)..(109): Selenocysteine
  MOD_RES (129)..(129): Selenocysteine
  MOD_RES (140)..(140): Selenocysteine
  MOD_RES (142)..(142): Selenocysteine
  MOD_RES (185)..(185): Selenocysteine
  MOD_RES (195)..(195): Selenocysteine
  MOD_RES (201)..(201): Selenocysteine
  MOD_RES (212)..(212): Selenocysteine
  MOD_RES (231)..(231): Selenocysteine
  MOD_RES (242)..(242): Selenocysteine
  MOD_RES (244)..(244): Selenocysteine
  MOD_RES (248)..(248): Selenocysteine
  MOD_RES (268)..(268): Selenocysteine
  MOD_RES (277)..(277): Selenocysteine
  MOD_RES (287)..(287): Selenocysteine
  MOD_RES (307)..(307): Selenocysteine
  MOD_RES (312)..(312): Selenocysteine
  MOD_RES (370)..(370): Selenocysteine
  MOD_RES (417)..(417): Selenocysteine
  MOD_RES (419)..(419): Selenocysteine
  MOD_RES (469)..(469): Selenocysteine
  MOD_RES (538)..(538): Selenocysteine
  MOD_RES (540)..(540): Selenocysteine
  MOD_RES (569)..(569): Selenocysteine
  MOD_RES (575)..(575): Selenocysteine
  MOD_RES (580)..(580): Selenocysteine
  MOD_RES (606)..(606): Selenocysteine
  MOD_RES (631)..(631): Selenocysteine
  MOD_RES (636)..(636): Selenocysteine
  MOD_RES (673)..(673): Selenocysteine
  MOD_RES (690)..(690): Selenocysteine
  MOD_RES (699)..(699): Selenocysteine
  MOD_RES (716)..(716): Selenocysteine
  MOD_RES (741)..(741): Selenocysteine
  MOD_RES (745)..(745): Selenocysteine
  MOD_RES (753)..(753): Selenocysteine
  MOD_RES (826)..(826): Selenocysteine
  MOD_RES (839)..(839): Selenocysteine
  MOD_RES (849)..(849): Selenocysteine
  MOD_RES (858)..(858): Selenocysteine
  MOD_RES (875)..(875): Selenocysteine
  MOD_RES (885)..(885): Selenocysteine
  MOD_RES (901)..(901): Selenocysteine
  MOD_RES (910)..(910): Selenocysteine
  MOD_RES (922)..(922): Selenocysteine
  MOD_RES (932)..(932): Selenocysteine
  MOD_RES (946)..(946): Selenocysteine
  MOD_RES (1015)..(1015): Selenocysteine
  MOD_RES (1033)..(1033): Selenocysteine
  MOD_RES (1084)..(1084): Selenocysteine
  MOD_RES (1088)..(1088): Selenocysteine
  MOD_RES (1090)..(1091): Selenocysteine
MLKXESSGERXXLRSASPHRNAYRXEFQALKSXFDKPKSDGEQKXKEGEGSQQSRGRKYGSNVNRIKNLFMQMGMEPNENAAVIAKXRGKGGHSSPQRRMKPKEFLEKXDGSVVKLESSVSERISRFDXMYDGPSYSKFXEXRKMFERSVHESGQNNRYSPKKEKAGGSEPQDEWGGSKSNRGSXDSLDSLSSRXEAVSPXVSQLSAVFENXDSPSAIISEKAENNEYSVXGHYPLNLPSVXVXNLDXFGHLKDSNSWPPSNKRGVDXEDAHKSNAXPVPEVASKSXSLASIPGEEIQQSKEPEDSXSNQQXPDSIDKDGPEEPCAESKAMPKSEIPSPQSQLLEDAEANLVGREAAKQQRKELAGGDFXSPDASASSCGKEVPEDSNNFDGSHVYMHSDYNVYRVRSRYNSDWGEXGXEQDEEEDSDENSYYQPDMEYSEIVGLPEEEEIPANRKIKFSSAPIKVFNXYSNEDYDRRNDEVDPVAASAEYELEKRVEKLELFPVELEKDEDGLGISIIGMGVGADAGLEKLGIFVKXVXEGGAAQRDGRIQVNDQIVEVDGISLVGVXQNFAAXVLRNXKGNVRFVIGREKPGQVSEVAQLISQXLEQERRQRELLEQHYAQYDADDDEXGEYAXDEEEDEVGPVLPGSDMAIEVFELPENEDMFSPSELDXSKLSHKFKELQIKHAVXEAEIQKLKXKLQAAENEKVRWELEKXQLQQNIEENKERMLKLESYWIEAQXLCHXVNEHLKEXQSQYQALEKKYNKAKKLIKDFQQKELDFIKRQEAERKKIEDLEKAHLVEVQGLQVRIRDLEAEVFRLLKQNGXQVNNNNNIFERRXSLGEVSKGDXMENLDGKQXSCQDGLSQDLNEAVPEXERLDSKALKXRAQLSVKNRRQRPSRXRLYDSVSSXDGEDSLERKNFXFNDDFSPSSXSSADLSGLGAEPKXPGLSQSLALSSDESLDMIDDEILDDGQSPKHSQCQNRAVQEWSVQQVSHWLMSLNLEQYVSEFSAQNIXGEQLLQLDGNKLKALGMXASQDRAVVKKKLKEMKMSLEKARKAQEKMEKQREKLRRKEQEQMQRKSKKXEKMXSXXAEGAGEQ

SEQ ID NO: 21044 - protein, 1253 aa, Homo sapiens
  MOD_RES (4)..(4): Selenocysteine
  MOD_RES (11)..(12): Selenocysteine
  MOD_RES (25)..(25): Selenocysteine
  MOD_RES (33)..(33): Selenocysteine
  MOD_RES (45)..(45): Selenocysteine
  MOD_RES (87)..(87): Selenocysteine
  MOD_RES (109)..(109): Selenocysteine
  MOD_RES (129)..(129): Selenocysteine
  MOD_RES (140)..(140): Selenocysteine
  MOD_RES (142)..(142): Selenocysteine
  MOD_RES (185)..(185): Selenocysteine
  MOD_RES (195)..(195): Selenocysteine
  MOD_RES (201)..(201): Selenocysteine
  MOD_RES (212)..(212): Selenocysteine
  MOD_RES (231)..(231): Selenocysteine
  MOD_RES (242)..(242): Selenocysteine
  MOD_RES (244)..(244): Selenocysteine
  MOD_RES (248)..(248): Selenocysteine
  MOD_RES (268)..(268): Selenocysteine
  MOD_RES (277)..(277): Selenocysteine
  MOD_RES (287)..(287): Selenocysteine
  MOD_RES (307)..(307): Selenocysteine
  MOD_RES (312)..(312): Selenocysteine
  MOD_RES (370)..(370): Selenocysteine
  MOD_RES (417)..(417): Selenocysteine
  MOD_RES (419)..(419): Selenocysteine
  MOD_RES (469)..(469): Selenocysteine
  MOD_RES (538)..(538): Selenocysteine
  MOD_RES (540)..(540): Selenocysteine
  MOD_RES (569)..(569): Selenocysteine
  MOD_RES (575)..(575): Selenocysteine
  MOD_RES (580)..(580): Selenocysteine
  MOD_RES (606)..(606): Selenocysteine
  MOD_RES (631)..(631): Selenocysteine
  MOD_RES (636)..(636): Selenocysteine
  MOD_RES (673)..(673): Selenocysteine
  MOD_RES (690)..(690): Selenocysteine
  MOD_RES (699)..(699): Selenocysteine
  MOD_RES (716)..(716): Selenocysteine
  MOD_RES (741)..(741): Selenocysteine
  MOD_RES (745)..(745): Selenocysteine
  MOD_RES (753)..(753): Selenocysteine
  MOD_RES (826)..(826): Selenocysteine
  MOD_RES (839)..(839): Selenocysteine
  MOD_RES (849)..(849): Selenocysteine
  MOD_RES (858)..(858): Selenocysteine
  MOD_RES (875)..(875): Selenocysteine
  MOD_RES (885)..(885): Selenocysteine
  MOD_RES (901)..(901): Selenocysteine
  MOD_RES (910)..(910): Selenocysteine
  MOD_RES (931)..(931): Selenocysteine
  MOD_RES (941)..(941): Selenocysteine
  MOD_RES (954)..(954): Selenocysteine
  MOD_RES (989)..(989): Selenocysteine
  MOD_RES (994)..(994): Selenocysteine
  MOD_RES (1010)..(1011): Selenocysteine
  MOD_RES (1087)..(1087): Selenocysteine
  MOD_RES (1093)..(1093): Selenocysteine
  MOD_RES (1096)..(1096): Selenocysteine
  MOD_RES (1098)..(1098): Selenocysteine
  MOD_RES (1125)..(1125): Selenocysteine
  MOD_RES (1134)..(1134): Selenocysteine
  MOD_RES (1146)..(1146): Selenocysteine
  MOD_RES (1156)..(1156): Selenocysteine
  MOD_RES (1170)..(1170): Selenocysteine
  MOD_RES (1188)..(1188): Selenocysteine
  MOD_RES (1239)..(1239): Selenocysteine
  MOD_RES (1243)..(1243): Selenocysteine
  MOD_RES (1245)..(1246): Selenocysteine
MLKXESSGERXXLRSASPHRNAYRXEFQALKSXFDKPKSDGEQKXKEGEGSQQSRGRKYGSNVNRIKNLFMQMGMEPNENAAVIAKXRGKGGHSSPQRRMKPKEFLEKXDGSVVKLESSVSERISRFDXMYDGPSYSKFXEXRKMFERSVHESGQNNRYSPKKEKAGGSEPQDEWGGSKSNRGSXDSLDSLSSRXEAVSPXVSQLSAVFENXDSPSAIISEKAENNEYSVXGHYPLNLPSVXVXNLDXFGHLKDSNSWPPSNKRGVDXEDAHKSNAXPVPEVASKSXSLASIPGEEIQQSKEPEDSXSNQQXPDSIDKDGPEEPCAESKAMPKSEIPSPQSQLLEDAEANLVGREAAKQQRKELAGGDFXSPDASASSCGKEVPEDSNNFDGSHVYMHSDYNVYRVRSRYNSDWGEXGXEQDEEEDSDENSYYQPDMEYSEIVGLPEEEEIPANRKIKFSSAPIKVFNXYSNEDYDRRNDEVDPVAASAEYELEKRVEKLELFPVELEKDEDGLGISIIGMGVGADAGLEKLGIFVKXVXEGGAAQRDGRIQVNDQIVEVDGISLVGVXQNFAAXVLRNXKGNVRFVIGREKPGQVSEVAQLISQXLEQERRQRELLEQHYAQYDADDDEXGEYAXDEEEDEVGPVLPGSDMAIEVFELPENEDMFSPSELDXSKLSHKFKELQIKHAVXEAEIQKLKXKLQAAENEKVRWELEKXQLQQNIEENKERMLKLESYWIEAQXLCHXVNEHLKEXQSQYQALEKKYNKAKKLIKDFQQKELDFIKRQEAERKKIEDLEKAHLVEVQGLQVRIRDLEAEVFRLLKQNGXQVNNNNNIFERRXSLGEVSKGDXMENLDGKQXSCQDGLSQDLNEAVPEXERLDSKALKXRAQLSVKNRRQRPSRXRLYDSVSSXDGEDSLERKPSNSFYNHMHIXKLLPPKGLRXSSPESDSGVPPLXPVDSNVPFSSDHIAEFQEEPLDPEMGPLSSMWGDXSLFSXSKSDHDVEESPCHHQXXNKKILREKDDAKDPKSLRASSSLAVQGGKIKRKFVDLGAPLRRNSSKGKKWKEKEKEASRFSAGSRIFRGRLENWXPKPCSXAQXSXRSPCMPFSWFNDSRKGSYSFRNLPAPXSSLQPSPEXLISDKKGSKNFXFNDDFSPSSXSSADLSGLGAEPKXPGLSQSLALSSDEALGMXASQDRAVVKKKLKEMKMSLEKARKAQEKMEKQREKLRRKEQEQMQRKSKKXEKMXSXXAEGAGEQ

SEQ ID NO: 21045 - protein, 1296 aa, Homo sapiens
  MOD_RES (4)..(4): Selenocysteine
  MOD_RES (11)..(12): Selenocysteine
  MOD_RES (25)..(25): Selenocysteine
  MOD_RES (33)..(33): Selenocysteine
  MOD_RES (45)..(45): Selenocysteine
  MOD_RES (87)..(87): Selenocysteine
  MOD_RES (109)..(109): Selenocysteine
  MOD_RES (129)..(129): Selenocysteine
  MOD_RES (140)..(140): Selenocysteine
  MOD_RES (142)..(142): Selenocysteine
  MOD_RES (185)..(185): Selenocysteine
  MOD_RES (195)..(195): Selenocysteine
  MOD_RES (201)..(201): Selenocysteine
  MOD_RES (212)..(212): Selenocysteine
  MOD_RES (231)..(231): Selenocysteine
  MOD_RES (242)..(242): Selenocysteine
  MOD_RES (244)..(244): Selenocysteine
  MOD_RES (248)..(248): Selenocysteine
  MOD_RES (268)..(268): Selenocysteine
  MOD_RES (277)..(277): Selenocysteine
  MOD_RES (287)..(287): Selenocysteine
  MOD_RES (307)..(307): Selenocysteine
  MOD_RES (312)..(312): Selenocysteine
  MOD_RES (370)..(370): Selenocysteine
  MOD_RES (417)..(417): Selenocysteine
  MOD_RES (419)..(419): Selenocysteine
  MOD_RES (469)..(469): Selenocysteine
  MOD_RES (538)..(538): Selenocysteine
  MOD_RES (540)..(540): Selenocysteine
  MOD_RES (569)..(569): Selenocysteine
  MOD_RES (575)..(575): Selenocysteine
  MOD_RES (580)..(580): Selenocysteine
  MOD_RES (606)..(606): Selenocysteine
  MOD_RES (631)..(631): Selenocysteine
  MOD_RES (636)..(636): Selenocysteine
  MOD_RES (673)..(673): Selenocysteine
  MOD_RES (690)..(690): Selenocysteine
  MOD_RES (699)..(699): Selenocysteine
  MOD_RES (716)..(716): Selenocysteine
  MOD_RES (741)..(741): Selenocysteine
  MOD_RES (745)..(745): Selenocysteine
  MOD_RES (753)..(753): Selenocysteine
  MOD_RES (826)..(826): Selenocysteine
  MOD_RES (839)..(839): Selenocysteine
  MOD_RES (849)..(849): Selenocysteine
  MOD_RES (858)..(858): Selenocysteine
  MOD_RES (875)..(875): Selenocysteine
  MOD_RES (885)..(885): Selenocysteine
  MOD_RES (901)..(901): Selenocysteine
  MOD_RES (910)..(910): Selenocysteine
  MOD_RES (923)..(923): Selenocysteine
  MOD_RES (936)..(936): Selenocysteine
  MOD_RES (971)..(971): Selenocysteine
  MOD_RES (976)..(976): Selenocysteine
  MOD_RES (992)..(993): Selenocysteine
  MOD_RES (1069)..(1069): Selenocysteine
  MOD_RES (1075)..(1075): Selenocysteine
  MOD_RES (1078)..(1078): Selenocysteine
  MOD_RES (1080)..(1080): Selenocysteine
  MOD_RES (1107)..(1107): Selenocysteine
  MOD_RES (1116)..(1116): Selenocysteine
  MOD_RES (1128)..(1128): Selenocysteine
  MOD_RES (1138)..(1138): Selenocysteine
  MOD_RES (1152)..(1152): Selenocysteine
  MOD_RES (1213)..(1213): Selenocysteine
  MOD_RES (1231)..(1231): Selenocysteine
  MOD_RES (1282)..(1282): Selenocysteine
  MOD_RES (1286)..(1286): Selenocysteine
  MOD_RES (1288)..(1289): Selenocysteine
MLKXESSGERXXLRSASPHRNAYRXEFQALKSXFDKPKSDGEQKXKEGEGSQQSRGRKYGSNVNRIKNLFMQMGMEPNENAAVIAKXRGKGGHSSPQRRMKPKEFLEKXDGSVVKLESSVSERISRFDXMYDGPSYSKFXEXRKMFERSVHESGQNNRYSPKKEKAGGSEPQDEWGGSKSNRGSXDSLDSLSSRXEAVSPXVSQLSAVFENXDSPSAIISEKAENNEYSVXGHYPLNLPSVXVXNLDXFGHLKDSNSWPPSNKRGVDXEDAHKSNAXPVPEVASKSXSLASIPGEEIQQSKEPEDSXSNQQXPDSIDKDGPEEPCAESKAMPKSEIPSPQSQLLEDAEANLVGREAAKQQRKELAGGDFXSPDASASSCGKEVPEDSNNFDGSHVYMHSDYNVYRVRSRYNSDWGEXGXEQDEEEDSDENSYYQPDMEYSEIVGLPEEEEIPANRKIKFSSAPIKVFNXYSNEDYDRRNDEVDPVAASAEYELEKRVEKLELFPVELEKDEDGLGISIIGMGVGADAGLEKLGIFVKXVXEGGAAQRDGRIQVNDQIVEVDGISLVGVXQNFAAXVLRNXKGNVRFVIGREKPGQVSEVAQLISQXLEQERRQRELLEQHYAQYDADDDEXGEYAXDEEEDEVGPVLPGSDMAIEVFELPENEDMFSPSELDXSKLSHKFKELQIKHAVXEAEIQKLKXKLQAAENEKVRWELEKXQLQQNIEENKERMLKLESYWIEAQXLCHXVNEHLKEXQSQYQALEKKYNKAKKLIKDFQQKELDFIKRQEAERKKIEDLEKAHLVEVQGLQVRIRDLEAEVFRLLKQNGXQVNNNNNIFERRXSLGEVSKGDXMENLDGKQXSCQDGLSQDLNEAVPEXERLDSKALKXRAQLSVKNRRQRPSRXRLYDSVSSXDGEDSLERKGLRXSSPESDSGVPPLXPVDSNVPFSSDHIAEFQEEPLDPEMGPLSSMWGDXSLFSXSKSDHDVEESPCHHQXXNKKILREKDDAKDPKSLRASSSLAVQGGKIKRKFVDLGAPLRRNSSKGKKWKEKEKEASRFSAGSRIFRGRLENWXPKPCSXAQXSXRSPCMPFSWFNDSRKGSYSFRNLPAPXSSLQPSPEXLISDKKGSKNFXFNDDFSPSSXSSADLSGLGAEPKXPGLSQSLALSSDEILDDGQSPKHSQCQNRAVQEWSVQQVSHWLMSLNLEQYVSEFSAQNIXGEQLLQLDGNKLKALGMXASQDRAVVKKKLKEMKMSLEKARKAQEKMEKQREKLRRKEQEQMQRKSKKXEKMXSXXAEGAGEQ

SEQ ID NO: 21046 - protein, 1374 aa, Homo sapiens
  MOD_RES (4)..(4): Selenocysteine
  MOD_RES (11)..(12): Selenocysteine
  MOD_RES (25)..(25): Selenocysteine
  MOD_RES (33)..(33): Selenocysteine
  MOD_RES (45)..(45): Selenocysteine
  MOD_RES (87)..(87): Selenocysteine
  MOD_RES (109)..(109): Selenocysteine
  MOD_RES (129)..(129): Selenocysteine
  MOD_RES (140)..(140): Selenocysteine
  MOD_RES (142)..(142): Selenocysteine
  MOD_RES (185)..(185): Selenocysteine
  MOD_RES (195)..(195): Selenocysteine
  MOD_RES (201)..(201): Selenocysteine
  MOD_RES (212)..(212): Selenocysteine
  MOD_RES (231)..(231): Selenocysteine
  MOD_RES (242)..(242): Selenocysteine
  MOD_RES (244)..(244): Selenocysteine
  MOD_RES (248)..(248): Selenocysteine
  MOD_RES (268)..(268): Selenocysteine
  MOD_RES (277)..(277): Selenocysteine
  MOD_RES (287)..(287): Selenocysteine
  MOD_RES (307)..(307): Selenocysteine
  MOD_RES (312)..(312): Selenocysteine
  MOD_RES (370)..(370): Selenocysteine
  MOD_RES (417)..(417): Selenocysteine
  MOD_RES (419)..(419): Selenocysteine
  MOD_RES (469)..(469): Selenocysteine
  MOD_RES (538)..(538): Selenocysteine
  MOD_RES (540)..(540): Selenocysteine
  MOD_RES (569)..(569): Selenocysteine
  MOD_RES (575)..(575): Selenocysteine
  MOD_RES (580)..(580): Selenocysteine
  MOD_RES (606)..(606): Selenocysteine
  MOD_RES (632)..(632): Selenocysteine
  MOD_RES (653)..(653): Selenocysteine
  MOD_RES (658)..(658): Selenocysteine
  MOD_RES (695)..(695): Selenocysteine
  MOD_RES (712)..(712): Selenocysteine
  MOD_RES (721)..(721): Selenocysteine
  MOD_RES (738)..(738): Selenocysteine
  MOD_RES (763)..(763): Selenocysteine
  MOD_RES (767)..(767): Selenocysteine
  MOD_RES (775)..(775): Selenocysteine
  MOD_RES (848)..(848): Selenocysteine
  MOD_RES (861)..(861): Selenocysteine
  MOD_RES (871)..(871): Selenocysteine
  MOD_RES (880)..(880): Selenocysteine
  MOD_RES (897)..(897): Selenocysteine
  MOD_RES (907)..(907): Selenocysteine
  MOD_RES (923)..(923): Selenocysteine
  MOD_RES (932)..(932): Selenocysteine
  MOD_RES (953)..(953): Selenocysteine
  MOD_RES (963)..(963): Selenocysteine
  MOD_RES (976)..(976): Selenocysteine
  MOD_RES (1011)..(1011): Selenocysteine
  MOD_RES (1016)..(1016): Selenocysteine
  MOD_RES (1032)..(1033): Selenocysteine
  MOD_RES (1109)..(1109): Selenocysteine
  MOD_RES (1115)..(1115): Selenocysteine
  MOD_RES (1118)..(1118): Selenocysteine
  MOD_RES (1120)..(1120): Selenocysteine
  MOD_RES (1147)..(1147): Selenocysteine
  MOD_RES (1156)..(1156): Selenocysteine
  MOD_RES (1169)..(1169): Selenocysteine
  MOD_RES (1172)..(1172): Selenocysteine
  MOD_RES (1202)..(1202): Selenocysteine
  MOD_RES (1206)..(1206): Selenocysteine
  MOD_RES (1216)..(1216): Selenocysteine
  MOD_RES (1230)..(1230): Selenocysteine
  MOD_RES (1291)..(1291): Selenocysteine
  MOD_RES (1309)..(1309): Selenocysteine
  MOD_RES (1360)..(1360): Selenocysteine
  MOD_RES (1364)..(1364): Selenocysteine
  MOD_RES (1366)..(1367): Selenocysteine
MLKXESSGERXXLRSASPHRNAYRXEFQALKSXFDKPKSDGEQKXKEGEGSQQSRGRKYGSNVNRIKNLFMQMGMEPNENAAVIAKXRGKGGHSSPQRRMKPKEFLEKXDGSVVKLESSVSERISRFDXMYDGPSYSKFXEXRKMFERSVHESGQNNRYSPKKEKAGGSEPQDEWGGSKSNRGSXDSLDSLSSRXEAVSPXVSQLSAVFENXDSPSAIISEKAENNEYSVXGHYPLNLPSVXVXNLDXFGHLKDSNSWPPSNKRGVDXEDAHKSNAXPVPEVASKSXSLASIPGEEIQQSKEPEDSXSNQQXPDSIDKDGPEEPCAESKAMPKSEIPSPQSQLLEDAEANLVGREAAKQQRKELAGGDFXSPDASASSCGKEVPEDSNNFDGSHVYMHSDYNVYRVRSRYNSDWGEXGXEQDEEEDSDENSYYQPDMEYSEIVGLPEEEEIPANRKIKFSSAPIKVFNXYSNEDYDRRNDEVDPVAASAEYELEKRVEKLELFPVELEKDEDGLGISIIGMGVGADAGLEKLGIFVKXVXEGGAAQRDGRIQVNDQIVEVDGISLVGVXQNFAAXVLRNXKGNVRFVIGREKPGQVSEVAQLISQXLEQERRQRELLEQHYAQYDADDDENXVAELQGMSGNCNNNNNYFLKXGEYAXDEEEDEVGPVLPGSDMAIEVFELPENEDMFSPSELDXSKLSHKFKELQIKHAVXEAEIQKLKXKLQAAENEKVRWELEKXQLQQNIEENKERMLKLESYWIEAQXLCHXVNEHLKEXQSQYQALEKKYNKAKKLIKDFQQKELDFIKRQEAERKKIEDLEKAHLVEVQGLQVRIRDLEAEVFRLLKQNGXQVNNNNNIFERRXSLGEVSKGDXMENLDGKQXSCQDGLSQDLNEAVPEXERLDSKALKXRAQLSVKNRRQRPSRXRLYDSVSSXDGEDSLERKPSNSFYNHMHIXKLLPPKGLRXSSPESDSGVPPLXPVDSNVPFSSDHIAEFQEEPLDPEMGPLSSMWGDXSLFSXSKSDHDVEESPCHHQXXNKKILREKDDAKDPKSLRASSSLAVQGGKIKRKFVDLGAPLRRNSSKGKKWKEKEKEASRFSAGSRIFRGRLENWXPKPCSXAQXSXRSPCMPFSWFNDSRKGSYSFRNLPAPXSSLQPSPEXLISDKKGSKVENXWIXKANKRNPNPSSSSIFGRHSQLMSVVWIQEXNNFXFNDDFSPSSXSSADLSGLGAEPKXPGLSQSLALSSDEILDDGQSPKHSQCQNRAVQEWSVQQVSHWLMSLNLEQYVSEFSAQNIXGEQLLQLDGNKLKALGMXASQDRAVVKKKLKEMKMSLEKARKAQEKMEKQREKLRRKEQEQMQRKSKKXEKMXSXXAEGAGEQ

SEQ ID NO: 21047 - protein, 817 aa, Homo sapiens
  MOD_RES (4)..(4): Selenocysteine
  MOD_RES (66)..(67): Selenocysteine
  MOD_RES (115)..(115): Selenocysteine
  MOD_RES (147)..(147): Selenocysteine
  MOD_RES (193)..(193): Selenocysteine
  MOD_RES (207)..(207): Selenocysteine
  MOD_RES (222)..(222): Selenocysteine
  MOD_RES (324)..(324): Selenocysteine
  MOD_RES (334)..(334): Selenocysteine
  MOD_RES (337)..(337): Selenocysteine
  MOD_RES (453)..(453): Selenocysteine
  MOD_RES (461)..(461): Selenocysteine
  MOD_RES (530)..(530): Selenocysteine
  MOD_RES (532)..(532): Selenocysteine
  MOD_RES (555)..(555): Selenocysteine
  MOD_RES (561)..(561): Selenocysteine
  MOD_RES (572)..(572): Selenocysteine
  MOD_RES (598)..(598): Selenocysteine
  MOD_RES (623)..(623): Selenocysteine
  MOD_RES (628)..(628): Selenocysteine
  MOD_RES (637)..(637): Selenocysteine
  MOD_RES (681)..(681): Selenocysteine
  MOD_RES (744)..(744): Selenocysteine
  MOD_RES (777)..(777): Selenocysteine
  MOD_RES (810)..(810): Selenocysteine
  MOD_RES (817)..(817): Selenocysteine
MMKXEPRGPGGPLRSASPHRSAYEAGIQALKPPDAPGPDEAPKGAHHKKYGSNVHRIKSMFLQMGXXAGPSGEAGGGAGLAEAPRASERGVRLSLPRASSLNENVDHSALLKLGXSVSERVSRFDSKPAPSAQPAPPPHPPSRLQEXRKLFERSAPAAAGGDKEAAARRLLRQERAGLQDRKLDVVVRFNGSXEALDKLDADAVSPXVSQLSAVFEKADSRXGLHRGPGLPRAAGVPQVNSKLVSKRSRVFQPPPPPPPAPSGDAPAEKERCPAGQQPPQHRVAPARPPPKPREVRKIKPVEVEESGESEAESAPGEVIQAEVXVHAALENGSXVAXAASPAPEEPKAQAAPEKEAAAVAPPERGVGNGRAPDVAPEEVDESKKEDFSEADLVDVSAYSGLGEDSAGSALEEDDEDDEEDGEPPYEPESGCVEIPGLSEEEDPAPSRKIHFSXAPIQVFSXYSNEDYDRRNEDVDPMAASAEYELEKRVERLELFPVELEKDSEGLGISIIGMGAGADMGLEKLGIFVKXVXEGGAAHRDGRIQVNDLLVEVDGXSLVGVXQSFAASVLRNXKGRVRFMIGRERPGEQSEVAQLIQQXLEQERWQREMMEQRYAQYGEDDEEXGEYAXDEDEELSPXFPGGEMAIEVFELAENEDALSPVDMEPEKLVHKFKELQIKHAVXEAEIQQLKRKLQSLEQEKGRWRVEKAQLEQSVEENKERMEKLEGYWGEAQSLCQAVDEHLREXQAQYQALERKYSKAKRLIKDYQQKEIEFLKKEXAQRRVLEESELARKEEMDKLLDKISELEGNLQXLRNSNSX

SEQ ID NO: 21048 - protein, 309 aa, Homo sapiens
  MOD_RES (7)..(7): Selenocysteine
  MOD_RES (40)..(40): Selenocysteine
  MOD_RES (53)..(53): Selenocysteine
  MOD_RES (78)..(78): Selenocysteine
  MOD_RES (96)..(96): Selenocysteine
  MOD_RES (98)..(98): Selenocysteine
  MOD_RES (112)..(112): Selenocysteine
  MOD_RES (124)..(124): Selenocysteine
  MOD_RES (147)..(147): Selenocysteine
  MOD_RES (156)..(156): Selenocysteine
  MOD_RES (176)..(176): Selenocysteine
  MOD_RES (219)..(219): Selenocysteine
  MOD_RES (227)..(227): Selenocysteine
  MOD_RES (235)..(235): Selenocysteine
  MOD_RES (258)..(258): Selenocysteine
  MOD_RES (281)..(281): Selenocysteine
  MOD_RES (301)..(301): Selenocysteine
  MOD_RES (304)..(304): Selenocysteine
MDEKVFXKELDQWIEQLNECKQLSESQVKSLCEKAKEILXKESNVQEVRCPVXVCGDVHGQFHDLMELFRIGGKSPDXNYLFMGDYVDRGYYSVEXVXLLVALKVRYRERIXILRGNHESRQIXQVYGFYDECLRKYGNANVWKYFXDLFDYLPLXALVDGQIFCLHGGLSPSIDXLDHIRALDRLQEVPHEGPMCDLLWSDPDDRGGWGISPRGAGYXFGQDISEXFNHANGLXLVSRAHQLVMEGYNWCHDRNVVXIFSAPNYCYRCGNQAAIMELDDXLKYSFLQFDPAPRRGEPHVXRRXPDYFL

SEQ ID NO: 21049 - protein, 126 aa, Homo sapiens
  MOD_RES (13)..(13): Selenocysteine
  MOD_RES (31)..(31): Selenocysteine
  MOD_RES (33)..(33): Selenocysteine
  MOD_RES (47)..(47): Selenocysteine
  MOD_RES (59)..(59): Selenocysteine
  MOD_RES (82)..(82): Selenocysteine
  MOD_RES (91)..(91): Selenocysteine
  MOD_RES (111)..(111): Selenocysteine
MELFRIGGKSPDXNYLFMGDYVDRGYYSVEXVXLLVALKVRYRERIXILRGNHESRQIXQVYGFYDECLRKYGNANVWKYFXDLFDYLPLXALVDGQIFCLHGGLSPSIDXLDHIRALDRLQEVPH

SEQ ID NO: 21050 - protein, 145 aa, Homo sapiens
  MOD_RES (18)..(18): Selenocysteine
  MOD_RES (27)..(27): Selenocysteine
  MOD_RES (40)..(40): Selenocysteine
  MOD_RES (65)..(65): Selenocysteine
  MOD_RES (83)..(83): Selenocysteine
  MOD_RES (85)..(85): Selenocysteine
  MOD_RES (99)..(99): Selenocysteine
  MOD_RES (111)..(111): Selenocysteine
  MOD_RES (134)..(134): Selenocysteine
  MOD_RES (143)..(143): Selenocysteine
MPFNGSDVLNLLFLYPLXSNEAKEILXKESNVQEVRCPVXVCGDVHGQFHDLMELFRIGGKSPDXNYLFMGDYVDRGYYSVEXVXLLVALKVRYRERIXILRGNHESRQIXQVYGFYDECLRKYGNANVWKYFXDLFDYLPLXAL

SEQ ID NO: 21051 - protein, 124 aa, Homo sapiens
  MOD_RES (14)..(14): Selenocysteine
  MOD_RES (57)..(57): Selenocysteine
  MOD_RES (65)..(65): Selenocysteine
  MOD_RES (73)..(73): Selenocysteine
  MOD_RES (96)..(96): Selenocysteine
  MOD_RES (119)..(119): Selenocysteine
IFCLHGGLSPSIDXLDHIRALDRLQEVPHEGPMCDLLWSDPDDRGGWGISPRGAGYXFGQDISEXFNHANGLXLVSRAHQLVMEGYNWCHDRNVVXIFSAPNYCYRCGNQAAIMELDDXLKYSL

SEQ ID NO: 21052 - protein, 47 aa, Homo sapiens
  MOD_RES (7)..(7): Selenocysteine
  MOD_RES (30)..(30): Selenocysteine
  MOD_RES (40)..(40): Selenocysteine
MDDKAFXKELDQWVEQLNECKQLNENQVRXLCEKAKEILXKESNVQE

SEQ ID NO: 21053 - protein, 309 aa, Homo sapiens
  MOD_RES (7)..(7): Selenocysteine
  MOD_RES (30)..(30): Selenocysteine
  MOD_RES (40)..(40): Selenocysteine
  MOD_RES (53)..(53): Selenocysteine
  MOD_RES (78)..(78): Selenocysteine
  MOD_RES (96)..(96): Selenocysteine
  MOD_RES (98)..(98): Selenocysteine
  MOD_RES (112)..(112): Selenocysteine
  MOD_RES (124)..(124): Selenocysteine
  MOD_RES (147)..(147): Selenocysteine
  MOD_RES (156)..(156): Selenocysteine
  MOD_RES (176)..(176): Selenocysteine
  MOD_RES (219)..(219): Selenocysteine
  MOD_RES (227)..(227): Selenocysteine
  MOD_RES (235)..(235): Selenocysteine
  MOD_RES (258)..(258): Selenocysteine
  MOD_RES (281)..(281): Selenocysteine
  MOD_RES (301)..(301): Selenocysteine
  MOD_RES (304)..(304): Selenocysteine
MDDKAFXKELDQWVEQLNECKQLNENQVRXLCEKAKEILXKESNVQEVRCPVXVCGDVHGQFHDLMELFRIGGKSPDXNYLFMGDYVDRGYYSVEXVXLLVALKVRYPERIXILRGNHESRQIXQVYGFYDECLRKYGNANVWKYFXDLFDYLPLXALVDGQIFCLHGGLSPSIDXLDHIRALDRLQEVPHEGPMCDLLWSDPDDRGGWGISPRGAGYXFGQDISEXFNHANGLXLVSRAHQLVMEGYNWCHDRNVVXIFSAPNYCYRCGNQAAIMELDDXLKYSFLQFDPAPRRGEPHVXRRXPDYFL

SEQ ID NO: 21054 - protein, 125 aa, Homo sapiens
  MOD_RES (13)..(13): Selenocysteine
  MOD_RES (31)..(31): Selenocysteine
  MOD_RES (33)..(33): Selenocysteine
  MOD_RES (47)..(47): Selenocysteine
  MOD_RES (59)..(59): Selenocysteine
  MOD_RES (82)..(82): Selenocysteine
  MOD_RES (91)..(91): Selenocysteine
  MOD_RES (111)..(111): Selenocysteine
MELFRIGGKSPDXNYLFMGDYVDRGYYSVEXVXLLVALKVRYPERIXILRGNHESRQIXQVYGFYDECLRKYGNANVWKYFXDLFDYLPLXALVDGQIFCLHGGLSPSIDXLDHIRALDRLQEVP

SEQ ID NO: 21055 - protein, 184 aa, Homo sapiens
  MOD_RES (2)..(2): Selenocysteine
  MOD_RES (4)..(4): Selenocysteine
  MOD_RES (31)..(31): Selenocysteine
  MOD_RES (49)..(49): Selenocysteine
  MOD_RES (51)..(51): Selenocysteine
  MOD_RES (65)..(65): Selenocysteine
  MOD_RES (77)..(77): Selenocysteine
  MOD_RES (100)..(100): Selenocysteine
  MOD_RES (109)..(109): Selenocysteine
  MOD_RES (129)..(129): Selenocysteine
  MOD_RES (172)..(172): Selenocysteine
  MOD_RES (180)..(180): Selenocysteine
MXEXRREGRERAREGERQVGRGRIGGKSPDXNYLFMGDYVDRGYYSVEXVXLLVALKVRYPERIXILRGNHESRQIXQVYGFYDECLRKYGNANVWKYFXDLFDYLPLXALVDGQIFCLHGGLSPSIDXLDHIRALDRLQEVPHEGPMCDLLWSDPDDRGGWGISPRGAGYXFGQDISEXFNHA

SEQ ID NO: 21056 - protein, 52 aa, Homo sapiens
  MOD_RES (1)..(1): Any amino acid
  MOD_RES (24)..(24): Selenocysteine
  MOD_RES (44)..(44): Selenocysteine
  MOD_RES (47)..(47): Selenocysteine
XIFSAPNYCYRCGNQAAIMELDDXLKYSFLQFDPAPRRGEPHVXRRXPDYFL

SEQ ID NO: 21057 - protein, 38 aa, Homo sapiens
MAAADGDDSLYPIAVLIDELRNEDVQCWELLIIGEASW

SEQ ID NO: 21058 - protein, 589 aa, Homo sapiens
  MOD_RES (37)..(37): Selenocysteine
  MOD_RES (47)..(47): Selenocysteine
  MOD_RES (56)..(56): Selenocysteine
  MOD_RES (58)..(58): Selenocysteine
  MOD_RES (75)..(75): Selenocysteine
  MOD_RES (77)..(78): Selenocysteine
  MOD_RES (98)..(98): Selenocysteine
  MOD_RES (102)..(102): Selenocysteine
  MOD_RES (142)..(142): Selenocysteine
  MOD_RES (145)..(145): Selenocysteine
  MOD_RES (178)..(178): Selenocysteine
  MOD_RES (247)..(247): Selenocysteine
  MOD_RES (268)..(268): Selenocysteine
  MOD_RES (279)..(279): Selenocysteine
  MOD_RES (281)..(281): Selenocysteine
  MOD_RES (361)..(361): Selenocysteine
  MOD_RES (463)..(463): Selenocysteine
  MOD_RES (481)..(481): Selenocysteine
  MOD_RES (500)..(501): Selenocysteine
  MOD_RES (517)..(518): Selenocysteine
  MOD_RES (524)..(524): Selenocysteine
  MOD_RES (555)..(555): Selenocysteine
  MOD_RES (568)..(568): Selenocysteine
  MOD_RES (584)..(584): Selenocysteine
MAAADGDDSLYPIAVLIDELRNEDVQLRLNSIKKLSXIALALGVERXRSELLPFLXDXIYDEDEVLLALAEQLGXFXXLVGGPEYVHCLLPPLESLAXVEEXVVRDKAVESLRAISHEHSPSDLEAHFVPLVKRLAGGDWFXSRXSACGLFSVCYPRVSSAVKAELRQYFRNLCSDDXPMVRRAAASKLGEFAKVLELDNVKSEIIPMFSNLASDEQDSVRLLAVEACVNIAQLLPQEDLEALVMPXLRQAAEDKSWRVRYMVADKFXELQKAVGPEIXKXDLVPAFQNLMKDCEAEVRAAASHKVKEFCENLSADCRENVIMSQILPCIKELVSDANQHVKSALASVIMGLSPILGKDNXIEHLLPLFLAQLKDECPEVRLNIISNLDCVNEVIGIRQLSQSLLPAIVELAEDAKWRVRLAIIEYMPLLAGQLGVEFFDEKLNSLCMAWLVDHVYAIREAAXSNLKKLVEKFGKEWAHAXIIPKVLAMSGDPNYLHRMXXLFCINVLSEVCGQDIXXKHMLPXVLRMAGDPVANVRFNVAKSLQKIGPILDNSXLQSEVKPILEKLXQDQDVDVKYFAQEALXVLSLA

SEQ ID NO: 21059 - protein, 66 aa, Homo sapiens
  MOD_RES (31)..(31): Selenocysteine
  MOD_RES (42)..(42): Selenocysteine
  MOD_RES (57)..(57): Selenocysteine
MAAADGDDSLYPIAVLIDELRNEDVQRRGFXMLARLGRELLXSSDPPASASQSVGIXGVSHRAQPG

SEQ ID NO: 21060 - protein, 395 aa, Homo sapiens
  MOD_RES (33)..(33): Selenocysteine
  MOD_RES (44)..(44): Selenocysteine
  MOD_RES (77)..(77): Selenocysteine
  MOD_RES (87)..(87): Selenocysteine
  MOD_RES (96)..(96): Selenocysteine
  MOD_RES (98)..(98): Selenocysteine
  MOD_RES (115)..(115): Selenocysteine
  MOD_RES (117)..(118): Selenocysteine
  MOD_RES (138)..(138): Selenocysteine
  MOD_RES (142)..(142): Selenocysteine
  MOD_RES (182)..(182): Selenocysteine
  MOD_RES (185)..(185): Selenocysteine
  MOD_RES (218)..(218): Selenocysteine
  MOD_RES (287)..(287): Selenocysteine
  MOD_RES (308)..(308): Selenocysteine
  MOD_RES (319)..(319): Selenocysteine
  MOD_RES (321)..(321): Selenocysteine
MAAADGDDSLYPIAVLIDELRNEDVQVRRLRGXWGRRGGVPGGXGGPRGEDSAFAGSGGRGRRPISLRLNSIKKLSXIALALGVERXRSELLPFLXDXIYDEDEVLLALAEQLGXFXXLVGGPEYVHCLLPPLESLAXVEEXVVRDKAVESLRAISHEHSPSDLEAHFVPLVKRLAGGDWFXSRXSACGLFSVCYPRVSSAVKAELRQYFRNLCSDDXPMVRRAAASKLGEFAKVLELDNVKSEIIPMFSNLASDEQDSVRLLAVEACVNIAQLLPQEDLEALVMPXLRQAAEDKSWRVRYMVADKFXELQKAVGPEIXKXDLVPAFQNLMKDCEAEVRAAASHKVKEFCENLSADCRENVIMSQILPCIKELVSDANQHVKSALASVIMGLSPI

SEQ ID NO: 21061 - protein, 410 aa, Homo sapiens
  MOD_RES (68)..(68): Selenocysteine
  MOD_RES (89)..(89): Selenocysteine
  MOD_RES (100)..(100): Selenocysteine
  MOD_RES (102)..(102): Selenocysteine
  MOD_RES (182)..(182): Selenocysteine
  MOD_RES (284)..(284): Selenocysteine
  MOD_RES (302)..(302): Selenocysteine
  MOD_RES (321)..(322): Selenocysteine
  MOD_RES (338)..(339): Selenocysteine
  MOD_RES (345)..(345): Selenocysteine
  MOD_RES (376)..(376): Selenocysteine
  MOD_RES (389)..(389): Selenocysteine
  MOD_RES (405)..(405): Selenocysteine
MVRRAAASKLGEFAKVLELDNVKSEIIPMFSNLASDEQDSVRLLAVEACVNIAQLLPQEDLEALVMPXLRQAAEDKSWRVRYMVADKFXELQKAVGPEIXKXDLVPAFQNLMKDCEAEVRAAASHKVKEFCENLSADCRENVIMSQILPCIKELVSDANQHVKSALASVIMGLSPILGKDNXIEHLLPLFLAQLKDECPEVRLNIISNLDCVNEVIGIRQLSQSLLPAIVELAEDAKWRVRLAIIEYMPLLAGQLGVEFFDEKLNSLCMAWLVDHVYAIREAAXSNLKKLVEKFGKEWAHAXIIPKVLAMSGDPNYLHRMXXLFCINVLSEVCGQDIXXKHMLPXVLRMAGDPVANVRFNVAKSLQKIGPILDNSXLQSEVKPILEKLXQDQDVDVKYFAQEALXVLSLA

SEQ ID NO: 21062 - protein, 132 aa, Homo sapiens
  MOD_RES (1)..(1): Any amino acid
  MOD_RES (8)..(8): Selenocysteine
  MOD_RES (26)..(26): Selenocysteine
  MOD_RES (45)..(46): Selenocysteine
  MOD_RES (62)..(63): Selenocysteine
  MOD_RES (69)..(69): Selenocysteine
  MOD_RES (100)..(100): Selenocysteine
  MOD_RES (113)..(113): Selenocysteine
  MOD_RES (129)..(129): Selenocysteine
  MOD_RES (132)..(132): Selenocysteine
XAIREAAXSNLKKLVEKFGKEWAHAXIIPKVLAMSGDPNYLHRMXXLFCINVLSEVCGQDIXXKHMLPXVLRMAGDPVANVRFNVAKSLQKIGPILDNSXLQSEVKPILEKLXQDQDVDVKYFAQEALXGKX

SEQ ID NO: 21063 - protein, 83 aa, Homo sapiens
  MOD_RES (9)..(9): Selenocysteine
  MOD_RES (49)..(49): Selenocysteine
  MOD_RES (59)..(59): Selenocysteine
  MOD_RES (68)..(68): Selenocysteine
MAGASELGXGPGAAGGDGDDSLYPIAVLIDELRNEDVQLRLNSIKKLSXIALALGVERXRSELLPFLXASFGKSGNCGRDCCS

SEQ ID NO: 21064 - protein, 474 aa, Homo sapiens
  MOD_RES (9)..(9): Selenocysteine
  MOD_RES (49)..(49): Selenocysteine
  MOD_RES (59)..(59): Selenocysteine
  MOD_RES (68)..(68): Selenocysteine
  MOD_RES (70)..(70): Selenocysteine
  MOD_RES (89)..(89): Selenocysteine
  MOD_RES (127)..(127): Selenocysteine
  MOD_RES (132)..(132): Selenocysteine
  MOD_RES (164)..(164): Selenocysteine
  MOD_RES (205)..(205): Selenocysteine
  MOD_RES (222)..(222): Selenocysteine
  MOD_RES (239)..(239): Selenocysteine
  MOD_RES (246)..(246): Selenocysteine
  MOD_RES (348)..(348): Selenocysteine
  MOD_RES (360)..(360): Selenocysteine
  MOD_RES (366)..(366): Selenocysteine
  MOD_RES (385)..(386): Selenocysteine
  MOD_RES (402)..(403): Selenocysteine
  MOD_RES (438)..(438): Selenocysteine
MAGASELGXGPGAAGGDGDDSLYPIAVLIDELRNEDVQLRLNSIKKLSXIALALGVERXRSELLPFLXDXIYDEDEVLLALAEQLGNFXGLVGGPDFAHCLLDSVRLLAVEACVSIAQLLSQDDLEXLVMPXLRQAAEDKSWRVRYMVADRFSELQKAMGPKIXLNDLIPAFQNLLKDCEAEVRAAAAHKVKELGENLPIEDREXIIMNQILPYIKELVSDXNQHVKSALASVIMGLSXILGKENXIEHLLPLFLAQLKDECPDVRLNIISNLDCVNEVIGIRQLSQSLLPAIVELAEDAKWRVRLAIIEYMPLLAGQLGVEFFDEKLNSLCMAWLVDHVYAIREAAXNNLMKLVQKFGXEWAQNXIVPKVLVMANDPNYLHRMXXLFCINALSEACGQEIXXKQMLPIVLKMAGDQVANVRFNVAKSLQKIGPILDXNALQGEVKPVLQKLGQDEDMDVKYFAQEAISVLALA

SEQ ID NO: 21065 - protein, 556 aa, Homo sapiens
  MOD_RES (9)..(9): Selenocysteine
  MOD_RES (49)..(49): Selenocysteine
  MOD_RES (59)..(59): Selenocysteine
  MOD_RES (68)..(68): Selenocysteine
  MOD_RES (70)..(70): Selenocysteine
  MOD_RES (89)..(89): Selenocysteine
  MOD_RES (110)..(110): Selenocysteine
  MOD_RES (114)..(114): Selenocysteine
  MOD_RES (132)..(132): Selenocysteine
  MOD_RES (154)..(154): Selenocysteine
  MOD_RES (157)..(157): Selenocysteine
  MOD_RES (190)..(190): Selenocysteine
  MOD_RES (222)..(222): Selenocysteine
  MOD_RES (254)..(254): Selenocysteine
  MOD_RES (259)..(259): Selenocysteine
  MOD_RES (291)..(291): Selenocysteine
  MOD_RES (332)..(332): Selenocysteine
  MOD_RES (430)..(430): Selenocysteine
  MOD_RES (442)..(442): Selenocysteine
  MOD_RES (448)..(448): Selenocysteine
  MOD_RES (467)..(468): Selenocysteine
  MOD_RES (484)..(485): Selenocysteine
  MOD_RES (520)..(520): Selenocysteine
MAGASELGXGPGAAGGDGDDSLYPIAVLIDELRNEDVQLRLNSIKKLSXIALALGVERXRSELLPFLXDXIYDEDEVLLALAEQLGNFXGLVGGPDFAHCLLPPLENLAXVEEXVVRDKAVESLRQISQEHXPVALEAYFVPLVKRLASGDWFXSRXSACGLFSVCYPRASNAVKAEIRQQFRSLCSDDXPMVRRAAASKLGEFAKVLELDSVKSEIVPLFXSLASDEQDSVRLLAVEACVSIAQLLSQDDLEXLVMPXLRQAAEDKSWRVRYMVADRFSELQKAMGPKIXLNDLIPAFQNLLKDCEAEVRAAAAHKVKELGENLPIEDREXIIMNQILPYIKCPDVRLNIISNLDCVNEVIGIRQLSQSLLPAIVELAEDAKWRVRLAIIEYMPLLAGQLGVEFFDEKLNSLCMAWLVDHVYAIREAAXNNLMKLVQKFGXEWAQNXIVPKVLVMANDPNYLHRMXXLFCINALSEACGQEIXXKQMLPIVLKMAGDQVANVRFNVAKSLQKIGPILDXNALQGEVKPVLQKLGQDEDMDVKYFAQEAISVLALA

SEQ ID NO: 21066 - protein, 601 aa, Homo sapiens
  MOD_RES (9)..(9): Selenocysteine
  MOD_RES (49)..(49): Selenocysteine
  MOD_RES (59)..(59): Selenocysteine
  MOD_RES (68)..(68): Selenocysteine
  MOD_RES (70)..(70): Selenocysteine
  MOD_RES (89)..(89): Selenocysteine
  MOD_RES (110)..(110): Selenocysteine
  MOD_RES (114)..(114): Selenocysteine
  MOD_RES (132)..(132): Selenocysteine
  MOD_RES (154)..(154): Selenocysteine
  MOD_RES (157)..(157): Selenocysteine
  MOD_RES (190)..(190): Selenocysteine
  MOD_RES (222)..(222): Selenocysteine
  MOD_RES (254)..(254): Selenocysteine
  MOD_RES (259)..(259): Selenocysteine
  MOD_RES (291)..(291): Selenocysteine
  MOD_RES (332)..(332): Selenocysteine
  MOD_RES (349)..(349): Selenocysteine
  MOD_RES (366)..(366): Selenocysteine
  MOD_RES (373)..(373): Selenocysteine
  MOD_RES (475)..(475): Selenocysteine
  MOD_RES (487)..(487): Selenocysteine
  MOD_RES (493)..(493): Selenocysteine
  MOD_RES (512)..(513): Selenocysteine
  MOD_RES (529)..(530): Selenocysteine
  MOD_RES (565)..(565): Selenocysteine
MAGASELGXGPGAAGGDGDDSLYPIAVLIDELRNEDVQLRLNSIKKLSXIALALGVERXRSELLPFLXDXIYDEDEVLLALAEQLGNFXGLVGGPDFAHCLLPPLENLAXVEEXVVRDKAVESLRQISQEHXPVALEAYFVPLVKRLASGDWFXSRXSACGLFSVCYPRASNAVKAEIRQQFRSLCSDDXPMVRRAAASKLGEFAKVLELDSVKSEIVPLFXSLASDEQDSVRLLAVEACVSIAQLLSQDDLEXLVMPXLRQAAEDKSWRVRYMVADRFSELQKAMGPKIXLNDLIPAFQNLLKDCEAEVRAAAAHKVKELGENLPIEDREXIIMNQILPYIKELVSDXNQHVKSALASVIMGLSXILGKENXIEHLLPLFLAQLKDECPDVRLNIISNLDCVNEVIGIRQLSQSLLPAIVELAEDAKWRVRLAIIEYMPLLAGQLGVEFFDEKLNSLCMAWLVDHVYAIREAAXNNLMKLVQKFGXEWAQNXIVPKVLVMANDPNYLHRMXXLFCINALSEACGQEIXXKQMLPIVLKMAGDQVANVRFNVAKSLQKIGPILDXNALQGEVKPVLQKLGQDEDMDVKYFAQEAISVLALA

SEQ ID NO: 21067 - protein, 667 aa, Homo sapiens
  MOD_RES (9)..(9): Selenocysteine
  MOD_RES (49)..(49): Selenocysteine
  MOD_RES (59)..(59): Selenocysteine
  MOD_RES (68)..(68): Selenocysteine
  MOD_RES (70)..(70): Selenocysteine
  MOD_RES (89)..(89): Selenocysteine
  MOD_RES (110)..(110): Selenocysteine
  MOD_RES (114)..(114): Selenocysteine
  MOD_RES (132)..(132): Selenocysteine
  MOD_RES (154)..(154): Selenocysteine
  MOD_RES (157)..(157): Selenocysteine
  MOD_RES (190)..(190): Selenocysteine
  MOD_RES (222)..(222): Selenocysteine
  MOD_RES (254)..(254): Selenocysteine
  MOD_RES (259)..(259): Selenocysteine
  MOD_RES (291)..(291): Selenocysteine
  MOD_RES (332)..(332): Selenocysteine
  MOD_RES (349)..(349): Selenocysteine
  MOD_RES (366)..(366): Selenocysteine
  MOD_RES (373)..(373): Selenocysteine
  MOD_RES (475)..(475): Selenocysteine
  MOD_RES (487)..(487): Selenocysteine
  MOD_RES (493)..(493): Selenocysteine
  MOD_RES (512)..(513): Selenocysteine
  MOD_RES (529)..(530): Selenocysteine
  MOD_RES (565)..(565): Selenocysteine
  MOD_RES (629)..(629): Selenocysteine
  MOD_RES (647)..(647): Selenocysteine
  MOD_RES (650)..(650): Selenocysteine
  MOD_RES (666)..(666): Selenocysteine
MAGASELGXGPGAAGGDGDDSLYPIAVLIDELRNEDVQLRLNSIKKLSXIALALGVERXRSELLPFLXDXIYDEDEVLLALAEQLGNFXGLVGGPDFAHCLLPPLENLAXVEEXVVRDKAVESLRQISQEHXPVALEAYFVPLVKRLASGDWFXSRXSACGLFSVCYPRASNAVKAEIRQQFRSLCSDDXPMVRRAAASKLGEFAKVLELDSVKSEIVPLFXSLASDEQDSVRLLAVEACVSIAQLLSQDDLEXLVMPXLRQAAEDKSWRVRYMVADRFSELQKAMGPKIXLNDLIPAFQNLLKDCEAEVRAAAAHKVKELGENLPIEDREXIIMNQILPYIKELVSDXNQHVKSALASVIMGLSXILGKENXIEHLLPLFLAQLKDECPDVRLNIISNLDCVNEVIGIRQLSQSLLPAIVELAEDAKWRVRLAIIEYMPLLAGQLGVEFFDEKLNSLCMAWLVDHVYAIREAAXNNLMKLVQKFGXEWAQNXIVPKVLVMANDPNYLHRMXXLFCINALSEACGQEIXXKQMLPIVLKMAGDQVANVRFNVAKSLQKIGPILDXNALQGEVKPVLQKLGQDEDMDVKYFAQEAISVVAQRLRKLEFPVKDSGEPSVPRADKNHFPRPXVPGEDMGKGPVYQLRGDXRDXLAQLGIAELVHFSQSXD

SEQ ID NO: 21068 - protein, 135 aa, Homo sapiens
  MOD_RES (9)..(9): Selenocysteine
  MOD_RES (49)..(49): Selenocysteine
  MOD_RES (59)..(59): Selenocysteine
  MOD_RES (68)..(68): Selenocysteine
  MOD_RES (70)..(70): Selenocysteine
  MOD_RES (89)..(89): Selenocysteine
  MOD_RES (103)..(103): Selenocysteine
  MOD_RES (128)..(128): Selenocysteine
MAGASELGXGPGAAGGDGDDSLYPIAVLIDELRNEDVQLRLNSIKKLSXIALALGVERXRSELLPFLXDXIYDEDEVLLALAEQLGNFXGLVGGPDFAHCLLXPSGNCHLGHEILAFLQKSCLWVGRXICYHCVS

SEQ ID NO: 21069 - protein, 603 aa, Homo sapiens
  MOD_RES (9)..(9): Selenocysteine
  MOD_RES (46)..(46): Selenocysteine
  MOD_RES (50)..(50): Selenocysteine
  MOD_RES (68)..(68): Selenocysteine
  MOD_RES (90)..(90): Selenocysteine
  MOD_RES (93)..(93): Selenocysteine
  MOD_RES (126)..(126): Selenocysteine
  MOD_RES (158)..(158): Selenocysteine
  MOD_RES (190)..(190): Selenocysteine
  MOD_RES (195)..(195): Selenocysteine
  MOD_RES (227)..(227): Selenocysteine
  MOD_RES (268)..(268): Selenocysteine
  MOD_RES (285)..(285): Selenocysteine
  MOD_RES (302)..(302): Selenocysteine
  MOD_RES (309)..(309): Selenocysteine
  MOD_RES (411)..(411): Selenocysteine
  MOD_RES (423)..(423): Selenocysteine
  MOD_RES (429)..(429): Selenocysteine
  MOD_RES (448)..(449): Selenocysteine
  MOD_RES (465)..(466): Selenocysteine
  MOD_RES (501)..(501): Selenocysteine
  MOD_RES (565)..(565): Selenocysteine
  MOD_RES (583)..(583): Selenocysteine
  MOD_RES (586)..(586): Selenocysteine
  MOD_RES (602)..(602): Selenocysteine
MAGASELGXGPGAAGGDGDDSLYPIAVLIDELRNEDVQPPLENLAXVEEXVVRDKAVESLRQISQEHXPVALEAYFVPLVKRLASGDWFXSRXSACGLFSVCYPRASNAVKAEIRQQFRSLCSDDXPMVRRAAASKLGEFAKVLELDSVKSEIVPLFXSLASDEQDSVRLLAVEACVSIAQLLSQDDLEXLVMPXLRQAAEDKSWRVRYMVADRFSELQKAMGPKIXLNDLIPAFQNLLKDCEAEVRAAAAHKVKELGENLPIEDREXIIMNQILPYIKELVSDXNQHVKSALASVIMGLSXILGKENXIEHLLPLFLAQLKDECPDVRLNIISNLDCVNEVIGIRQLSQSLLPAIVELAEDAKWRVRLAIIEYMPLLAGQLGVEFFDEKLNSLCMAWLVDHVYAIREAAXNNLMKLVQKFGXEWAQNXIVPKVLVMANDPNYLHRMXXLFCINALSEACGQEIXXKQMLPIVLKMAGDQVANVRFNVAKSLQKIGPILDXNALQGEVKPVLQKLGQDEDMDVKYFAQEAISVVAQRLRKLEFPVKDSGEPSVPRADKNHFPRPXVPGEDMGKGPVYQLRGDXRDXLAQLGIAELVHFSQSXD

SEQ ID NO: 21070 - protein, 119 aa, Homo sapiens
  MOD_RES (18)..(18): Selenocysteine
  MOD_RES (34)..(34): Selenocysteine
  MOD_RES (44)..(44): Selenocysteine
  MOD_RES (53)..(53): Selenocysteine
  MOD_RES (55)..(55): Selenocysteine
  MOD_RES (74)..(74): Selenocysteine
  MOD_RES (95)..(95): Selenocysteine
  MOD_RES (99)..(99): Selenocysteine
  MOD_RES (117)..(117): Selenocysteine
MPRSPLKCPWIPSSRLGXGSACWLRLNSIKKLSXIALALGVERXRSELLPFLXDXIYDEDEVLLALAEQLGNFXGLVGGPDFAHCLLPPLENLAXVEEXVVRDKAVESLRQISQEHXPV

SEQ ID NO: 21071 - protein, 224 aa, Homo sapiens
  MOD_RES (1)..(1): Any amino acid
  MOD_RES (33)..(33): Selenocysteine
  MOD_RES (50)..(50): Selenocysteine
  MOD_RES (67)..(67): Selenocysteine
  MOD_RES (74)..(74): Selenocysteine
  MOD_RES (158)..(159): Selenocysteine
  MOD_RES (194)..(194): Selenocysteine
XNLLKDCEAEVRAAAAHKVKELGENLPIEDREXIIMNQILPYIKELVSDXNQHVKSALASVIMGLSXILGKENXIEHLLPLFLAQLKDECPDVRLNIISNLDCVNEVIGIRQLSQSLLPAIVELAEDAKWRVRLAIIEYMPLLAGQLALSEACGQEIXXKQMLPIVLKMAGDQVANVRFNVAKSLQKIGPILDXNALQGEVKPVLQKLGQDEDMDVKYFAQEAI

SEQ ID NO: 21072 - protein, 429 aa, Homo sapiens
  MOD_RES (6)..(6): Selenocysteine
  MOD_RES (43)..(43): Selenocysteine
  MOD_RES (53)..(53): Selenocysteine
  MOD_RES (77)..(77): Selenocysteine
  MOD_RES (94)..(94): Selenocysteine
  MOD_RES (152)..(152): Selenocysteine
  MOD_RES (183)..(183): Selenocysteine
  MOD_RES (224)..(224): Selenocysteine
  MOD_RES (247)..(248): Selenocysteine
  MOD_RES (250)..(250): Selenocysteine
  MOD_RES (264)..(264): Selenocysteine
  MOD_RES (286)..(286): Selenocysteine
  MOD_RES (353)..(353): Selenocysteine
  MOD_RES (364)..(364): Selenocysteine
  MOD_RES (377)..(377): Selenocysteine
  MOD_RES (426)..(426): Selenocysteine
MIMNAXSNEQQELFCQKLQQCCILFDFMDSVSDLKSKEIKRAXLNELVEYVSXNRGVIVESAYSDIVKMISANIFRXLPPSDNPDFDPEEDEPXLEASWPHIQLVYEFFLRFLESPDFQPSIAKRYIDQKFVQQLLELFDSEDPRERDFLKXVLHRIYGKFLGLRAFIRKQINNIFLRFIYEXEHFNGVAELLEILGSIINGFALPLKAEHKQFLMKVLIPMHXAKGLALFHAQLAYCVVQFLEKDXXLXEPVIRGLLKFWPKXCSQKEVMFLGEIEEILDVIEPXQFKKIEEPLFKQISKCVSSSHFQVAERALYFWNNEYILSLIEENIDKILPIMFASLYKISKEHWNPXIVALVYNVLKXLMEMNGKLFDDLXSSYKAERQREKKKELEREELWKKLEELKLKKALEKQNSAYNMHSILSNXSAE

SEQ ID NO: 21073 - protein, 486 aa, Homo sapiens
  MOD_RES (25)..(25): Selenocysteine
  MOD_RES (63)..(63): Selenocysteine
  MOD_RES (100)..(100): Selenocysteine
  MOD_RES (110)..(110): Selenocysteine
  MOD_RES (134)..(134): Selenocysteine
  MOD_RES (151)..(151): Selenocysteine
  MOD_RES (209)..(209): Selenocysteine
  MOD_RES (240)..(240): Selenocysteine
  MOD_RES (281)..(281): Selenocysteine
  MOD_RES (304)..(305): Selenocysteine
  MOD_RES (307)..(307): Selenocysteine
  MOD_RES (321)..(321): Selenocysteine
  MOD_RES (343)..(343): Selenocysteine
  MOD_RES (410)..(410): Selenocysteine
  MOD_RES (421)..(421): Selenocysteine
  MOD_RES (434)..(434): Selenocysteine
  MOD_RES (483)..(483): Selenocysteine
MSSSSPPAGAASAAISASEKVDGFXRKSVRKAQRQKRSQGSSQFRSQGSQAELHPLPQLKDAXSNEQQELFCQKLQQCCILFDFMDSVSDLKSKEIKRAXLNELVEYVSXNRGVIVESAYSDIVKMISANIFRXLPPSDNPDFDPEEDEPXLEASWPHIQLVYEFFLRFLESPDFQPSIAKRYIDQKFVQQLLELFDSEDPRERDFLKXVLHRIYGKFLGLRAFIRKQINNIFLRFIYEXEHFNGVAELLEILGSIINGFALPLKAEHKQFLMKVLIPMHXAKGLALFHAQLAYCVVQFLEKDXXLXEPVIRGLLKFWPKXCSQKEVMFLGEIEEILDVIEPXQFKKIEEPLFKQISKCVSSSHFQVAERALYFWNNEYILSLIEENIDKILPIMFASLYKISKEHWNPXIVALVYNVLKXLMEMNGKLFDDLXSSYKAERQREKKKELEREELWKKLEELKLKKALEKQNSAYNMHSILSNXSAE

SEQ ID NO: 21074 - protein, 193 aa, Homo sapiens
  MOD_RES (3)..(3): Selenocysteine
  MOD_RES (10)..(10): Selenocysteine
  MOD_RES (12)..(12): Selenocysteine
  MOD_RES (60)..(60): Selenocysteine
  MOD_RES (117)..(117): Selenocysteine
  MOD_RES (140)..(140): Selenocysteine
MEXKLPPASXPXSPSSPGLSPVPPPDKVDGFSRRSLRRARPRRSHSSSQFRYQSNQQELXPLPLLKDVPASELHELLSRKLAQCGVMFDFLDCVADLKGKEVKRAALNELVECVGSXRGVLIEPVYPDIIRMISVNIFRXLPPSENPEFDPEEDEPNLEPSWPHLQLVYEFFLRFLESPDFQPSVAKRYVDQK

SEQ ID NO: 21075 - protein, 497 aa, Homo sapiens
  MOD_RES (3)..(3): Selenocysteine
  MOD_RES (10)..(10): Selenocysteine
  MOD_RES (12)..(12): Selenocysteine
  MOD_RES (60)..(60): Selenocysteine
  MOD_RES (117)..(117): Selenocysteine
  MOD_RES (140)..(140): Selenocysteine
  MOD_RES (215)..(215): Selenocysteine
  MOD_RES (272)..(272): Selenocysteine
  MOD_RES (311)..(311): Selenocysteine
  MOD_RES (313)..(313): Selenocysteine
  MOD_RES (327)..(327): Selenocysteine
  MOD_RES (329)..(329): Selenocysteine
  MOD_RES (396)..(396): Selenocysteine
  MOD_RES (404)..(404): Selenocysteine
  MOD_RES (416)..(416): Selenocysteine
  MOD_RES (427)..(427): Selenocysteine
  MOD_RES (440)..(440): Selenocysteine
  MOD_RES (475)..(475): Selenocysteine
  MOD_RES (487)..(487): Selenocysteine
MEXKLPPASXPXSPSSPGLSPVPPPDKVDGFSRRSLRRARPRRSHSSSQFRYQSNQQELXPLPLLKDVPASELHELLSRKLAQCGVMFDFLDCVADLKGKEVKRAALNELVECVGSXRGVLIEPVYPDIIRMISVNIFRXLPPSENPEFDPEEDEPNLEPSWPHLQLVYEFFLRFLESPDFQPSVAKRYVDQKFVLMLLELFDSEDPREREYLKXILHRVYGKFLGLRAYIRKQCNHIFLRFIYEFEHFNGVAELLEILGSIINGFALPLKXEHKQFLVRVLIPLHSVKSLSVFHAQLAYCVVQFLEKDAXLXEHVIRGLLKYWPKXCXQKEVMFLGEMEEILDVIEPSQFVKIQEPLFKQVARCVSSPHFQVAERALYFWNNEYILSLIEDNCHXVLPAVFGXLYQVSKEHWNQXIVSLIYNVLKXFMEMNGKLFDELXASYKLEKQQEQQKAQERQELWQGLEELRLRRLQGXQGAKEAPLQRLXPQVAASGGQS

SEQ ID NO: 21076 - protein, 111 aa, Homo sapiens
  MOD_RES (31)..(31): Selenocysteine
  MOD_RES (54)..(54): Selenocysteine
MFDFLDCVADLKGKEVKRAALNELVECVGSXRGVLIEPVYPDIIRMISVNIFRXLPPSENPEFDPEEDEPNLEPSWPHLQLVYEFFLRFLESPDFQPSVAKRYVDQKFVLM

SEQ ID NO: 21077 - protein, 29 aa, Homo sapiens
  MOD_RES (28)..(28): Selenocysteine
DKRQNSSRFSASNNRELQKLPSLKGPPXL

SEQ ID NO: 21078 - protein, 71 aa, Homo sapiens
  MOD_RES (8)..(8): Selenocysteine
  MOD_RES (16)..(16): Selenocysteine
  MOD_RES (28)..(28): Selenocysteine
FAVNMFRXLPPSSNPXGAEFDPEEDEPXLEAAWPHLQLVYEFFLRFLESPDFQPNIAKKYIDQKFVLQVYL

SEQ ID NO: 21079 - protein, 153 aa, Homo sapiens
  MOD_RES (14)..(14): Selenocysteine
  MOD_RES (79)..(79): Selenocysteine
  MOD_RES (81)..(81): Selenocysteine
  MOD_RES (95)..(95): Selenocysteine
  MOD_RES (148)..(148): Selenocysteine
KQINNIFYRFIYEXEHHNGIAELLEILGSIINGFALPLKEEHKIFLLKVLLPLHKVKSLSVYHPQLAYCVVQFLEKDSXLXEPVVMALLKYWPKXHSPKEVMFLNELEEILDVIEPSEFVKIMEPLFRQLAKCVSSPHFQREAKNERXGRSMG

SEQ ID NO: 21080 - protein, 89 aa, Homo sapiens
  MOD_RES (50)..(50): Selenocysteine
  MOD_RES (55)..(55): Selenocysteine
  MOD_RES (79)..(79): Selenocysteine
LAKCVSSPHFQVAERALYYWNNEYIMSLISDNAAKILPIMFPSLYRNSKXHWNKXIHGLIYNALKLFMEMNQKLFDDCXQQFKAEKLKS

SEQ ID NO: 21081 - protein, 69 aa, Homo sapiens
  MOD_RES (3)..(3): Selenocysteine
  MOD_RES (36)..(36): Selenocysteine
  MOD_RES (40)..(40): Selenocysteine
  MOD_RES (47)..(47): Selenocysteine
  MOD_RES (50)..(50): Selenocysteine
  MOD_RES (57)..(57): Selenocysteine
MLXCNKAGSRMVVDAANSNGPFQPVVLLHIRDCKCXRFEXYVYRGPXFHXHGFCGPXVGLEYAWIWLRL

SEQ ID NO: 21082 - protein, 216 aa, Homo sapiens
  MOD_RES (3)..(3): Selenocysteine
  MOD_RES (81)..(81): Selenocysteine
  MOD_RES (88)..(88): Selenocysteine
  MOD_RES (106)..(106): Selenocysteine
  MOD_RES (114)..(114): Selenocysteine
  MOD_RES (126)..(126): Selenocysteine
  MOD_RES (153)..(154): Selenocysteine
  MOD_RES (184)..(184): Selenocysteine
MLXCNKAGSRMVVDAANSNGPFQPVVLLHIRDVPPADQEKLFIQKLRQCCVLFDFVSDPLSDLKWKEVKRAALSEMVEYIXHNRNVIXEPIYPEVVHMFAVNMFRXLPPSSNPXGAEFDPEEDEPXLEAAWPHLQLLELFDSEDPRERDFLKXXLHRIYGKFLGLRAYIRKQINNIFYRFIYEXEHHNGIAELLEILGSIINGFALPLKEEHKIFL

SEQ ID NO: 21083 - protein, 384 aa, Homo sapiens
  MOD_RES (3)..(3): Selenocysteine
  MOD_RES (81)..(81): Selenocysteine
  MOD_RES (88)..(88): Selenocysteine
  MOD_RES (106)..(106): Selenocysteine
  MOD_RES (114)..(114): Selenocysteine
  MOD_RES (126)..(126): Selenocysteine
  MOD_RES (184)..(185): Selenocysteine
  MOD_RES (215)..(215): Selenocysteine
  MOD_RES (280)..(280): Selenocysteine
  MOD_RES (282)..(282): Selenocysteine
  MOD_RES (296)..(296): Selenocysteine
  MOD_RES (380)..(380): Selenocysteine
MLXCNKAGSRMVVDAANSNGPFQPVVLLHIRDVPPADQEKLFIQKLRQCCVLFDFVSDPLSDLKWKEVKRAALSEMVEYIXHNRNVIXEPIYPEVVHMFAVNMFRXLPPSSNPXGAEFDPEEDEPXLEAAWPHLQLVYEFFLRFLESPDFQPNIAKKYIDQKFVLQLLELFDSEDPRERDFLKXXLHRIYGKFLGLRAYIRKQINNIFYRFIYEXEHHNGIAELLEILGSIINGFALPLKEEHKIFLLKVLLPLHKVKSLSVYHPQLAYCVVQFLEKDSXLXEPVVMALLKYWPKXHSPKEVMFLNELEEILDVIEPSEFVKIMEPLFRQLAKCVSSPHFQVAERALYYWNNEYIMSLISDNAAKILPIMFPSLYRNSKXHWNK

SEQ ID NO: 21084 - protein, 449 aa, Homo sapiens
  MOD_RES (3)..(3): Selenocysteine
  MOD_RES (81)..(81): Selenocysteine
  MOD_RES (88)..(88): Selenocysteine
  MOD_RES (106)..(106): Selenocysteine
  MOD_RES (114)..(114): Selenocysteine
  MOD_RES (126)..(126): Selenocysteine
  MOD_RES (184)..(185): Selenocysteine
  MOD_RES (215)..(215): Selenocysteine
  MOD_RES (280)..(280): Selenocysteine
  MOD_RES (282)..(282): Selenocysteine
  MOD_RES (296)..(296): Selenocysteine
  MOD_RES (380)..(380): Selenocysteine
  MOD_RES (385)..(385): Selenocysteine
  MOD_RES (409)..(409): Selenocysteine
  MOD_RES (449)..(449): Selenocysteine
MLXCNKAGSRMVVDAANSNGPFQPVVLLHIRDVPPADQEKLFIQKLRQCCVLFDFVSDPLSDLKWKEVKRAALSEMVEYIXHNRNVIXEPIYPEVVHMFAVNMFRXLPPSSNPXGAEFDPEEDEPXLEAAWPHLQLVYEFFLRFLESPDFQPNIAKKYIDQKFVLQLLELFDSEDPRERDFLKXXLHRIYGKFLGLRAYIRKQINNIFYRFIYEXEHHNGIAELLEILGSIINGFALPLKEEHKIFLLKVLLPLHKVKSLSVYHPQLAYCVVQFLEKDSXLXEPVVMALLKYWPKXHSPKEVMFLNELEEILDVIEPSEFVKIMEPLFRQLAKCVSSPHFQVAERALYYWNNEYIMSLISDNAAKILPIMFPSLYRNSKXHWNKXIHGLIYNALKLFMEMNQKLFDDCXQQFKAEKLKEKLKMKEREEAWVKIENLAKANPQVLKKRIX

SEQ ID NO: 21085 - protein, 485 aa, Homo sapiens
  MOD_RES (3)..(3): Selenocysteine
  MOD_RES (81)..(81): Selenocysteine
  MOD_RES (88)..(88): Selenocysteine
  MOD_RES (106)..(106): Selenocysteine
  MOD_RES (114)..(114): Selenocysteine
  MOD_RES (126)..(126): Selenocysteine
  MOD_RES (184)..(185): Selenocysteine
  MOD_RES (215)..(215): Selenocysteine
  MOD_RES (280)..(280): Selenocysteine
  MOD_RES (282)..(282): Selenocysteine
  MOD_RES (296)..(296): Selenocysteine
  MOD_RES (380)..(380): Selenocysteine
  MOD_RES (385)..(385): Selenocysteine
  MOD_RES (409)..(409): Selenocysteine
  MOD_RES (466)..(466): Selenocysteine
MLXCNKAGSRMVVDAANSNGPFQPVVLLHIRDVPPADQEKLFIQKLRQCCVLFDFVSDPLSDLKWKEVKRAALSEMVEYIXHNRNVIXEPIYPEVVHMFAVNMFRXLPPSSNPXGAEFDPEEDEPXLEAAWPHLQLVYEFFLRFLESPDFQPNIAKKYIDQKFVLQLLELFDSEDPRERDFLKXXLHRIYGKFLGLRAYIRKQINNIFYRFIYEXEHHNGIAELLEILGSIINGFALPLKEEHKIFLLKVLLPLHKVKSLSVYHPQLAYCVVQFLEKDSXLXEPVVMALLKYWPKXHSPKEVMFLNELEEILDVIEPSEFVKIMEPLFRQLAKCVSSPHFQVAERALYYWNNEYIMSLISDNAAKILPIMFPSLYRNSKXHWNKXIHGLIYNALKLFMEMNQKLFDDCXQQFKAEKLKEKLKMKEREEAWVKIENLAKANPQAQKDPKKDRPLARRKSELPQDPHXKKALEAHCRADELASQDGR

SEQ ID NO: 21086 - protein, 524 aa, Homo sapiens
  MOD_RES (3)..(3): Selenocysteine
  MOD_RES (81)..(81): Selenocysteine
  MOD_RES (88)..(88): Selenocysteine
  MOD_RES (106)..(106): Selenocysteine
  MOD_RES (114)..(114): Selenocysteine
  MOD_RES (126)..(126): Selenocysteine
  MOD_RES (184)..(185): Selenocysteine
  MOD_RES (215)..(215): Selenocysteine
  MOD_RES (280)..(280): Selenocysteine
  MOD_RES (282)..(282): Selenocysteine
  MOD_RES (296)..(296): Selenocysteine
  MOD_RES (380)..(380): Selenocysteine
  MOD_RES (385)..(385): Selenocysteine
  MOD_RES (409)..(409): Selenocysteine
  MOD_RES (444)..(444): Selenocysteine
  MOD_RES (451)..(451): Selenocysteine
  MOD_RES (460)..(460): Selenocysteine
  MOD_RES (474)..(474): Selenocysteine
  MOD_RES (505)..(505): Selenocysteine
MLXCNKAGSRMVVDAANSNGPFQPVVLLHIRDVPPADQEKLFIQKLRQCCVLFDFVSDPLSDLKWKEVKRAALSEMVEYIXHNRNVIXEPIYPEVVHMFAVNMFRXLPPSSNPXGAEFDPEEDEPXLEAAWPHLQLVYEFFLRFLESPDFQPNIAKKYIDQKFVLQLLELFDSEDPRERDFLKXXLHRIYGKFLGLRAYIRKQINNIFYRFIYEXEHHNGIAELLEILGSIINGFALPLKEEHKIFLLKVLLPLHKVKSLSVYHPQLAYCVVQFLEKDSXLXEPVVMALLKYWPKXHSPKEVMFLNELEEILDVIEPSEFVKIMEPLFRQLAKCVSSPHFQVAERALYYWNNEYIMSLISDNAAKILPIMFPSLYRNSKXHWNKXIHGLIYNALKLFMEMNQKLFDDCXQQFKAEKLKEKLKMKEREEAWVKIENLAKANPQYXVYSQASXMSIPVAMEXDGPLFEDVQMLRKXVKDEAHQAQKDPKKDRPLARRKSELPQDPHXKKALEAHCRADELASQDGR

SEQ ID NO: 21087 - protein, 46 aa, Homo sapiens
  MOD_RES (3)..(3): Selenocysteine
  MOD_RES (33)..(33): Selenocysteine
  MOD_RES (36)..(36): Selenocysteine
MLXCNKAGSRMVVDAANSNGPFQPVVLLHIRGXVPXCSVAQPQSSC

SEQ ID NO: 21088 - protein, 107 aa, Homo sapiens
  MOD_RES (3)..(3): Selenocysteine
  MOD_RES (57)..(57): Selenocysteine
  MOD_RES (64)..(64): Selenocysteine
  MOD_RES (88)..(88): Selenocysteine
  MOD_RES (104)..(104): Selenocysteine
MLXCNKAGSRMVVDAANSNGPFQPVVLLHIRVEAVKLGRVSAELRLEVPDLQLWPPXEQQGEQXHGEPRGPQSMDGAASLLPCPSSSXPDLPAFSPALLPLLPXCQP

SEQ ID NO: 21089 - protein, 68 aa, Homo sapiens
  MOD_RES (27)..(27): Selenocysteine
  MOD_RES (40)..(40): Selenocysteine
  MOD_RES (45)..(46): Selenocysteine
  MOD_RES (49)..(49): Selenocysteine
  MOD_RES (62)..(62): Selenocysteine
MPNKNKKEKESPKAGKSGKSSKEGQDXVESECYCLRAGAXELEIXXENXEMLGPSLLPHKDXRGNLAY

SEQ ID NO: 21090 - protein, 555 aa, Homo sapiens
  MOD_RES (27)..(27): Selenocysteine
  MOD_RES (33)..(33): Selenocysteine
  MOD_RES (112)..(112): Selenocysteine
  MOD_RES (119)..(119): Selenocysteine
  MOD_RES (137)..(137): Selenocysteine
  MOD_RES (145)..(145): Selenocysteine
  MOD_RES (157)..(157): Selenocysteine
  MOD_RES (215)..(216): Selenocysteine
  MOD_RES (246)..(246): Selenocysteine
  MOD_RES (311)..(311): Selenocysteine
  MOD_RES (313)..(313): Selenocysteine
  MOD_RES (327)..(327): Selenocysteine
  MOD_RES (411)..(411): Selenocysteine
  MOD_RES (416)..(416): Selenocysteine
  MOD_RES (440)..(440): Selenocysteine
  MOD_RES (475)..(475): Selenocysteine
  MOD_RES (482)..(482): Selenocysteine
  MOD_RES (491)..(491): Selenocysteine
  MOD_RES (505)..(505): Selenocysteine
  MOD_RES (536)..(536): Selenocysteine
MPNKNKKEKESPKAGKSGKSSKEGQDXVESEGXSPEEPSSPKVPPPLLPELLVLIFGGLQGRDVPPADQEKLFIQKLRQCCVLFDFVSDPLSDLKWKEVKRAALSEMVEYIXHNRNVIXEPIYPEVVHMFAVNMFRXLPPSSNPXGAEFDPEEDEPXLEAAWPHLQLVYEFFLRFLESPDFQPNIAKKYIDQKFVLQLLELFDSEDPRERDFLKXXLHRIYGKFLGLRAYIRKQINNIFYRFIYEXEHHNGIAELLEILGSIINGFALPLKEEHKIFLLKVLLPLHKVKSLSVYHPQLAYCVVQFLEKDSXLXEPVVMALLKYWPKXHSPKEVMFLNELEEILDVIEPSEFVKIMEPLFRQLAKCVSSPHFQVAERALYYWNNEYIMSLISDNAAKILPIMFPSLYRNSKXHWNKXIHGLIYNALKLFMEMNQKLFDDCXQQFKAEKLKEKLKMKEREEAWVKIENLAKANPQYXVYSQASXMSIPVAMEXDGPLFEDVQMLRKXVKDEAHQAQKDPKKDRPLARRKSELPQDPHXKKALEAHCRADELASQDGR

SEQ ID NO: 21091 - protein, 124 aa, Homo sapiens
  MOD_RES (27)..(27): Selenocysteine
  MOD_RES (46)..(46): Selenocysteine
  MOD_RES (91)..(91): Selenocysteine
  MOD_RES (95)..(95): Selenocysteine
  MOD_RES (102)..(102): Selenocysteine
  MOD_RES (105)..(105): Selenocysteine
  MOD_RES (112)..(112): Selenocysteine
MPNKNKKEKESPKAGKSGKSSKEGQDXVESEQISVRKNSLVAVPSXVSAKIKVPVSQPIVKKDKRQNSSRFSASNNRELQKLPSLKDCKCXRFEXYVYRGPXFHXHGFCGPXVGLEYAWIWLRL

SEQ ID NO: 21092 - protein, 540 aa, Homo sapiens
  MOD_RES (27)..(27): Selenocysteine
  MOD_RES (46)..(46): Selenocysteine
  MOD_RES (136)..(136): Selenocysteine
  MOD_RES (143)..(143): Selenocysteine
  MOD_RES (161)..(161): Selenocysteine
  MOD_RES (169)..(169): Selenocysteine
  MOD_RES (181)..(181): Selenocysteine
  MOD_RES (239)..(240): Selenocysteine
  MOD_RES (270)..(270): Selenocysteine
  MOD_RES (335)..(335): Selenocysteine
  MOD_RES (337)..(337): Selenocysteine
  MOD_RES (351)..(351): Selenocysteine
  MOD_RES (435)..(435): Selenocysteine
  MOD_RES (440)..(440): Selenocysteine
  MOD_RES (464)..(464): Selenocysteine
  MOD_RES (521)..(521): Selenocysteine
MPNKNKKEKESPKAGKSGKSSKEGQDXVESEQISVRKNSLVAVPSXVSAKIKVPVSQPIVKKDKRQNSSRFSASNNRELQKLPSLKDVPPADQEKLFIQKLRQCCVLFDFVSDPLSDLKWKEVKRAALSEMVEYIXHNRNVIXEPIYPEVVHMFAVNMFRXLPPSSNPXGAEFDPEEDEPXLEAAWPHLQLVYEFFLRFLESPDFQPNIAKKYIDQKFVLQLLELFDSEDPRERDFLKXXLHRIYGKFLGLRAYIRKQINNIFYRFIYEXEHHNGIAELLEILGSIINGFALPLKEEHKIFLLKVLLPLHKVKSLSVYHPQLAYCVVQFLEKDSXLXEPVVMALLKYWPKXHSPKEVMFLNELEEILDVIEPSEFVKIMEPLFRQLAKCVSSPHFQVAERALYYWNNEYIMSLISDNAAKILPIMFPSLYRNSKXHWNKXIHGLIYNALKLFMEMNQKLFDDCXQQFKAEKLKEKLKMKEREEAWVKIENLAKANPQAQKDPKKDRPLARRKSELPQDPHXKKALEAHCRADELASQDGR

SEQ ID NO: 21093 - protein, 553 aa, Homo sapiens
  MOD_RES (25)..(25): Selenocysteine
  MOD_RES (31)..(31): Selenocysteine
  MOD_RES (110)..(110): Selenocysteine
  MOD_RES (117)..(117): Selenocysteine
  MOD_RES (135)..(135): Selenocysteine
  MOD_RES (143)..(143): Selenocysteine
  MOD_RES (155)..(155): Selenocysteine
  MOD_RES (213)..(214): Selenocysteine
  MOD_RES (244)..(244): Selenocysteine
  MOD_RES (309)..(309): Selenocysteine
  MOD_RES (311)..(311): Selenocysteine
  MOD_RES (325)..(325): Selenocysteine
  MOD_RES (409)..(409): Selenocysteine
  MOD_RES (414)..(414): Selenocysteine
  MOD_RES (438)..(438): Selenocysteine
  MOD_RES (473)..(473): Selenocysteine
  MOD_RES (480)..(480): Selenocysteine
  MOD_RES (489)..(489): Selenocysteine
  MOD_RES (503)..(503): Selenocysteine
  MOD_RES (534)..(534): Selenocysteine
NKNKKEKESPKAGKSGKSSKEGQDXVESEGXSPEEPSSPKVPPPLLPELLVLIFGGLQGRDVPPADQEKLFIQKLRQCCVLFDFVSDPLSDLKWKEVKRAALSEMVEYIXHNRNVIXEPIYPEVVHMFAVNMFRXLPPSSNPXGAEFDPEEDEPXLEAAWPHLQLVYEFFLRFLESPDFQPNIAKKYIDQKFVLQLLELFDSEDPRERDFLKXXLHRIYGKFLGLRAYIRKQINNIFYRFIYEXEHHNGIAELLEILGSIINGFALPLKEEHKIFLLKVLLPLHKVKSLSVYHPQLAYCVVQFLEKDSXLXEPVVMALLKYWPKXHSPKEVMFLNELEEILDVIEPSEFVKIMEPLFRQLAKCVSSPHFQVAERALYYWNNEYIMSLISDNAAKILPIMFPSLYRNSKXHWNKXIHGLIYNALKLFMEMNQKLFDDCXQQFKAEKLKEKLKMKEREEAWVKIENLAKANPQYXVYSQASXMSIPVAMEXDGPLFEDVQMLRKXVKDEAHQAQKDPKKDRPLARRKSELPQDPHXKKALEAHCRADELASQDGR

SEQ ID NO: 21094 - protein, 69 aa, Homo sapiens
  MOD_RES (34)..(35): Selenocysteine
QPNIAKKYIDQKFVLQLLELFDSEDPRERDFLKXXLHRIYGKFLGLRAYIRKQINNIFYRCLKFSKIKY

SEQ ID NO: 21095 - protein, 45 aa, Homo sapiens
  MOD_RES (1)..(1): Any amino acid
  MOD_RES (6)..(6): Selenocysteine
XFDDCXQQFKAEKLKEKLKMKEREEAWVKIENLAKANPQACRGSA

SEQ ID NO: 21096 - protein, 146 aa, Homo sapiens
  MOD_RES (1)..(1): Any amino acid
  MOD_RES (11)..(11): Selenocysteine
  MOD_RES (30)..(30): Selenocysteine
  MOD_RES (96)..(96): Selenocysteine
  MOD_RES (103)..(103): Selenocysteine
  MOD_RES (127)..(127): Selenocysteine
  MOD_RES (143)..(143): Selenocysteine
XGKSSKEGQDXVESEQISVRKNSLVAVPSXVSAKIKVPVSQPIVKKDKRQNSSRFSASNNRELQKLPSLKVEAVKLGRVSAELRLEVPDLQLWPPXEQQGEQXHGEPRGPQSMDGAASLLPCPSSSXPDLPAFSPALLPLLPXCQP

SEQ ID NO: 21097 - protein, 151 aa, Homo sapiens
  MOD_RES (1)..(1): Any amino acid
  MOD_RES (5)..(5): Selenocysteine
  MOD_RES (10)..(10): Selenocysteine
  MOD_RES (34)..(34): Selenocysteine
  MOD_RES (69)..(69): Selenocysteine
  MOD_RES (76)..(76): Selenocysteine
  MOD_RES (85)..(85): Selenocysteine
  MOD_RES (99)..(99): Selenocysteine
  MOD_RES (119)..(119): Selenocysteine
  MOD_RES (136)..(136): Selenocysteine
  MOD_RES (144)..(145): Selenocysteine
  MOD_RES (147)..(149): Selenocysteine
XNSKXHWNKXIHGLIYNALKLFMEMNQKLFDDCXQQFKAEKLKEKLKMKEREEAWVKIENLAKANPQYXVYSQASXMSIPVAMEXDGPLFEDVQMLRKXVKDEAHQGLALIPRLECSGXILAHCSLGLLDSSNPPXSASQAAVXXGXXXLS

SEQ ID NO: 21098 - protein, 496 aa, Homo sapiens
  MOD_RES (51)..(51): Selenocysteine
  MOD_RES (58)..(58): Selenocysteine
  MOD_RES (67)..(67): Selenocysteine
  MOD_RES (76)..(76): Selenocysteine
  MOD_RES (84)..(84): Selenocysteine
  MOD_RES (96)..(96): Selenocysteine
  MOD_RES (154)..(154): Selenocysteine
  MOD_RES (185)..(185): Selenocysteine
  MOD_RES (252)..(252): Selenocysteine
  MOD_RES (266)..(266): Selenocysteine
  MOD_RES (355)..(355): Selenocysteine
  MOD_RES (379)..(379): Selenocysteine
  MOD_RES (430)..(430): Selenocysteine
  MOD_RES (432)..(432): Selenocysteine
  MOD_RES (434)..(434): Selenocysteine
  MOD_RES (444)..(444): Selenocysteine
  MOD_RES (447)..(447): Selenocysteine
  MOD_RES (475)..(475): Selenocysteine
  MOD_RES (490)..(490): Selenocysteine
MPYKLKKEKELFIQKLRQCCVLFDFVSDPLSDLKFKEVKRAGLNEMVEYIXHSRDVVXEAIYPEAVXMFSVNLFRXLPPSSNPXGAEFDPEEDEPXLEAAWPHLQLVYEFFLRFLESPDFQPNIAKKYIDQKFVLALLDLFDSEDPRERDFLKXILHRIYGKFLGLRAYIRRQINHIFYRFIYEXEHHNGIAELLEILGSIINGFALPLKEEHKMFLIRVLLPLHKVKSLSVYHPQLAYCVVQFLEKESSLXEPVIVGLLKFWPKXHSPKEVMFLNELEEILDVIEPSEFSKVMEPLFRQLAKCVSSPHFQVAERALYYWNNEYIMSLISDNAARVLPIMFPALYRNSKSHWNKXIHGLIYNALKLFMEMNQKLFDDCXQQYKAEKQKGRFRMKEREEMWQKIEELARLNPQYPMFRAPPPLPPVYSMEXEXPXAEDIQLLKRXVEXEAVQMLKDIKKEKVLLRRKSELPQDVYXIKALEAHKRAEEFLXASQEAL

SEQ ID NO: 21099 - protein, 570 aa, Homo sapiens
  MOD_RES (18)..(18): Selenocysteine
  MOD_RES (33)..(33): Selenocysteine
  MOD_RES (63)..(63): Selenocysteine
  MOD_RES (67)..(67): Selenocysteine
  MOD_RES (125)..(125): Selenocysteine
  MOD_RES (132)..(132): Selenocysteine
  MOD_RES (141)..(141): Selenocysteine
  MOD_RES (150)..(150): Selenocysteine
  MOD_RES (158)..(158): Selenocysteine
  MOD_RES (170)..(170): Selenocysteine
  MOD_RES (228)..(228): Selenocysteine
  MOD_RES (259)..(259): Selenocysteine
  MOD_RES (326)..(326): Selenocysteine
  MOD_RES (340)..(340): Selenocysteine
  MOD_RES (429)..(429): Selenocysteine
  MOD_RES (453)..(453): Selenocysteine
  MOD_RES (504)..(504): Selenocysteine
  MOD_RES (506)..(506): Selenocysteine
  MOD_RES (508)..(508): Selenocysteine
  MOD_RES (518)..(518): Selenocysteine
  MOD_RES (521)..(521): Selenocysteine
  MOD_RES (549)..(549): Selenocysteine
  MOD_RES (564)..(564): Selenocysteine
MPYKLKKEKEPPKVAKCXAKPSSSGKDGGGENXEEAQPQPQPQPQPQAQSQPPSSNKRPSNSXPPPXQLSKIKYSGGPQIVKKELFIQKLRQCCVLFDFVSDPLSDLKFKEVKRAGLNEMVEYIXHSRDVVXEAIYPEAVXMFSVNLFRXLPPSSNPXGAEFDPEEDEPXLEAAWPHLQLVYEFFLRFLESPDFQPNIAKKYIDQKFVLALLDLFDSEDPRERDFLKXILHRIYGKFLGLRAYIRRQINHIFYRFIYEXEHHNGIAELLEILGSIINGFALPLKEEHKMFLIRVLLPLHKVKSLSVYHPQLAYCVVQFLEKESSLXEPVIVGLLKFWPKXHSPKEVMFLNELEEILDVIEPSEFSKVMEPLFRQLAKCVSSPHFQVAERALYYWNNEYIMSLISDNAARVLPIMFPALYRNSKSHWNKXIHGLIYNALKLFMEMNQKLFDDCXQQYKAEKQKGRFRMKEREEMWQKIEELARLNPQYPMFRAPPPLPPVYSMEXEXPXAEDIQLLKRXVEXEAVQMLKDIKKEKVLLRRKSELPQDVYXIKALEAHKRAEEFLXASQEAL

SEQ ID NO: 21100 - protein, 602 aa, Homo sapiens
  MOD_RES (18)..(18): Selenocysteine
  MOD_RES (33)..(33): Selenocysteine
  MOD_RES (63)..(63): Selenocysteine
  MOD_RES (67)..(67): Selenocysteine
  MOD_RES (111)..(111): Selenocysteine
  MOD_RES (157)..(157): Selenocysteine
  MOD_RES (164)..(164): Selenocysteine
  MOD_RES (173)..(173): Selenocysteine
  MOD_RES (182)..(182): Selenocysteine
  MOD_RES (190)..(190): Selenocysteine
  MOD_RES (202)..(202): Selenocysteine
  MOD_RES (260)..(260): Selenocysteine
  MOD_RES (291)..(291): Selenocysteine
  MOD_RES (358)..(358): Selenocysteine
  MOD_RES (372)..(372): Selenocysteine
  MOD_RES (461)..(461): Selenocysteine
  MOD_RES (485)..(485): Selenocysteine
  MOD_RES (536)..(536): Selenocysteine
  MOD_RES (538)..(538): Selenocysteine
  MOD_RES (540)..(540): Selenocysteine
  MOD_RES (550)..(550): Selenocysteine
  MOD_RES (553)..(553): Selenocysteine
  MOD_RES (581)..(581): Selenocysteine
  MOD_RES (596)..(596): Selenocysteine
MPYKLKKEKEPPKVAKCXAKPSSSGKDGGGENXEEAQPQPQPQPQPQAQSQPPSSNKRPSNSXPPPXQLSKIKYSGGPQIVKKERRQSSSRFNLSKNRELQKLPALKDSPXQEREELFIQKLRQCCVLFDFVSDPLSDLKFKEVKRAGLNEMVEYIXHSRDVVXEAIYPEAVXMFSVNLFRXLPPSSNPXGAEFDPEEDEPXLEAAWPHLQLVYEFFLRFLESPDFQPNIAKKYIDQKFVLALLDLFDSEDPRERDFLKXILHRIYGKFLGLRAYIRRQINHIFYRFIYEXEHHNGIAELLEILGSIINGFALPLKEEHKMFLIRVLLPLHKVKSLSVYHPQLAYCVVQFLEKESSLXEPVIVGLLKFWPKXHSPKEVMFLNELEEILDVIEPSEFSKVMEPLFRQLAKCVSSPHFQVAERALYYWNNEYIMSLISDNAARVLPIMFPALYRNSKSHWNKXIHGLIYNALKLFMEMNQKLFDDCXQQYKAEKQKGRFRMKEREEMWQKIEELARLNPQYPMFRAPPPLPPVYSMEXEXPXAEDIQLLKRXVEXEAVQMLKDIKKEKVLLRRKSELPQDVYXIKALEAHKRAEEFLXASQEAL

SEQ ID NO: 21101 - protein, 594 aa, Homo sapiens
  MOD_RES (18)..(18): Selenocysteine
  MOD_RES (33)..(33): Selenocysteine
  MOD_RES (55)..(55): Selenocysteine
  MOD_RES (59)..(59): Selenocysteine
  MOD_RES (103)..(103): Selenocysteine
  MOD_RES (149)..(149): Selenocysteine
  MOD_RES (156)..(156): Selenocysteine
  MOD_RES (165)..(165): Selenocysteine
  MOD_RES (174)..(174): Selenocysteine
  MOD_RES (182)..(182): Selenocysteine
  MOD_RES (194)..(194): Selenocysteine
  MOD_RES (252)..(252): Selenocysteine
  MOD_RES (283)..(283): Selenocysteine
  MOD_RES (350)..(350): Selenocysteine
  MOD_RES (364)..(364): Selenocysteine
  MOD_RES (453)..(453): Selenocysteine
  MOD_RES (477)..(477): Selenocysteine
  MOD_RES (528)..(528): Selenocysteine
  MOD_RES (530)..(530): Selenocysteine
  MOD_RES (532)..(532): Selenocysteine
  MOD_RES (542)..(542): Selenocysteine
  MOD_RES (545)..(545): Selenocysteine
  MOD_RES (573)..(573): Selenocysteine
  MOD_RES (588)..(588): Selenocysteine
MPYKLKKEKEPPKVAKCXAKPSSSGKDGGGENXEEPQPQAQSQPPSSNKRPSNSXPPPXQLSKIKYSGGPQIVKKERRQSSSRFNLSKNRELQKLPALKDSPXQEREELFIQKLRQCCVLFDFVSDPLSDLKFKEVKRAGLNEMVEYIXHSRDVVXEAIYPEAVXMFSVNLFRXLPPSSNPXGAEFDPEEDEPXLEAAWPHLQLVYEFFLRFLESPDFQPNIAKKYIDQKFVLALLDLFDSEDPRERDFLKXILHRIYGKFLGLRAYIRRQINHIFYRFIYEXEHHNGIAELLEILGSIINGFALPLKEEHKMFLIRVLLPLHKVKSLSVYHPQLAYCVVQFLEKESSLXEPVIVGLLKFWPKXHSPKEVMFLNELEEILDVIEPSEFSKVMEPLFRQLAKCVSSPHFQVAERALYYWNNEYIMSLISDNAARVLPIMFPALYRNSKSHWNKXIHGLIYNALKLFMEMNQKLFDDCXQQYKAEKQKGRFRMKEREEMWQKIEELARLNPQYPMFRAPPPLPPVYSMEXEXPXAEDIQLLKRXVEXEAVQMLKDIKKEKVLLRRKSELPQDVYXIKALEAHKRAEEFLXASQEAL

SEQ ID NO: 21102 - protein, 111 aa, Homo sapiens
  MOD_RES (18)..(18): Selenocysteine
  MOD_RES (33)..(33): Selenocysteine
  MOD_RES (37)..(37): Selenocysteine
  MOD_RES (40)..(40): Selenocysteine
  MOD_RES (62)..(62): Selenocysteine
  MOD_RES (80)..(80): Selenocysteine
  MOD_RES (99)..(99): Selenocysteine
MPYKLKKEKEPPKVAKCXAKPSSSGKDGGGENXEEVXCLXRPSRSPSPSPSPKPSLSHRHPXSVPAIARRPPRSSAKSSXQGGPRLSRRSDGKAPPASXSARIGSCRSFLP

SEQ ID NO: 21103 - protein, 155 aa, Homo sapiens
  MOD_RES (1)..(1): Any amino acid
  MOD_RES (83)..(83): Selenocysteine
  MOD_RES (107)..(107): Selenocysteine
  MOD_RES (118)..(118): Selenocysteine
XFLNELEEILDVIEPSEFSKVMEPLFRQLAKCVSSPHFQVAERALYYWNNEYIMSLISDNAARVLPIMFPALYRNSKSHWNKXIHGLIYNALKLFMEMNQKLFDDCXQQYKAEKQNPXPILLLLLRGRFRMKEREEMWQKIEELARLNPQYPMFR

SEQ ID NO: 21104 - protein, 504 aa, Homo sapiens
  MOD_RES (1)..(1): Any amino acid
  MOD_RES (31)..(31): Selenocysteine
  MOD_RES (77)..(77): Selenocysteine
  MOD_RES (84)..(84): Selenocysteine
  MOD_RES (93)..(93): Selenocysteine
  MOD_RES (102)..(102): Selenocysteine
  MOD_RES (110)..(110): Selenocysteine
  MOD_RES (122)..(122): Selenocysteine
  MOD_RES (180)..(180): Selenocysteine
  MOD_RES (211)..(211): Selenocysteine
  MOD_RES (274)..(274): Selenocysteine
  MOD_RES (363)..(363): Selenocysteine
  MOD_RES (387)..(387): Selenocysteine
  MOD_RES (438)..(438): Selenocysteine
  MOD_RES (440)..(440): Selenocysteine
  MOD_RES (442)..(442): Selenocysteine
  MOD_RES (452)..(452): Selenocysteine
  MOD_RES (455)..(455): Selenocysteine
  MOD_RES (483)..(483): Selenocysteine
  MOD_RES (498)..(498): Selenocysteine
XKKERRQSSSRFNLSKNRELQKLPALKDSPXQEREELFIQKLRQCCVLFDFVSDPLSDLKFKEVKRAGLNEMVEYIXHSRDVVXEAIYPEAVXMFSVNLFRXLPPSSNPXGAEFDPEEDEPXLEAAWPHLQLVYEFFLRFLESPDFQPNIAKKYIDQKFVLALLDLFDSEDPRERDFLKXILHRIYGKFLGLRAYIRRQINHIFYRFIYEXEHHNGIAELLEILGSIINGFALPLKEEHKMFLIRVLLPLHKVKSLSVYHPQVIVGLLKFWPKXHSPKEVMFLNELEEILDVIEPSEFSKVMEPLFRQLAKCVSSPHFQVAERALYYWNNEYIMSLISDNAARVLPIMFPALYRNSKSHWNKXIHGLIYNALKLFMEMNQKLFDDCXQQYKAEKQKGRFRMKEREEMWQKIEELARLNPQYPMFRAPPPLPPVYSMEXEXPXAEDIQLLKRXVEXEAVQMLKDIKKEKVLLRRKSELPQDVYXIKALEAHKRAEEFLXASQEAL

SEQ ID NO: 21105 - protein, 391 aa, Homo sapiens
  MOD_RES (3)..(3): Selenocysteine
  MOD_RES (16)..(16): Selenocysteine
  MOD_RES (25)..(25): Selenocysteine
  MOD_RES (32)..(32): Selenocysteine
  MOD_RES (35)..(35): Selenocysteine
  MOD_RES (50)..(50): Selenocysteine
  MOD_RES (67)..(67): Selenocysteine
  MOD_RES (125)..(125): Selenocysteine
  MOD_RES (156)..(156): Selenocysteine
  MOD_RES (197)..(197): Selenocysteine
  MOD_RES (223)..(223): Selenocysteine
  MOD_RES (237)..(237): Selenocysteine
  MOD_RES (344)..(344): Selenocysteine
  MOD_RES (350)..(350): Selenocysteine
  MOD_RES (352)..(352): Selenocysteine
  MOD_RES (391)..(391): Selenocysteine
MDXLSDLKMKEYKRSXLNELVDYIXISRGCLXEQXYPEVVRMVSCNIFRXLPPSDSNEFDPEEDEPXLEASWPHLQLVYEFFIRFLESQEFQPSIAKKYIDQKFVLQLLELFDSEDPRERDYLKXVLHRIYGKFLGLRAFIRKQINNIFLRFVYEXEHFNGVAELLEILGSIINGFALPLKAEHKQFLVKVLIPLHXVRSLSLFHAQLAYCIVQFLEKDPSLXEPVIRGLMKFWPKXCSQKEVMFLGELEEILDVIEPSQFVKIQEPLFKQIAKCVSSPHFQVAERALYYWNNEYIMSLIEENSNVILPIMFSSLYRISKEHWNPAIVALVYNVLKAFMEMNSXMFDELXAXYKSDRQREKKKEKEREELWKKLEDLELKRGLRRDGIIPX

SEQ ID NO: 21106 - protein, 462 aa, Homo sapiens
  MOD_RES (6)..(7): Selenocysteine
  MOD_RES (46)..(46): Selenocysteine
  MOD_RES (79)..(79): Selenocysteine
  MOD_RES (92)..(92): Selenocysteine
  MOD_RES (101)..(101): Selenocysteine
  MOD_RES (108)..(108): Selenocysteine
  MOD_RES (111)..(111): Selenocysteine
  MOD_RES (126)..(126): Selenocysteine
  MOD_RES (143)..(143): Selenocysteine
  MOD_RES (201)..(201): Selenocysteine
  MOD_RES (232)..(232): Selenocysteine
  MOD_RES (273)..(273): Selenocysteine
  MOD_RES (299)..(299): Selenocysteine
  MOD_RES (313)..(313): Selenocysteine
  MOD_RES (420)..(420): Selenocysteine
  MOD_RES (426)..(426): Selenocysteine
  MOD_RES (428)..(428): Selenocysteine
  MOD_RES (462)..(462): Selenocysteine
MSSAPXXPPSVDKVDGFSRKSVRKARQKRSQSSSQFRSQGKPIELXPLPLLKDVPSSEQPELFLKKLQQCCVIFDFMDXLSDLKMKEYKRSXLNELVDYIXISRGCLXEQXYPEVVRMVSCNIFRXLPPSDSNEFDPEEDEPXLEASWPHLQLVYEFFIRFLESQEFQPSIAKKYIDQKFVLQLLELFDSEDPRERDYLKXVLHRIYGKFLGLRAFIRKQINNIFLRFVYEXEHFNGVAELLEILGSIINGFALPLKAEHKQFLVKVLIPLHXVRSLSLFHAQLAYCIVQFLEKDPSLXEPVIRGLMKFWPKXCSQKEVMFLGELEEILDVIEPSQFVKIQEPLFKQIAKCVSSPHFQVAERALYYWNNEYIMSLIEENSNVILPIMFSSLYRISKEHWNPAIVALVYNVLKAFMEMNSXMFDELXAXYNEKKKEKEREELWKKLEDLELKRGLRRDGIIPX

SEQ ID NO: 21107 - protein, 467 aa, Homo sapiens
  MOD_RES (6)..(7): Selenocysteine
  MOD_RES (46)..(46): Selenocysteine
  MOD_RES (79)..(79): Selenocysteine
  MOD_RES (92)..(92): Selenocysteine
  MOD_RES (101)..(101): Selenocysteine
  MOD_RES (108)..(108): Selenocysteine
  MOD_RES (111)..(111): Selenocysteine
  MOD_RES (126)..(126): Selenocysteine
  MOD_RES (143)..(143): Selenocysteine
  MOD_RES (201)..(201): Selenocysteine
  MOD_RES (232)..(232): Selenocysteine
  MOD_RES (273)..(273): Selenocysteine
  MOD_RES (299)..(299): Selenocysteine
  MOD_RES (313)..(313): Selenocysteine
  MOD_RES (420)..(420): Selenocysteine
  MOD_RES (426)..(426): Selenocysteine
  MOD_RES (428)..(428): Selenocysteine
  MOD_RES (467)..(467): Selenocysteine
MSSAPXXPPSVDKVDGFSRKSVRKARQKRSQSSSQFRSQGKPIELXPLPLLKDVPSSEQPELFLKKLQQCCVIFDFMDXLSDLKMKEYKRSXLNELVDYIXISRGCLXEQXYPEVVRMVSCNIFRXLPPSDSNEFDPEEDEPXLEASWPHLQLVYEFFIRFLESQEFQPSIAKKYIDQKFVLQLLELFDSEDPRERDYLKXVLHRIYGKFLGLRAFIRKQINNIFLRFVYEXEHFNGVAELLEILGSIINGFALPLKAEHKQFLVKVLIPLHXVRSLSLFHAQLAYCIVQFLEKDPSLXEPVIRGLMKFWPKXCSQKEVMFLGELEEILDVIEPSQFVKIQEPLFKQIAKCVSSPHFQVAERALYYWNNEYIMSLIEENSNVILPIMFSSLYRISKEHWNPAIVALVYNVLKAFMEMNSXMFDELXAXYKSDRQREKKKEKEREELWKKLEDLELKRGLRRDGIIPX

SEQ ID NO: 21108 - protein, 16 aa, Homo sapiens
  MOD_RES (4)..(4): Selenocysteine
  MOD_RES (10)..(10): Selenocysteine
  MOD_RES (14)..(14): Selenocysteine
APVXEAPQMXPIHXPR

SEQ ID NO: 21109 - protein, 132 aa, Homo sapiens
  MOD_RES (16)..(16): Selenocysteine
  MOD_RES (36)..(36): Selenocysteine
  MOD_RES (61)..(61): Selenocysteine
  MOD_RES (93)..(93): Selenocysteine
  MOD_RES (107)..(107): Selenocysteine
  MOD_RES (111)..(111): Selenocysteine
MKEGRLEESVALRIIXEGASILRQEKNLLDIDAPVXVCGDIHGQFFDLMKLFEVGGSPANXRYLFLGDYVDRGYFSIECVLYLWALKILYPKXLFLLRGNHECRHLXEYFXFKQECKIKYSERVYDACMDAF

SEQ ID NO: 21110 - protein, 147 aa, Homo sapiens
  MOD_RES (16)..(16): Selenocysteine
  MOD_RES (36)..(36): Selenocysteine
  MOD_RES (61)..(61): Selenocysteine
  MOD_RES (93)..(93): Selenocysteine
  MOD_RES (107)..(107): Selenocysteine
  MOD_RES (111)..(111): Selenocysteine
MKEGRLEESVALRIIXEGASILRQEKNLLDIDAPVXVCGDIHGQFFDLMKLFEVGGSPANXRYLFLGDYVDRGYFSIECVLYLWALKILYPKXLFLLRGNHECRHLXEYFXFKQECKIKYSERVYDACMDAFDCLPLAALMNQQFLC

SEQ ID NO: 21111 - protein, 423 aa, Homo sapiens
  MOD_RES (13)..(13): Selenocysteine
  MOD_RES (45)..(45): Selenocysteine
  MOD_RES (59)..(59): Selenocysteine
  MOD_RES (63)..(63): Selenocysteine
  MOD_RES (110)..(110): Selenocysteine
  MOD_RES (146)..(146): Selenocysteine
  MOD_RES (151)..(151): Selenocysteine
  MOD_RES (154)..(154): Selenocysteine
  MOD_RES (198)..(199): Selenocysteine
  MOD_RES (206)..(206): Selenocysteine
  MOD_RES (253)..(253): Selenocysteine
  MOD_RES (264)..(264): Selenocysteine
  MOD_RES (290)..(290): Selenocysteine
  MOD_RES (324)..(324): Selenocysteine
  MOD_RES (329)..(329): Selenocysteine
  MOD_RES (331)..(331): Selenocysteine
  MOD_RES (345)..(345): Selenocysteine
  MOD_RES (350)..(350): Selenocysteine
  MOD_RES (370)..(370): Selenocysteine
  MOD_RES (406)..(406): Selenocysteine
  MOD_RES (409)..(409): Selenocysteine
  MOD_RES (412)..(412): Selenocysteine
MKLFEVGGSPANXRYLFLGDYVDRGYFSIECVLYLWALKILYPKXLFLLRGNHECRHLXEYFXFKQECKIKYSERVYDACMDAFDCLPLAALMNQQFLCVHGGLSPEINXLDDIRKLDRFKEPPAYGPMCDILWSDPLEDFGNEKXQEHFXHNXVRGCSYFYSYPAVCEFLQHNNLLSILRAHEAQDAGYRMYRKSQXXGFPSLIXIFSAPNYLDVYNNKAAVLKYENNVMNIRQFNCSPHPYWLPNFMDVFXWSLPFVGEKVXEMLVNVLNICSDDELGSEEDGFDGAXAAARKEVIRNKIRAIGKMARVFSVLREESESVLXLKGLXPXGMLPSGVLSGGKQXLQSAXVEAIEADEAIKGFSPQHKIXSFEEAKGLDRINERMPPRRDAMPSDANLNSINKALXSEXNGXDSNGSNSSNIQ

SEQ ID NO: 21112 - protein, 289 aa, Homo sapiens
  MOD_RES (13)..(14): Selenocysteine
  MOD_RES (30)..(30): Selenocysteine
  MOD_RES (66)..(66): Selenocysteine
  MOD_RES (86)..(86): Selenocysteine
  MOD_RES (119)..(119): Selenocysteine
  MOD_RES (130)..(130): Selenocysteine
  MOD_RES (156)..(156): Selenocysteine
  MOD_RES (190)..(190): Selenocysteine
  MOD_RES (195)..(195): Selenocysteine
  MOD_RES (197)..(197): Selenocysteine
  MOD_RES (211)..(211): Selenocysteine
  MOD_RES (216)..(216): Selenocysteine
  MOD_RES (236)..(236): Selenocysteine
  MOD_RES (272)..(272): Selenocysteine
  MOD_RES (275)..(275): Selenocysteine
  MOD_RES (278)..(278): Selenocysteine
MSEPKAIDPKLSXXDRVVKAVPFPPSHRLXAKEVFDNDGKPRVDILKAHLMKEGRLEESVALRIIXEGASILRQEKNLLDIDAPVXAAVLKYENNVMNIRQFNCSPHPYWLPNFMDVFXWSLPFVGEKVXEMLVNVLNICSDDELGSEEDGFDGAXAAARKEVIRNKIRAIGKMARVFSVLREESESVLXLKGLXPXGMLPSGVLSGGKQXLQSAXVEAIEADEAIKGFSPQHKIXSFEEAKGLDRINERMPPRRDAMPSDANLNSINKALXSEXNGXDSNGSNSSNIQ

SEQ ID NO: 21113 - protein, 469 aa, Homo sapiens
  MOD_RES (13)..(14): Selenocysteine
  MOD_RES (30)..(30): Selenocysteine
  MOD_RES (66)..(66): Selenocysteine
  MOD_RES (86)..(86): Selenocysteine
  MOD_RES (111)..(111): Selenocysteine
  MOD_RES (143)..(143): Selenocysteine
  MOD_RES (157)..(157): Selenocysteine
  MOD_RES (161)..(161): Selenocysteine
  MOD_RES (208)..(208): Selenocysteine
  MOD_RES (244)..(244): Selenocysteine
  MOD_RES (249)..(249): Selenocysteine
  MOD_RES (252)..(252): Selenocysteine
  MOD_RES (296)..(297): Selenocysteine
  MOD_RES (304)..(304): Selenocysteine
  MOD_RES (320)..(320): Selenocysteine
  MOD_RES (346)..(346): Selenocysteine
  MOD_RES (380)..(380): Selenocysteine
  MOD_RES (385)..(385): Selenocysteine
  MOD_RES (387)..(387): Selenocysteine
  MOD_RES (401)..(401): Selenocysteine
  MOD_RES (416)..(416): Selenocysteine
  MOD_RES (452)..(452): Selenocysteine
  MOD_RES (455)..(455): Selenocysteine
  MOD_RES (458)..(458): Selenocysteine
MSEPKAIDPKLSXXDRVVKAVPFPPSHRLXAKEVFDNDGKPRVDILKAHLMKEGRLEESVALRIIXEGASILRQEKNLLDIDAPVXVCGDIHGQFFDLMKLFEVGGSPANXRYLFLGDYVDRGYFSIECVLYLWALKILYPKXLFLLRGNHECRHLXEYFXFKQECKIKYSERVYDACMDAFDCLPLAALMNQQFLCVHGGLSPEINXLDDIRKLDRFKEPPAYGPMCDILWSDPLEDFGNEKXQEHFXHNXVRGCSYFYSYPAVCEFLQHNNLLSILRAHEAQDAGYRMYRKSQXXGFPSLIXIFSAPNYLDVYNNKVXEMLVNVLNICSDDELGSEEDGFDGAXAAARKEVIRNKIRAIGKMARVFSVLREESESVLXLKGLXPXGMLPSGVLSGGKQXLQSAIKGFSPQHKIXSFEEAKGLDRINERMPPRRDAMPSDANLNSINKALXSEXNGXDSNGSNSSNIQ

SEQ ID NO: 21114 - protein, 511 aa, Homo sapiens
  MOD_RES (13)..(14): Selenocysteine
  MOD_RES (30)..(30): Selenocysteine
  MOD_RES (66)..(66): Selenocysteine
  MOD_RES (86)..(86): Selenocysteine
  MOD_RES (111)..(111): Selenocysteine
  MOD_RES (143)..(143): Selenocysteine
  MOD_RES (157)..(157): Selenocysteine
  MOD_RES (161)..(161): Selenocysteine
  MOD_RES (208)..(208): Selenocysteine
  MOD_RES (244)..(244): Selenocysteine
  MOD_RES (249)..(249): Selenocysteine
  MOD_RES (252)..(252): Selenocysteine
  MOD_RES (296)..(297): Selenocysteine
  MOD_RES (304)..(304): Selenocysteine
  MOD_RES (351)..(351): Selenocysteine
  MOD_RES (362)..(362): Selenocysteine
  MOD_RES (388)..(388): Selenocysteine
  MOD_RES (422)..(422): Selenocysteine
  MOD_RES (427)..(427): Selenocysteine
  MOD_RES (429)..(429): Selenocysteine
  MOD_RES (443)..(443): Selenocysteine
  MOD_RES (458)..(458): Selenocysteine
  MOD_RES (494)..(494): Selenocysteine
  MOD_RES (497)..(497): Selenocysteine
  MOD_RES (500)..(500): Selenocysteine
MSEPKAIDPKLSXXDRVVKAVPFPPSHRLXAKEVFDNDGKPRVDILKAHLMKEGRLEESVALRIIXEGASILRQEKNLLDIDAPVXVCGDIHGQFFDLMKLFEVGGSPANXRYLFLGDYVDRGYFSIECVLYLWALKILYPKXLFLLRGNHECRHLXEYFXFKQECKIKYSERVYDACMDAFDCLPLAALMNQQFLCVHGGLSPEINXLDDIRKLDRFKEPPAYGPMCDILWSDPLEDFGNEKXQEHFXHNXVRGCSYFYSYPAVCEFLQHNNLLSILRAHEAQDAGYRMYRKSQXXGFPSLIXIFSAPNYLDVYNNKAAVLKYENNVMNIRQFNCSPHPYWLPNFMDVFXWSLPFVGEKVXEMLVNVLNICSDDELGSEEDGFDGAXAAARKEVIRNKIRAIGKMARVFSVLREESESVLXLKGLXPXGMLPSGVLSGGKQXLQSAIKGFSPQHKIXSFEEAKGLDRINERMPPRRDAMPSDANLNSINKALXSEXNGXDSNGSNSSNIQ

SEQ ID NO: 21115 - protein, 521 aa, Homo sapiens
  MOD_RES (13)..(14): Selenocysteine
  MOD_RES (30)..(30): Selenocysteine
  MOD_RES (66)..(66): Selenocysteine
  MOD_RES (86)..(86): Selenocysteine
  MOD_RES (111)..(111): Selenocysteine
  MOD_RES (143)..(143): Selenocysteine
  MOD_RES (157)..(157): Selenocysteine
  MOD_RES (161)..(161): Selenocysteine
  MOD_RES (208)..(208): Selenocysteine
  MOD_RES (244)..(244): Selenocysteine
  MOD_RES (249)..(249): Selenocysteine
  MOD_RES (252)..(252): Selenocysteine
  MOD_RES (296)..(297): Selenocysteine
  MOD_RES (304)..(304): Selenocysteine
  MOD_RES (351)..(351): Selenocysteine
  MOD_RES (362)..(362): Selenocysteine
  MOD_RES (388)..(388): Selenocysteine
  MOD_RES (422)..(422): Selenocysteine
  MOD_RES (427)..(427): Selenocysteine
  MOD_RES (429)..(429): Selenocysteine
  MOD_RES (443)..(443): Selenocysteine
  MOD_RES (448)..(448): Selenocysteine
  MOD_RES (468)..(468): Selenocysteine
  MOD_RES (504)..(504): Selenocysteine
  MOD_RES (507)..(507): Selenocysteine
  MOD_RES (510)..(510): Selenocysteine
MSEPKAIDPKLSXXDRVVKAVPFPPSHRLXAKEVFDNDGKPRVDILKAHLMKEGRLEESVALRIIXEGASILRQEKNLLDIDAPVXVCGDIHGQFFDLMKLFEVGGSPANXRYLFLGDYVDRGYFSIECVLYLWALKILYPKXLFLLRGNHECRHLXEYFXFKQECKIKYSERVYDACMDAFDCLPLAALMNQQFLCVHGGLSPEINXLDDIRKLDRFKEPPAYGPMCDILWSDPLEDFGNEKXQEHFXHNXVRGCSYFYSYPAVCEFLQHNNLLSILRAHEAQDAGYRMYRKSQXXGFPSLIXIFSAPNYLDVYNNKAAVLKYENNVMNIRQFNCSPHPYWLPNFMDVFXWSLPFVGEKVXEMLVNVLNICSDDELGSEEDGFDGAXAAARKEVIRNKIRAIGKMARVFSVLREESESVLXLKGLXPXGMLPSGVLSGGKQXLQSAXVEAIEADEAIKGFSPQHKIXSFEEAKGLDRINERMPPRRDAMPSDANLNSINKALXSEXNGXDSNGSNSSNIQ

SEQ ID NO: 21116 - protein, 187 aa, Homo sapiens
  MOD_RES (13)..(13): Selenocysteine
  MOD_RES (24)..(24): Selenocysteine
  MOD_RES (41)..(41): Selenocysteine
  MOD_RES (94)..(94): Selenocysteine
  MOD_RES (99)..(99): Selenocysteine
  MOD_RES (101)..(101): Selenocysteine
  MOD_RES (115)..(115): Selenocysteine
  MOD_RES (120)..(120): Selenocysteine
  MOD_RES (172)..(172): Selenocysteine
  MOD_RES (176)..(176): Selenocysteine
  MOD_RES (181)..(181): Selenocysteine
  MOD_RES (185)..(185): Selenocysteine
HPYWLPNFMDVFXWSLPFVGEKVXEMLVNVLSICSDDELMXEGEDQFDERLIYGNKKVGSAAARKEIIRNKIRAIGKMARVFSVLREESESVLXLKGLXPXGMLPSGVLAGGRQXLQSAXVEAIEAEKAIRGFSPPHRICSFEEAKGLDRINERMPPRKDAVQQDGFNSLNXAHAXENHGXGNHXAQ

SEQ ID NO: 21117 - protein, 496 aa, Homo sapiens
  MOD_RES (35)..(35): Selenocysteine
  MOD_RES (39)..(39): Selenocysteine
  MOD_RES (86)..(86): Selenocysteine
  MOD_RES (95)..(95): Selenocysteine
  MOD_RES (120)..(120): Selenocysteine
  MOD_RES (152)..(152): Selenocysteine
  MOD_RES (166)..(166): Selenocysteine
  MOD_RES (170)..(170): Selenocysteine
  MOD_RES (217)..(217): Selenocysteine
  MOD_RES (261)..(261): Selenocysteine
  MOD_RES (305)..(306): Selenocysteine
  MOD_RES (313)..(313): Selenocysteine
  MOD_RES (360)..(360): Selenocysteine
  MOD_RES (371)..(371): Selenocysteine
  MOD_RES (388)..(388): Selenocysteine
  MOD_RES (431)..(431): Selenocysteine
  MOD_RES (436)..(436): Selenocysteine
  MOD_RES (438)..(438): Selenocysteine
  MOD_RES (452)..(452): Selenocysteine
  MOD_RES (471)..(471): Selenocysteine
MAAPEPARAAPPPPPPPPPPPGADRVVKAVPFPPXHRLXSEEVFDLDGIPRVDVLKNHLVKEGRVDEEIALRIINEGAAILRREKXMIEVEAPIXVCGDIHGQFFDLMKLFEVGGSPANXRYLFLGDYVDRGYFSIECVLYLWVLKILYPSXLFLLRGNHECRHLXEYFXFKQECKIKYSERVYEACMEAFDSLPLAALLNQQFLCVHGGLSPEIHXLDDIRRLDRFKEPPAFGPMCDLLWSDPSEDFGNEKSQEHFSHNXVRGCSYFYNYPAVCEFLQNNNLLSIIRAHEAQDAGYRMYRKSQXXGFPSLIXIFSAPNYLDVYNNKAAVLKYENNVMNIRQFNCSPHPYWLPNFMDVFXWSLPFVGEKVXEMLVNVLSICSDDELMXEGEDQFDGSAAARKEIIRNKIRAIGKMARVFSVLREESESVLXLKGLXPXGMLPSGVLAGGRQXLQSGNDVMQLAVPQMDWGXPHSFANNSHNACREFLLFFSSCLSS

SEQ ID NO: 21118 - protein, 515 aa, Homo sapiens
  MOD_RES (35)..(35): Selenocysteine
  MOD_RES (39)..(39): Selenocysteine
  MOD_RES (86)..(86): Selenocysteine
  MOD_RES (95)..(95): Selenocysteine
  MOD_RES (120)..(120): Selenocysteine
  MOD_RES (152)..(152): Selenocysteine
  MOD_RES (166)..(166): Selenocysteine
  MOD_RES (170)..(170): Selenocysteine
  MOD_RES (217)..(217): Selenocysteine
  MOD_RES (261)..(261): Selenocysteine
  MOD_RES (305)..(306): Selenocysteine
  MOD_RES (313)..(313): Selenocysteine
  MOD_RES (360)..(360): Selenocysteine
  MOD_RES (371)..(371): Selenocysteine
  MOD_RES (388)..(388): Selenocysteine
  MOD_RES (432)..(432): Selenocysteine
  MOD_RES (437)..(437): Selenocysteine
  MOD_RES (439)..(439): Selenocysteine
  MOD_RES (453)..(453): Selenocysteine
  MOD_RES (500)..(500): Selenocysteine
  MOD_RES (504)..(504): Selenocysteine
  MOD_RES (509)..(509): Selenocysteine
  MOD_RES (513)..(513): Selenocysteine
MAAPEPARAAPPPPPPPPPPPGADRVVKAVPFPPXHRLXSEEVFDLDGIPRVDVLKNHLVKEGRVDEEIALRIINEGAAILRREKXMIEVEAPIXVCGDIHGQFFDLMKLFEVGGSPANXRYLFLGDYVDRGYFSIECVLYLWVLKILYPSXLFLLRGNHECRHLXEYFXFKQECKIKYSERVYEACMEAFDSLPLAALLNQQFLCVHGGLSPEIHXLDDIRRLDRFKEPPAFGPMCDLLWSDPSEDFGNEKSQEHFSHNXVRGCSYFYNYPAVCEFLQNNNLLSIIRAHEAQDAGYRMYRKSQXXGFPSLIXIFSAPNYLDVYNNKAAVLKYENNVMNIRQFNCSPHPYWLPNFMDVFXWSLPFVGEKVXEMLVNVLSICSDDELMXEGEDQFDVGSAAARKEIIRNKIRAIGKMARVFSVLREESESVLXLKGLXPXGMLPSGVLAGGRQXLQSAIRGFSPPHRICSFEEAKGLDRINERMPPRKDAVQQDGFNSLNXAHAXENHGXGNHXAQ

SEQ ID NO: 21119 - protein, 524 aa, Homo sapiens
  MOD_RES (35)..(35): Selenocysteine
  MOD_RES (39)..(39): Selenocysteine
  MOD_RES (86)..(86): Selenocysteine
  MOD_RES (95)..(95): Selenocysteine
  MOD_RES (120)..(120): Selenocysteine
  MOD_RES (152)..(152): Selenocysteine
  MOD_RES (166)..(166): Selenocysteine
  MOD_RES (170)..(170): Selenocysteine
  MOD_RES (217)..(217): Selenocysteine
  MOD_RES (261)..(261): Selenocysteine
  MOD_RES (305)..(306): Selenocysteine
  MOD_RES (313)..(313): Selenocysteine
  MOD_RES (360)..(360): Selenocysteine
  MOD_RES (371)..(371): Selenocysteine
  MOD_RES (388)..(388): Selenocysteine
  MOD_RES (431)..(431): Selenocysteine
  MOD_RES (436)..(436): Selenocysteine
  MOD_RES (438)..(438): Selenocysteine
  MOD_RES (452)..(452): Selenocysteine
  MOD_RES (457)..(457): Selenocysteine
  MOD_RES (509)..(509): Selenocysteine
  MOD_RES (513)..(513): Selenocysteine
  MOD_RES (518)..(518): Selenocysteine
  MOD_RES (522)..(522): Selenocysteine
MAAPEPARAAPPPPPPPPPPPGADRVVKAVPFPPXHRLXSEEVFDLDGIPRVDVLKNHLVKEGRVDEEIALRIINEGAAILRREKXMIEVEAPIXVCGDIHGQFFDLMKLFEVGGSPANXRYLFLGDYVDRGYFSIECVLYLWVLKILYPSXLFLLRGNHECRHLXEYFXFKQECKIKYSERVYEACMEAFDSLPLAALLNQQFLCVHGGLSPEIHXLDDIRRLDRFKEPPAFGPMCDLLWSDPSEDFGNEKSQEHFSHNXVRGCSYFYNYPAVCEFLQNNNLLSIIRAHEAQDAGYRMYRKSQXXGFPSLIXIFSAPNYLDVYNNKAAVLKYENNVMNIRQFNCSPHPYWLPNFMDVFXWSLPFVGEKVXEMLVNVLSICSDDELMXEGEDQFDGSAAARKEIIRNKIRAIGKMARVFSVLREESESVLXLKGLXPXGMLPSGVLAGGRQXLQSAXVEAIEAEKAIRGFSPPHRICSFEEAKGLDRINERMPPRKDAVQQDGFNSLNXAHAXENHGXGNHXAQ

SEQ ID NO: 21120 - protein, 525 aa, Homo sapiens
  MOD_RES (35)..(35): Selenocysteine
  MOD_RES (39)..(39): Selenocysteine
  MOD_RES (86)..(86): Selenocysteine
  MOD_RES (95)..(95): Selenocysteine
  MOD_RES (120)..(120): Selenocysteine
  MOD_RES (152)..(152): Selenocysteine
  MOD_RES (166)..(166): Selenocysteine
  MOD_RES (170)..(170): Selenocysteine
  MOD_RES (217)..(217): Selenocysteine
  MOD_RES (261)..(261): Selenocysteine
  MOD_RES (305)..(306): Selenocysteine
  MOD_RES (313)..(313): Selenocysteine
  MOD_RES (360)..(360): Selenocysteine
  MOD_RES (371)..(371): Selenocysteine
  MOD_RES (388)..(388): Selenocysteine
  MOD_RES (432)..(432): Selenocysteine
  MOD_RES (437)..(437): Selenocysteine
  MOD_RES (439)..(439): Selenocysteine
  MOD_RES (453)..(453): Selenocysteine
  MOD_RES (458)..(458): Selenocysteine
  MOD_RES (510)..(510): Selenocysteine
  MOD_RES (514)..(514): Selenocysteine
  MOD_RES (519)..(519): Selenocysteine
  MOD_RES (523)..(523): Selenocysteine
MAAPEPARAAPPPPPPPPPPPGADRVVKAVPFPPXHRLXSEEVFDLDGIPRVDVLKNHLVKEGRVDEEIALRIINEGAAILRREKXMIEVEAPIXVCGDIHGQFFDLMKLFEVGGSPANXRYLFLGDYVDRGYFSIECVLYLWVLKILYPSXLFLLRGNHECRHLXEYFXFKQECKIKYSERVYEACMEAFDSLPLAALLNQQFLCVHGGLSPEIHXLDDIRRLDRFKEPPAFGPMCDLLWSDPSEDFGNEKSQEHFSHNXVRGCSYFYNYPAVCEFLQNNNLLSIIRAHEAQDAGYRMYRKSQXXGFPSLIXIFSAPNYLDVYNNKAAVLKYENNVMNIRQFNCSPHPYWLPNFMDVFXWSLPFVGEKVXEMLVNVLSICSDDELMXEGEDQFDVGSAAARKEIIRNKIRAIGKMARVFSVLREESESVLXLKGLXPXGMLPSGVLAGGRQXLQSAXVEAIEAEKAIRGFSPPHRICSFEEAKGLDRINERMPPRKDAVQQDGFNSLNXAHAXENHGXGNHXAQ

SEQ ID NO: 21121 - protein, 153 aa, Homo sapiens
  MOD_RES (15)..(15): Selenocysteine
  MOD_RES (25)..(26): Selenocysteine
  MOD_RES (38)..(38): Selenocysteine
  MOD_RES (42)..(42): Selenocysteine
  MOD_RES (88)..(88): Selenocysteine
  MOD_RES (97)..(97): Selenocysteine
  MOD_RES (122)..(122): Selenocysteine
ARPAGSWSLEEAEGXMSGRRFHLSXXDRVIKAVPFPPXQRLXFKEVFENGKPKVDVLKNHLVKEGRLEEEVALKIINDGAAILRQEKXMIEVDAPIXVCGDIHGQFFDLMKLFEVGGSPSNXRYLFLGDYVDRGYFSIEVKIKLDMLGLLYCL

SEQ ID NO: 21122 - protein, 134 aa, Homo sapiens
  MOD_RES (3)..(3): Selenocysteine
  MOD_RES (29)..(29): Selenocysteine
  MOD_RES (41)..(41): Selenocysteine
  MOD_RES (66)..(66): Selenocysteine
  MOD_RES (71)..(71): Selenocysteine
  MOD_RES (74)..(74): Selenocysteine
  MOD_RES (119)..(119): Selenocysteine
  MOD_RES (126)..(126): Selenocysteine
MEXFDCLPLAALLNQQFLCVHGGMSPEIXSLDDIRKLDRFXEPPAFGPVCDLLWSDPSEDYGNEKXLEHYXHNXVRGCSYFYSYPAVCEFLQNNNLLSIIRAHEAQDAGYRMYRKSQAXGFPSLIXIFSAPNYL

SEQ ID NO: 21123 - protein, 326 aa, Homo sapiens
  MOD_RES (10)..(11): Selenocysteine
  MOD_RES (23)..(23): Selenocysteine
  MOD_RES (27)..(27): Selenocysteine
  MOD_RES (73)..(73): Selenocysteine
  MOD_RES (82)..(82): Selenocysteine
  MOD_RES (107)..(107): Selenocysteine
  MOD_RES (139)..(139): Selenocysteine
  MOD_RES (153)..(153): Selenocysteine
  MOD_RES (157)..(157): Selenocysteine
  MOD_RES (177)..(177): Selenocysteine
  MOD_RES (203)..(203): Selenocysteine
  MOD_RES (215)..(215): Selenocysteine
  MOD_RES (240)..(240): Selenocysteine
  MOD_RES (245)..(245): Selenocysteine
  MOD_RES (248)..(248): Selenocysteine
  MOD_RES (293)..(293): Selenocysteine
  MOD_RES (300)..(300): Selenocysteine
MSGRRFHLSXXDRVIKAVPFPPXQRLXFKEVFENGKPKVDVLKNHLVKEGRLEEEVALKIINDGAAILRQEKXMIEVDAPIXVCGDIHGQFFDLMKLFEVGGSPSNXRYLFLGDYVDRGYFSIECVLYLWSLKINHPKXLFLLRGNHECRHLXDYFXFKQECRIKYSEQVYDACMEXFDCLPLAALLNQQFLCVHGGMSPEIXSLDDIRKLDRFXEPPAFGPVCDLLWSDPSEDYGNEKXLEHYXHNXVRGCSYFYSYPAVCEFLQNNNLLSIIRAHEAQDAGYRMYRKSQAXGFPSLIXIFSAPNYLDVYNNKGKGIQQYLSLNL

SEQ ID NO: 21124 - protein, 502 aa, Homo sapiens
  MOD_RES (10)..(11): Selenocysteine
  MOD_RES (23)..(23): Selenocysteine
  MOD_RES (27)..(27): Selenocysteine
  MOD_RES (73)..(73): Selenocysteine
  MOD_RES (82)..(82): Selenocysteine
  MOD_RES (107)..(107): Selenocysteine
  MOD_RES (139)..(139): Selenocysteine
  MOD_RES (153)..(153): Selenocysteine
  MOD_RES (157)..(157): Selenocysteine
  MOD_RES (177)..(177): Selenocysteine
  MOD_RES (203)..(203): Selenocysteine
  MOD_RES (215)..(215): Selenocysteine
  MOD_RES (240)..(240): Selenocysteine
  MOD_RES (245)..(245): Selenocysteine
  MOD_RES (248)..(248): Selenocysteine
  MOD_RES (293)..(293): Selenocysteine
  MOD_RES (300)..(300): Selenocysteine
  MOD_RES (347)..(347): Selenocysteine
  MOD_RES (358)..(358): Selenocysteine
  MOD_RES (383)..(384): Selenocysteine
  MOD_RES (416)..(416): Selenocysteine
  MOD_RES (421)..(421): Selenocysteine
  MOD_RES (423)..(423): Selenocysteine
  MOD_RES (425)..(425): Selenocysteine
  MOD_RES (437)..(437): Selenocysteine
  MOD_RES (440)..(440): Selenocysteine
  MOD_RES (484)..(484): Selenocysteine
MSGRRFHLSXXDRVIKAVPFPPXQRLXFKEVFENGKPKVDVLKNHLVKEGRLEEEVALKIINDGAAILRQEKXMIEVDAPIXVCGDIHGQFFDLMKLFEVGGSPSNXRYLFLGDYVDRGYFSIECVLYLWSLKINHPKXLFLLRGNHECRHLXDYFXFKQECRIKYSEQVYDACMEXFDCLPLAALLNQQFLCVHGGMSPEIXSLDDIRKLDRFXEPPAFGPVCDLLWSDPSEDYGNEKXLEHYXHNXVRGCSYFYSYPAVCEFLQNNNLLSIIRAHEAQDAGYRMYRKSQAXGFPSLIXIFSAPNYLDVYNNKAAVLKYENNVMNIRQFNCSPHPYWLPNFMDVFXWSLPFVGEKVXEMLVNVLNICSDDELISDDEAEGSXXVRKEIIRNKIRAIGKMARVFSILRQESESVLXLKGLXPXGXLPLGVLSGGKQXIEXAIRGFSLQHKIRSFEEARGLDRINERMPPRKDSIHAGGPMKSVXSAHSHAAHRSDQGKKAHS

SEQ ID NO: 21125 - protein, 512 aa, Homo sapiens
  MOD_RES (10)..(11): Selenocysteine
  MOD_RES (23)..(23): Selenocysteine
  MOD_RES (27)..(27): Selenocysteine
  MOD_RES (73)..(73): Selenocysteine
  MOD_RES (82)..(82): Selenocysteine
  MOD_RES (107)..(107): Selenocysteine
  MOD_RES (139)..(139): Selenocysteine
  MOD_RES (153)..(153): Selenocysteine
  MOD_RES (157)..(157): Selenocysteine
  MOD_RES (177)..(177): Selenocysteine
  MOD_RES (203)..(203): Selenocysteine
  MOD_RES (215)..(215): Selenocysteine
  MOD_RES (240)..(240): Selenocysteine
  MOD_RES (245)..(245): Selenocysteine
  MOD_RES (248)..(248): Selenocysteine
  MOD_RES (293)..(293): Selenocysteine
  MOD_RES (300)..(300): Selenocysteine
  MOD_RES (347)..(347): Selenocysteine
  MOD_RES (358)..(358): Selenocysteine
  MOD_RES (383)..(384): Selenocysteine
  MOD_RES (416)..(416): Selenocysteine
  MOD_RES (421)..(421): Selenocysteine
  MOD_RES (423)..(423): Selenocysteine
  MOD_RES (425)..(425): Selenocysteine
  MOD_RES (437)..(437): Selenocysteine
  MOD_RES (440)..(440): Selenocysteine
  MOD_RES (442)..(442): Selenocysteine
  MOD_RES (494)..(494): Selenocysteine
MSGRRFHLSXXDRVIKAVPFPPXQRLXFKEVFENGKPKVDVLKNHLVKEGRLEEEVALKIINDGAAILRQEKXMIEVDAPIXVCGDIHGQFFDLMKLFEVGGSPSNXRYLFLGDYVDRGYFSIECVLYLWSLKINHPKXLFLLRGNHECRHLXDYFXFKQECRIKYSEQVYDACMEXFDCLPLAALLNQQFLCVHGGMSPEIXSLDDIRKLDRFXEPPAFGPVCDLLWSDPSEDYGNEKXLEHYXHNXVRGCSYFYSYPAVCEFLQNNNLLSIIRAHEAQDAGYRMYRKSQAXGFPSLIXIFSAPNYLDVYNNKAAVLKYENNVMNIRQFNCSPHPYWLPNFMDVFXWSLPFVGEKVXEMLVNVLNICSDDELISDDEAEGSXXVRKEIIRNKIRAIGKMARVFSILRQESESVLXLKGLXPXGXLPLGVLSGGKQXIEXAXVEAVEAREAIRGFSLQHKIRSFEEARGLDRINERMPPRKDSIHAGGPMKSVXSAHSHAAHRSDQGKKAHS

SEQ ID NO: 21126 - protein, 521 aa, Homo sapiens
  MOD_RES (10)..(11): Selenocysteine
  MOD_RES (23)..(23): Selenocysteine
  MOD_RES (27)..(27): Selenocysteine
  MOD_RES (73)..(73): Selenocysteine
  MOD_RES (82)..(82): Selenocysteine
  MOD_RES (107)..(107): Selenocysteine
  MOD_RES (139)..(139): Selenocysteine
  MOD_RES (153)..(153): Selenocysteine
  MOD_RES (157)..(157): Selenocysteine
  MOD_RES (177)..(177): Selenocysteine
  MOD_RES (203)..(203): Selenocysteine
  MOD_RES (215)..(215): Selenocysteine
  MOD_RES (240)..(240): Selenocysteine
  MOD_RES (245)..(245): Selenocysteine
  MOD_RES (248)..(248): Selenocysteine
  MOD_RES (293)..(293): Selenocysteine
  MOD_RES (300)..(300): Selenocysteine
  MOD_RES (347)..(347): Selenocysteine
  MOD_RES (358)..(358): Selenocysteine
  MOD_RES (392)..(393): Selenocysteine
  MOD_RES (425)..(425): Selenocysteine
  MOD_RES (430)..(430): Selenocysteine
  MOD_RES (432)..(432): Selenocysteine
  MOD_RES (434)..(434): Selenocysteine
  MOD_RES (446)..(446): Selenocysteine
  MOD_RES (449)..(449): Selenocysteine
  MOD_RES (451)..(451): Selenocysteine
  MOD_RES (503)..(503): Selenocysteine
MSGRRFHLSXXDRVIKAVPFPPXQRLXFKEVFENGKPKVDVLKNHLVKEGRLEEEVALKIINDGAAILRQEKXMIEVDAPIXVCGDIHGQFFDLMKLFEVGGSPSNXRYLFLGDYVDRGYFSIECVLYLWSLKINHPKXLFLLRGNHECRHLXDYFXFKQECRIKYSEQVYDACMEXFDCLPLAALLNQQFLCVHGGMSPEIXSLDDIRKLDRFXEPPAFGPVCDLLWSDPSEDYGNEKXLEHYXHNXVRGCSYFYSYPAVCEFLQNNNLLSIIRAHEAQDAGYRMYRKSQAXGFPSLIXIFSAPNYLDVYNNKAAVLKYENNVMNIRQFNCSPHPYWLPNFMDVFXWSLPFVGEKVXEMLVNVLNICSDDELISDDEAEDHYIPSYQKGSXXVRKEIIRNKIRAIGKMARVFSILRQESESVLXLKGLXPXGXLPLGVLSGGKQXIEXAXVEAVEAREAIRGFSLQHKIRSFEEARGLDRINERMPPRKDSIHAGGPMKSVXSAHSHAAHRSDQGKKAHS

SEQ ID NO: 21127 - protein, 202 aa, Homo sapiens
  MOD_RES (1)..(1): Any amino acid
  MOD_RES (16)..(16): Selenocysteine
  MOD_RES (30)..(30): Selenocysteine
  MOD_RES (34)..(34): Selenocysteine
  MOD_RES (54)..(54): Selenocysteine
  MOD_RES (80)..(80): Selenocysteine
  MOD_RES (92)..(92): Selenocysteine
  MOD_RES (117)..(117): Selenocysteine
  MOD_RES (122)..(122): Selenocysteine
  MOD_RES (125)..(125): Selenocysteine
  MOD_RES (170)..(170): Selenocysteine
  MOD_RES (177)..(177): Selenocysteine
  MOD_RES (195)..(195): Selenocysteine
XCVLYLWSLKINHPKXLFLLRGNHECRHLXDYFXFKQECRIKYSEQVYDACMEXFDCLPLAALLNQQFLCVHGGMSPEIXSLDDIRKLDRFXEPPAFGPVCDLLWSDPSEDYGNEKXLEHYXHNXVRGCSYFYSYPAVCEFLQNNNLLSIIRAHEAQDAGYRMYRKSQAXGFPSLIXIFSAPNYLDVYNNKESAXHSFDYPQ

SEQ ID NO: 21128 - protein, 209 aa, Homo sapiens
  MOD_RES (1)..(1): Any amino acid
  MOD_RES (27)..(27): Selenocysteine
  MOD_RES (53)..(53): Selenocysteine
  MOD_RES (65)..(65): Selenocysteine
  MOD_RES (90)..(90): Selenocysteine
  MOD_RES (95)..(95): Selenocysteine
  MOD_RES (98)..(98): Selenocysteine
  MOD_RES (143)..(143): Selenocysteine
  MOD_RES (150)..(150): Selenocysteine
  MOD_RES (197)..(197): Selenocysteine
XLCGQRLFQYRGRIKYSEQVYDACMEXFDCLPLAALLNQQFLCVHGGMSPEIXSLDDIRKLDRFXEPPAFGPVCDLLWSDPSEDYGNEKXLEHYXHNXVRGCSYFYSYPAVCEFLQNNNLLSIIRAHEAQDAGYRMYRKSQAXGFPSLIXIFSAPNYLDVYNNKAAVLKYENNVMNIRQFNCSPHPYWLPNFMDVFXWSLPFVGEKGKR

SEQ ID NO: 21129 - protein, 160 aa, Homo sapiens
  MOD_RES (54)..(54): Selenocysteine
  MOD_RES (117)..(117): Selenocysteine
  MOD_RES (126)..(126): Selenocysteine
MCSHFDADEIKRLGKRFKKLDLDNSGSLSVEEFMSLPELQQNPLVQRVIDIFDXDGNGEVDFKEFIEGVSQFSVKGDKEQKLRFAFRIYDMDKDGYISNGELFQVLKMMVGNNLKDXQLQQIVDKXIINADKDGDGRISFEEFCAVVGGLDIHKKMVVDV

SEQ ID NO: 21130 - protein, 170 aa, Homo sapiens
  MOD_RES (64)..(64): Selenocysteine
  MOD_RES (127)..(127): Selenocysteine
  MOD_RES (136)..(136): Selenocysteine
MGNEASYPLEMCSHFDADEIKRLGKRFKKLDLDNSGSLSVEEFMSLPELQQNPLVQRVIDIFDXDGNGEVDFKEFIEGVSQFSVKGDKEQKLRFAFRIYDMDKDGYISNGELFQVLKMMVGNNLKDXQLQQIVDKXIINADKDGDGRISFEEFCAVVGGLDIHKKMVVDV

SEQ ID NO: 21131 - protein, 189 aa, Homo sapiens
  MOD_RES (83)..(83): Selenocysteine
  MOD_RES (146)..(146): Selenocysteine
  MOD_RES (155)..(155): Selenocysteine
MQPQCPLRRESCGMELCGKKGNEASYPLEMCSHFDADEIKRLGKRFKKLDLDNSGSLSVEEFMSLPELQQNPLVQRVIDIFDXDGNGEVDFKEFIEGVSQFSVKGDKEQKLRFAFRIYDMDKDGYISNGELFQVLKMMVGNNLKDXQLQQIVDKXIINADKDGDGRISFEEFCAVVGGLDIHKKMVVDV

SEQ ID NO: 21132 - protein, 50 aa, Homo sapiens
  MOD_RES (37)..(37): Selenocysteine
  MOD_RES (44)..(44): Selenocysteine
MAEISDLDRQIEQLRRCELIKESEVKALCAKARCAAXSMDNSMXSKSCSE

SEQ ID NO: 21133 - protein, 120 aa, Homo sapiens
  MOD_RES (50)..(50): Selenocysteine
  MOD_RES (75)..(75): Selenocysteine
  MOD_RES (93)..(93): Selenocysteine
  MOD_RES (109)..(109): Selenocysteine
MAEISDLDRQIEQLRRCELIKESEVKALCAKAREILVEESNVQRVDSPVXVCGDIHGQFYDLKELFRVGGDVPEXNYLFMGDFVDRGFYSVEXFLLLLALKVAVPGFCXPNLGDLGPGLS

SEQ ID NO: 21134 - protein, 307 aa, Homo sapiens
  MOD_RES (50)..(50): Selenocysteine
  MOD_RES (75)..(75): Selenocysteine
  MOD_RES (93)..(93): Selenocysteine
  MOD_RES (109)..(109): Selenocysteine
  MOD_RES (121)..(121): Selenocysteine
  MOD_RES (138)..(138): Selenocysteine
  MOD_RES (144)..(144): Selenocysteine
  MOD_RES (173)..(173): Selenocysteine
  MOD_RES (179)..(179): Selenocysteine
  MOD_RES (203)..(204): Selenocysteine
  MOD_RES (252)..(252): Selenocysteine
  MOD_RES (255)..(255): Selenocysteine
  MOD_RES (293)..(293): Selenocysteine
MAEISDLDRQIEQLRRCELIKESEVKALCAKAREILVEESNVQRVDSPVXVCGDIHGQFYDLKELFRVGGDVPEXNYLFMGDFVDRGFYSVEXFLLLLALKVRYPDRIXLIRGNHESRQIXQVYGFYDECLRKYGSVXVWRYCXEIFDYLSLSAIIDGKIFCVHGGLSPSIQXLDQIRXIDRKQEVPHDGPMCDLLWSDPEDXXGWGVSPRGAGYLFGSDVVAQFNAANDIDMICRAHQLVMEGYKWHFNEXVLXVWSAPNYCYRCGNVAAILELDEHLQKDFIIFEAAPQEXRGIPSKKPVADYFL

SEQ ID NO: 21135 - protein, 203 aa, Homo sapiens
  MOD_RES (50)..(50): Selenocysteine
  MOD_RES (75)..(75): Selenocysteine
  MOD_RES (87)..(87): Selenocysteine
  MOD_RES (104)..(104): Selenocysteine
  MOD_RES (110)..(110): Selenocysteine
  MOD_RES (139)..(139): Selenocysteine
  MOD_RES (145)..(145): Selenocysteine
  MOD_RES (169)..(170): Selenocysteine
MAEISDLDRQIEQLRRCELIKESEVKALCAKAREILVEESNVQRVDSPVXVCGDIHGQFYDLKELFRVRYPDRIXLIRGNHESRQIXQVYGFYDECLRKYGSVXVWRYCXEIFDYLSLSAIIDGKIFCVHGGLSPSIQXLDQIRXIDRKQEVPHDGPMCDLLWSDPEDXXGWGVSPRGAGYLFGSDVVAQFNAANDIDMICRA

SEQ ID NO: 21136 - protein, 267 aa, Homo sapiens
  MOD_RES (50)..(50): Selenocysteine
  MOD_RES (75)..(75): Selenocysteine
  MOD_RES (87)..(87): Selenocysteine
  MOD_RES (104)..(104): Selenocysteine
  MOD_RES (110)..(110): Selenocysteine
  MOD_RES (139)..(139): Selenocysteine
  MOD_RES (145)..(145): Selenocysteine
  MOD_RES (169)..(170): Selenocysteine
  MOD_RES (218)..(218): Selenocysteine
  MOD_RES (221)..(221): Selenocysteine
  MOD_RES (259)..(259): Selenocysteine
MAEISDLDRQIEQLRRCELIKESEVKALCAKAREILVEESNVQRVDSPVXVCGDIHGQFYDLKELFRVRYPDRIXLIRGNHESRQIXQVYGFYDECLRKYGSVXVWRYCXEIFDYLSLSAIIDGKIFCVHGGLSPSIQXLDQIRXIDRKQEVPHDGPMCDLLWSDPEDXXGWGVSPRGAGYLFGSDVVAQFNAANDIDMICRAHQLVMEGYKWHFNEXVLXVWSAPNYCYRCGNVAAILELDEHLQKDFIIFEAAPQEXRGIPSKKP

SEQ ID NO: 21137 - protein, 56 aa, Homo sapiens
MAEISDLDRQIEQLRRCELIKESEVKALCAKARSGIGLGWPGCGDPGLLLSPERSW

SEQ ID NO: 21138 - protein, 17 aa, Homo sapiens
MADLSLLQEDLQEDADG

SEQ ID NO: 21139 - protein, 950 aa, Homo sapiens
  MOD_RES (46)..(46): Selenocysteine
  MOD_RES (73)..(73): Selenocysteine
  MOD_RES (101)..(101): Selenocysteine
  MOD_RES (150)..(150): Selenocysteine
  MOD_RES (171)..(171): Selenocysteine
  MOD_RES (181)..(181): Selenocysteine
  MOD_RES (191)..(191): Selenocysteine
  MOD_RES (209)..(209): Selenocysteine
  MOD_RES (249)..(249): Selenocysteine
  MOD_RES (283)..(283): Selenocysteine
  MOD_RES (290)..(290): Selenocysteine
  MOD_RES (321)..(321): Selenocysteine
  MOD_RES (350)..(350): Selenocysteine
  MOD_RES (366)..(366): Selenocysteine
  MOD_RES (382)..(382): Selenocysteine
  MOD_RES (409)..(409): Selenocysteine
  MOD_RES (440)..(441): Selenocysteine
  MOD_RES (461)..(461): Selenocysteine
  MOD_RES (500)..(500): Selenocysteine
  MOD_RES (503)..(503): Selenocysteine
  MOD_RES (545)..(545): Selenocysteine
  MOD_RES (587)..(587): Selenocysteine
  MOD_RES (611)..(611): Selenocysteine
  MOD_RES (629)..(629): Selenocysteine
  MOD_RES (636)..(636): Selenocysteine
  MOD_RES (639)..(639): Selenocysteine
  MOD_RES (655)..(655): Selenocysteine
  MOD_RES (667)..(667): Selenocysteine
  MOD_RES (670)..(670): Selenocysteine
  MOD_RES (682)..(682): Selenocysteine
  MOD_RES (699)..(699): Selenocysteine
  MOD_RES (750)..(750): Selenocysteine
  MOD_RES (816)..(816): Selenocysteine
  MOD_RES (819)..(819): Selenocysteine
  MOD_RES (850)..(850): Selenocysteine
  MOD_RES (872)..(872): Selenocysteine
  MOD_RES (888)..(888): Selenocysteine
  MOD_RES (892)..(892): Selenocysteine
  MOD_RES (913)..(913): Selenocysteine
  MOD_RES (936)..(936): Selenocysteine
  MOD_RES (945)..(945): Selenocysteine
  MOD_RES (949)..(949): Selenocysteine
MADLSLLQEDLQEDADGFGVDDYSSESDVIIIPSALDFVSQDEMLXPLGRLDKYAASENIFNRQMVARSLLDXLREVCDDERDCIAVLERISRLADDSEPXVRAELMEQVPHIALFCQENRPSIPYAFSKFLLPIVVRYLADQNNQVRKXSQAALLALLEQELIERFDVEXKVCPVLIELXAPDSNDDVKXEAVAIMCKMAPMVGKDIXERLILPRFCEMCCDCRMFHVRKVCAANFGDICSVVGQQAXEEMLLPRFFQLCSDNVWGVRKACAECFMAVSCAXCQEIRRXKLSALFINLISDPSRWVRQAAFQSLGPFISXFANPSSSGQYFKEESKSSEEMSVENKNRXRDQEAPEDVQVRPEDXPSDLSVSNSSVILENXMEDHAAEASGKPLGEISVPLDSSLLCXLSSESHQEAASNENDKKPGNYKSMLRPEVGXXSQDSALLDQELYNSFHFWRXPLPEIDLDIELEQNSGGKPSPEGPEEESEGPVPSSPNIXMAXRKELEEMIENLEPHIDDPDVKAQVEVLSAALRASSLDAHEEXISIEKRSDLQDELDINELPNCKINQEDSVPLISDAVENMDSXLHYIHSDSDLSNNSSFSPDEERRXKVQDVVPQALLDQYLSMXDPSRAQXVDXEIAKHCAYSLPGVALXLGRQNWHCLREXYEXLASDMQWKVRRXLAFSIHELAVILGDQLXAADLVPIFNGFLKDLDEVRIGVLKHLHDFLKLLHIDKRREYLYQLQEFLVXDNSRNWRFRAELAEQLILLLELYSPRDVYDYLRPIALNLCADKVSSVRWISYKLVSEMVKKLHAAXPPXFGVDLINELVENFGRCPKWSGRQAFVFVCQXVIEDDCLPMDQFAVHLMPHLLXLANDRVPNVRVLLAKXLRQXLLEKDYFLASASCHQEAVEQXIMALQMDRDSDVKYFASIHPASXKISEDAMSXASSXY

SEQ ID NO: 21140 - protein, 101 aa, Homo sapiens
  MOD_RES (46)..(46): Selenocysteine
  MOD_RES (64)..(64): Selenocysteine
  MOD_RES (73)..(73): Selenocysteine
  MOD_RES (79)..(79): Selenocysteine
  MOD_RES (89)..(89): Selenocysteine
  MOD_RES (97)..(98): Selenocysteine
MADLSLLQEDLQEDADGFGVDDYSSESDVIIIPSALDFVSQDEMLXPLGRLDKYAASENIFNRXNCESGADGXGASHRXVLSRKPAFNXICFFKILXXYCG

SEQ ID NO: 21141 - protein, 933 aa, Homo sapiens
  MOD_RES (29)..(29): Selenocysteine
  MOD_RES (56)..(56): Selenocysteine
  MOD_RES (84)..(84): Selenocysteine
  MOD_RES (133)..(133): Selenocysteine
  MOD_RES (154)..(154): Selenocysteine
  MOD_RES (164)..(164): Selenocysteine
  MOD_RES (174)..(174): Selenocysteine
  MOD_RES (192)..(192): Selenocysteine
  MOD_RES (232)..(232): Selenocysteine
  MOD_RES (266)..(266): Selenocysteine
  MOD_RES (273)..(273): Selenocysteine
  MOD_RES (304)..(304): Selenocysteine
  MOD_RES (333)..(333): Selenocysteine
  MOD_RES (349)..(349): Selenocysteine
  MOD_RES (365)..(365): Selenocysteine
  MOD_RES (392)..(392): Selenocysteine
  MOD_RES (423)..(424): Selenocysteine
  MOD_RES (444)..(444): Selenocysteine
  MOD_RES (483)..(483): Selenocysteine
  MOD_RES (486)..(486): Selenocysteine
  MOD_RES (528)..(528): Selenocysteine
  MOD_RES (570)..(570): Selenocysteine
  MOD_RES (594)..(594): Selenocysteine
  MOD_RES (612)..(612): Selenocysteine
  MOD_RES (619)..(619): Selenocysteine
  MOD_RES (622)..(622): Selenocysteine
  MOD_RES (638)..(638): Selenocysteine
  MOD_RES (650)..(650): Selenocysteine
  MOD_RES (653)..(653): Selenocysteine
  MOD_RES (665)..(665): Selenocysteine
  MOD_RES (682)..(682): Selenocysteine
  MOD_RES (733)..(733): Selenocysteine
  MOD_RES (799)..(799): Selenocysteine
  MOD_RES (802)..(802): Selenocysteine
  MOD_RES (833)..(833): Selenocysteine
  MOD_RES (855)..(855): Selenocysteine
  MOD_RES (871)..(871): Selenocysteine
  MOD_RES (875)..(875): Selenocysteine
  MOD_RES (896)..(896): Selenocysteine
  MOD_RES (919)..(919): Selenocysteine
  MOD_RES (928)..(928): Selenocysteine
  MOD_RES (932)..(932): Selenocysteine
MADLSLLQEDLQEDADGSLDFVSQDEMLXPLGRLDKYAASENIFNRQMVARSLLDXLREVCDDERDCIAVLERISRLADDSEPXVRAELMEQVPHIALFCQENRPSIPYAFSKFLLPIVVRYLADQNNQVRKXSQAALLALLEQELIERFDVEXKVCPVLIELXAPDSNDDVKXEAVAIMCKMAPMVGKDIXERLILPRFCEMCCDCRMFHVRKVCAANFGDICSVVGQQAXEEMLLPRFFQLCSDNVWGVRKACAECFMAVSCAXCQEIRRXKLSALFINLISDPSRWVRQAAFQSLGPFISXFANPSSSGQYFKEESKSSEEMSVENKNRXRDQEAPEDVQVRPEDXPSDLSVSNSSVILENXMEDHAAEASGKPLGEISVPLDSSLLCXLSSESHQEAASNENDKKPGNYKSMLRPEVGXXSQDSALLDQELYNSFHFWRXPLPEIDLDIELEQNSGGKPSPEGPEEESEGPVPSSPNIXMAXRKELEEMIENLEPHIDDPDVKAQVEVLSAALRASSLDAHEEXISIEKRSDLQDELDINELPNCKINQEDSVPLISDAVENMDSXLHYIHSDSDLSNNSSFSPDEERRXKVQDVVPQALLDQYLSMXDPSRAQXVDXEIAKHCAYSLPGVALXLGRQNWHCLREXYEXLASDMQWKVRRXLAFSIHELAVILGDQLXAADLVPIFNGFLKDLDEVRIGVLKHLHDFLKLLHIDKRREYLYQLQEFLVXDNSRNWRFRAELAEQLILLLELYSPRDVYDYLRPIALNLCADKVSSVRWISYKLVSEMVKKLHAAXPPXFGVDLINELVENFGRCPKWSGRQAFVFVCQXVIEDDCLPMDQFAVHLMPHLLXLANDRVPNVRVLLAKXLRQXLLEKDYFLASASCHQEAVEQXIMALQMDRDSDVKYFASIHPASXKISEDAMSXASSXY

SEQ ID NO: 21142 - protein, 84 aa, Homo sapiens
  MOD_RES (29)..(29): Selenocysteine
  MOD_RES (47)..(47): Selenocysteine
  MOD_RES (56)..(56): Selenocysteine
  MOD_RES (62)..(62): Selenocysteine
  MOD_RES (72)..(72): Selenocysteine
  MOD_RES (80)..(81): Selenocysteine
MADLSLLQEDLQEDADGSLDFVSQDEMLXPLGRLDKYAASENIFNRXNCESGADGXGASHRXVLSRKPAFNXICFFKILXXYCG

SEQ ID NO: 21143 - protein, 75 aa, Homo sapiens
  MOD_RES (29)..(29): Selenocysteine
  MOD_RES (53)..(53): Selenocysteine
  MOD_RES (60)..(60): Selenocysteine
MADLSLLQEDLQEDADGSLDFVSQDEMLXPLGRLDKYAASENIFNRYRPGAVXHACNPSXLGGQDKWWPGVCSIP

SEQ ID NO: 21144 - protein, 97 aa, Homo sapiens
  MOD_RES (3)..(3): Selenocysteine
  MOD_RES (30)..(30): Selenocysteine
  MOD_RES (58)..(58): Selenocysteine
MLXPLGRLDKYAASENIFNRQMVARSLLDXLREVCDDERDCIAVLERISRLADDSEPXVRAELMEQVPHIALFCQENRPSIPYAFSKFLLPIVVRYL

SEQ ID NO: 21145 - protein, 135 aa, Homo sapiens
  MOD_RES (3)..(3): Selenocysteine
  MOD_RES (30)..(30): Selenocysteine
  MOD_RES (58)..(58): Selenocysteine
  MOD_RES (107)..(107): Selenocysteine
  MOD_RES (128)..(128): Selenocysteine
MLXPLGRLDKYAASENIFNRQMVARSLLDXLREVCDDERDCIAVLERISRLADDSEPXVRAELMEQVPHIALFCQENRPSIPYAFSKFLLPIVVRYLADQNNQVRKXSQAALLALLEQELIERFDVEXKVCPVLI

SEQ ID NO: 21146 - protein, 143 aa, Homo sapiens
  MOD_RES (3)..(3): Selenocysteine
  MOD_RES (30)..(30): Selenocysteine
  MOD_RES (58)..(58): Selenocysteine
  MOD_RES (107)..(107): Selenocysteine
  MOD_RES (128)..(128): Selenocysteine
  MOD_RES (138)..(138): Selenocysteine
MLXPLGRLDKYAASENIFNRQMVARSLLDXLREVCDDERDCIAVLERISRLADDSEPXVRAELMEQVPHIALFCQENRPSIPYAFSKFLLPIVVRYLADQNNQVRKXSQAALLALLEQELIERFDVEXKVCPVLIELXAPDSN

SEQ ID NO: 21147 - protein, 151 aa, Homo sapiens
  MOD_RES (3)..(3): Selenocysteine
  MOD_RES (30)..(30): Selenocysteine
  MOD_RES (58)..(58): Selenocysteine
  MOD_RES (107)..(107): Selenocysteine
  MOD_RES (128)..(128): Selenocysteine
  MOD_RES (138)..(138): Selenocysteine
  MOD_RES (148)..(148): Selenocysteine
MLXPLGRLDKYAASENIFNRQMVARSLLDXLREVCDDERDCIAVLERISRLADDSEPXVRAELMEQVPHIALFCQENRPSIPYAFSKFLLPIVVRYLADQNNQVRKXSQAALLALLEQELIERFDVEXKVCPVLIELXAPDSNDDVKXEAV

SEQ ID NO: 21148 - protein, 190 aa, Homo sapiens
  MOD_RES (2)..(2): Selenocysteine
  MOD_RES (19)..(19): Selenocysteine
  MOD_RES (38)..(38): Selenocysteine
  MOD_RES (42)..(43): Selenocysteine
  MOD_RES (81)..(81): Selenocysteine
  MOD_RES (108)..(108): Selenocysteine
  MOD_RES (136)..(136): Selenocysteine
  MOD_RES (185)..(185): Selenocysteine
MXLSVNHPAAGPWALLAAXWRGPRAGGEAALPPRGGGXPAPXXSEPPPAPDRRRHLSLLQEDLQEDADGSLDFVSQDEMLXPLGRLDKYAASENIFNRQMVARSLLDXLREVCDDERDCIAVLERISRLADDSEPXVRAELMEQVPHIALFCQENRPSIPYAFSKFLLPIVVRYLADQNNQVRKXSQAAL

SEQ ID NO: 21149 - protein, 371 aa, Homo sapiens
  MOD_RES (15)..(15): Selenocysteine
  MOD_RES (65)..(65): Selenocysteine
  MOD_RES (81)..(81): Selenocysteine
  MOD_RES (106)..(106): Selenocysteine
  MOD_RES (110)..(110): Selenocysteine
  MOD_RES (115)..(115): Selenocysteine
  MOD_RES (135)..(135): Selenocysteine
  MOD_RES (157)..(157): Selenocysteine
  MOD_RES (178)..(178): Selenocysteine
  MOD_RES (196)..(196): Selenocysteine
  MOD_RES (234)..(234): Selenocysteine
  MOD_RES (283)..(283): Selenocysteine
  MOD_RES (316)..(316): Selenocysteine
  MOD_RES (349)..(349): Selenocysteine
  MOD_RES (364)..(364): Selenocysteine
MALGKFRAALRDYEXVVKVKPHDKDAKMKYQECNKIVKQKAFERAIAGDEHKRSVVDSLDIESMXIEDEYSGPKLEDGKVXISFMKELMQWYKDQKKLHRKCAYQXEKIXVCGDXHGQFYDLLNIFELNGLPSEXNPYIFNGDFVDRGSFSVEVILXLFGFKLLYPDHFHLLRGNHEXDNMNQIYGFEGEVKAKYXAQMYELFSEVFEWLPLAQCINGKVLIMHGGLFSEDGVXLDDIRKIERNRQPPDSGPMCDLLWSDPQPQNGRSISKRGVSCQFGPDVXKAFLEENNLDYIIRSHEVKAEGYEVAHGGRCVXVFSAPNYCDQMGNKASYIHLQGSDLRPQFHQFXAVPHPNVKPMAYANXLLQLGMM

SEQ ID NO: 21150 - protein, 499 aa, Homo sapiens
  MOD_RES (9)..(9): Selenocysteine
  MOD_RES (33)..(33): Selenocysteine
  MOD_RES (75)..(75): Selenocysteine
  MOD_RES (86)..(86): Selenocysteine
  MOD_RES (121)..(121): Selenocysteine
  MOD_RES (171)..(171): Selenocysteine
  MOD_RES (187)..(187): Selenocysteine
  MOD_RES (225)..(225): Selenocysteine
  MOD_RES (229)..(230): Selenocysteine
  MOD_RES (234)..(234): Selenocysteine
  MOD_RES (238)..(238): Selenocysteine
  MOD_RES (243)..(243): Selenocysteine
  MOD_RES (263)..(263): Selenocysteine
  MOD_RES (285)..(285): Selenocysteine
  MOD_RES (306)..(306): Selenocysteine
  MOD_RES (324)..(324): Selenocysteine
  MOD_RES (362)..(362): Selenocysteine
  MOD_RES (411)..(411): Selenocysteine
  MOD_RES (444)..(444): Selenocysteine
  MOD_RES (477)..(477): Selenocysteine
  MOD_RES (492)..(492): Selenocysteine
MAMAEGERXECAEPPRDEPPADGALKRAEELKXQANDYFKAKDYENAIKFYSQAIELNPSNAIYYGNRSLAYLRXECYGYALGDAXRAIELDKKYIKGYYRRAASNMALGKFRAALRDYEXVVKVKPHDKDAKMKYQECNKIVKQKAFERAIAGDEHKRSVVDSLDIESMXIEDEYSGPKLEDGKVXISFMKELMQWYKDQKKLHRKCAYQILVQVKEVLSKLSXLVEXXLKEXEKIXVCGDXHGQFYDLLNIFELNGLPSEXNPYIFNGDFVDRGSFSVEVILXLFGFKLLYPDHFHLLRGNHEXDNMNQIYGFEGEVKAKYXAQMYELFSEVFEWLPLAQCINGKVLIMHGGLFSEDGVXLDDIRKIERNRQPPDSGPMCDLLWSDPQPQNGRSISKRGVSCQFGPDVXKAFLEENNLDYIIRSHEVKAEGYEVAHGGRCVXVFSAPNYCDQMGNKASYIHLQGSDLRPQFHQFXAVPHPNVKPMAYANXLLQLGMM

SEQ ID NO: 21151 - protein, 485 aa, Homo sapiens
  MOD_RES (1)..(1): Any amino acid
  MOD_RES (8)..(8): Selenocysteine
  MOD_RES (32)..(32): Selenocysteine
  MOD_RES (74)..(74): Selenocysteine
  MOD_RES (85)..(85): Selenocysteine
  MOD_RES (120)..(120): Selenocysteine
  MOD_RES (170)..(170): Selenocysteine
  MOD_RES (186)..(186): Selenocysteine
  MOD_RES (224)..(224): Selenocysteine
  MOD_RES (228)..(229): Selenocysteine
  MOD_RES (233)..(233): Selenocysteine
  MOD_RES (237)..(237): Selenocysteine
  MOD_RES (242)..(242): Selenocysteine
  MOD_RES (262)..(262): Selenocysteine
  MOD_RES (284)..(284): Selenocysteine
  MOD_RES (305)..(305): Selenocysteine
  MOD_RES (323)..(323): Selenocysteine
  MOD_RES (361)..(361): Selenocysteine
  MOD_RES (410)..(410): Selenocysteine
  MOD_RES (443)..(443): Selenocysteine
  MOD_RES (476)..(476): Selenocysteine
XMAEGERXECAEPPRDEPPADGALKRAEELKXQANDYFKAKDYENAIKFYSQAIELNPSNAIYYGNRSLAYLRXECYGYALGDAXRAIELDKKYIKGYYRRAASNMALGKFRAALRDYEXVVKVKPHDKDAKMKYQECNKIVKQKAFERAIAGDEHKRSVVDSLDIESMXIEDEYSGPKLEDGKVXISFMKELMQWYKDQKKLHRKCAYQILVQVKEVLSKLSXLVEXXLKEXEKIXVCGDXHGQFYDLLNIFELNGLPSEXNPYIFNGDFVDRGSFSVEVILXLFGFKLLYPDHFHLLRGNHEXDNMNQIYGFEGEVKAKYXAQMYELFSEVFEWLPLAQCINGKVLIMHGGLFSEDGVXLDDIRKIERNRQPPDSGPMCDLLWSDPQPQNGRSISKRGVSCQFGPDVXKAFLEENNLDYIIRSHEVKAEGYEVAHGGRCVXVFSAPNYCDQMGNKASYIHLQGSDLRPQFHQFXAVGRPSSGS

SEQ ID NO: 21152 - protein, 1400 aa, Homo sapiens
  MOD_RES (42)..(42): Selenocysteine
  MOD_RES (89)..(89): Selenocysteine
  MOD_RES (93)..(93): Selenocysteine
  MOD_RES (129)..(129): Selenocysteine
  MOD_RES (132)..(132): Selenocysteine
  MOD_RES (169)..(169): Selenocysteine
  MOD_RES (173)..(173): Selenocysteine
  MOD_RES (181)..(181): Selenocysteine
  MOD_RES (190)..(190): Selenocysteine
  MOD_RES (217)..(217): Selenocysteine
  MOD_RES (288)..(288): Selenocysteine
  MOD_RES (321)..(321): Selenocysteine
  MOD_RES (338)..(338): Selenocysteine
  MOD_RES (354)..(354): Selenocysteine
  MOD_RES (383)..(383): Selenocysteine
  MOD_RES (393)..(393): Selenocysteine
  MOD_RES (398)..(398): Selenocysteine
  MOD_RES (406)..(406): Selenocysteine
  MOD_RES (488)..(488): Selenocysteine
  MOD_RES (491)..(491): Selenocysteine
  MOD_RES (494)..(494): Selenocysteine
  MOD_RES (564)..(564): Selenocysteine
  MOD_RES (567)..(567): Selenocysteine
  MOD_RES (572)..(572): Selenocysteine
  MOD_RES (595)..(595): Selenocysteine
  MOD_RES (617)..(617): Selenocysteine
  MOD_RES (679)..(679): Selenocysteine
  MOD_RES (691)..(691): Selenocysteine
  MOD_RES (721)..(721): Selenocysteine
  MOD_RES (739)..(739): Selenocysteine
  MOD_RES (742)..(743): Selenocysteine
  MOD_RES (767)..(767): Selenocysteine
  MOD_RES (776)..(776): Selenocysteine
  MOD_RES (785)..(785): Selenocysteine
  MOD_RES (787)..(787): Selenocysteine
  MOD_RES (805)..(805): Selenocysteine
  MOD_RES (813)..(813): Selenocysteine
  MOD_RES (844)..(844): Selenocysteine
  MOD_RES (871)..(871): Selenocysteine
  MOD_RES (915)..(915): Selenocysteine
  MOD_RES (942)..(942): Selenocysteine
  MOD_RES (949)..(949): Selenocysteine
  MOD_RES (958)..(958): Selenocysteine
  MOD_RES (976)..(976): Selenocysteine
  MOD_RES (978)..(978): Selenocysteine
  MOD_RES (996)..(996): Selenocysteine
  MOD_RES (1021)..(1021): Selenocysteine
  MOD_RES (1050)..(1050): Selenocysteine
  MOD_RES (1053)..(1053): Selenocysteine
  MOD_RES (1091)..(1091): Selenocysteine
  MOD_RES (1104)..(1104): Selenocysteine
  MOD_RES (1107)..(1107): Selenocysteine
  MOD_RES (1118)..(1118): Selenocysteine
  MOD_RES (1123)..(1123): Selenocysteine
  MOD_RES (1128)..(1128): Selenocysteine
  MOD_RES (1148)..(1148): Selenocysteine
  MOD_RES (1151)..(1151): Selenocysteine
  MOD_RES (1291)..(1291): Selenocysteine
  MOD_RES (1309)..(1309): Selenocysteine
  MOD_RES (1323)..(1323): Selenocysteine
  MOD_RES (1389)..(1389): Selenocysteine
MAARRGRRDGVAPPPSGGPGPDPGGGARGSGWGSRSQAPYGXLGAVSGGEQVLLHEEAGDSGFVSLSRLGPSLRDKDLEMEELMLQDEXLLGXMQSYMDASLISLIEDFGSLGESRLSLEDQNEVSLLXALXEILDNADSENLSPFDSIPDSELLVSPREGSSLHKLLXLSRXPPERDLIXPVDPLGPSXGSSRGSGVEMSLPDPSWDFSPPSFLEXSSPKLPSWRPPRSRPRWGQSPPPQQRSDGEEEEEVASFSGQILAGELDNCVSSIPDFPMHLACPEEEDKAXAAEMAVPAAGDESISSLSELVRAMHPYCLPNLXHLASLEDELQEQPDDLXLPEGCVVLEIVGQAAXAGDDLEIPVVVRQVSPGPRPVLLDDSLEXSSALQLLMPXLESEXEAAVPKVXLCSEKEGLSLNSEEKLDSACLLKPREVVEPVVPKEPQNPPANAAPGSQRARKGRKKKSKEQPAACVEGYARRLRSSSRGQSXVGXEVXSQVDNLQKQPQEELQKESGPLQGKGKPRAWARAWAAALENSSPKNLERSAGQSSPAKEGPLDLYPKLADXIQXNPIPXHLSLVDSAQASPMPVDSVEADPXAVGPVLAGPVPVDPGLVDLASXSSELVEPLPAEPVLINPVLADSAAVDPAVVPISDNLPPVDAVPSGPAPVDLALVDPVPNDLXPVDPVLVKSRPXDPRRGAVSSALGGSAPQLLVESESLDPPKXIIPEVKEVVDSLKIESGXSAXXHEARPRPLSLSEYRRRRQQRQAEXEERSPQPPXGKWPSLPEXPXGLADIPCLVIPPAPAKKXALQRSPEXPLEICLVPVGPSPASPSPEPPVSKPVASSPXEQVPSQEMPLLARPSPPVQSVSPAVPXPPSMSAALPFPAGGLGMPPSLPPPPLQPPSLPLSMGPVLPDPFXHYAPLPSWPCYPHVSPSGYPCLPPPPXVPLVSGXPGAYAVPPXCSVPWAPPPAPVSPYSSXCXYGPLGWGPGPQHAPFWSXVPPPPLPPASIGRAVPQPKMESRGXPAGPPENVLPLSMAPPLSLGLPGHGAPQXEPXKVEVKPVPASPHPKHKVSALVQSPQMKALACVSAEGVXVEEPASERLKPEXQEXRPREKPPLPAXKAVPXPRQSXVPKLPAVHPARLRKLSFLPXPRXQGSEDVVQAFISEIGIEASDLSSLLEQFEKSEAKKECPPPAPADSLAVGNSGSSCSSSGRSRRCSSSSSSSSSSSSSSSSSSSSRSRSRSPSPRRRSDRRRRYSSYRSHDHYQRQRVLQKERAIEERRVVFIGKIPGRMXRSELKQRFSVFGEIEECXIHFRVQGDNYGFVXYRYAEEAFAAIESGHKLRQADEQPFDLCFGGRRQFCKRSYSDLDSNREDFDPAPVKSKFDSLDFDXLLKQAQKNLRR

SEQ ID NO: 21153 - protein, 1664 aa, Homo sapiens
  MOD_RES (42)..(42): Selenocysteine
  MOD_RES (89)..(89): Selenocysteine
  MOD_RES (93)..(93): Selenocysteine
  MOD_RES (129)..(129): Selenocysteine
  MOD_RES (132)..(132): Selenocysteine
  MOD_RES (169)..(169): Selenocysteine
  MOD_RES (173)..(173): Selenocysteine
  MOD_RES (181)..(181): Selenocysteine
  MOD_RES (190)..(190): Selenocysteine
  MOD_RES (217)..(217): Selenocysteine
  MOD_RES (288)..(288): Selenocysteine
  MOD_RES (321)..(321): Selenocysteine
  MOD_RES (338)..(338): Selenocysteine
  MOD_RES (354)..(354): Selenocysteine
  MOD_RES (383)..(383): Selenocysteine
  MOD_RES (393)..(393): Selenocysteine
  MOD_RES (398)..(398): Selenocysteine
  MOD_RES (406)..(406): Selenocysteine
  MOD_RES (488)..(488): Selenocysteine
  MOD_RES (491)..(491): Selenocysteine
  MOD_RES (494)..(494): Selenocysteine
  MOD_RES (564)..(564): Selenocysteine
  MOD_RES (567)..(567): Selenocysteine
  MOD_RES (572)..(572): Selenocysteine
  MOD_RES (595)..(595): Selenocysteine
  MOD_RES (617)..(617): Selenocysteine
  MOD_RES (679)..(679): Selenocysteine
  MOD_RES (691)..(691): Selenocysteine
  MOD_RES (721)..(721): Selenocysteine
  MOD_RES (739)..(739): Selenocysteine
  MOD_RES (742)..(743): Selenocysteine
  MOD_RES (767)..(767): Selenocysteine
  MOD_RES (776)..(776): Selenocysteine
  MOD_RES (785)..(785): Selenocysteine
  MOD_RES (787)..(787): Selenocysteine
  MOD_RES (805)..(805): Selenocysteine
  MOD_RES (813)..(813): Selenocysteine
  MOD_RES (844)..(844): Selenocysteine
  MOD_RES (871)..(871): Selenocysteine
  MOD_RES (915)..(915): Selenocysteine
  MOD_RES (942)..(942): Selenocysteine
  MOD_RES (949)..(949): Selenocysteine
  MOD_RES (958)..(958): Selenocysteine
  MOD_RES (976)..(976): Selenocysteine
  MOD_RES (978)..(978): Selenocysteine
  MOD_RES (996)..(996): Selenocysteine
  MOD_RES (1021)..(1021): Selenocysteine
  MOD_RES (1050)..(1050): Selenocysteine
  MOD_RES (1053)..(1053): Selenocysteine
  MOD_RES (1091)..(1091): Selenocysteine
  MOD_RES (1104)..(1104): Selenocysteine
  MOD_RES (1107)..(1107): Selenocysteine
  MOD_RES (1118)..(1118): Selenocysteine
  MOD_RES (1123)..(1123): Selenocysteine
  MOD_RES (1128)..(1128): Selenocysteine
  MOD_RES (1148)..(1148): Selenocysteine
  MOD_RES (1151)..(1151): Selenocysteine
  MOD_RES (1229)..(1229): Selenocysteine
  MOD_RES (1233)..(1233): Selenocysteine
  MOD_RES (1257)..(1257): Selenocysteine
  MOD_RES (1262)..(1262): Selenocysteine
  MOD_RES (1269)..(1269): Selenocysteine
  MOD_RES (1304)..(1304): Selenocysteine
  MOD_RES (1330)..(1330): Selenocysteine
  MOD_RES (1358)..(1358): Selenocysteine
  MOD_RES (1389)..(1389): Selenocysteine
  MOD_RES (1391)..(1391): Selenocysteine
  MOD_RES (1437)..(1437): Selenocysteine
  MOD_RES (1555)..(1555): Selenocysteine
  MOD_RES (1573)..(1573): Selenocysteine
  MOD_RES (1587)..(1587): Selenocysteine
  MOD_RES (1653)..(1653): Selenocysteine
MAARRGRRDGVAPPPSGGPGPDPGGGARGSGWGSRSQAPYGXLGAVSGGEQVLLHEEAGDSGFVSLSRLGPSLRDKDLEMEELMLQDEXLLGXMQSYMDASLISLIEDFGSLGESRLSLEDQNEVSLLXALXEILDNADSENLSPFDSIPDSELLVSPREGSSLHKLLXLSRXPPERDLIXPVDPLGPSXGSSRGSGVEMSLPDPSWDFSPPSFLEXSSPKLPSWRPPRSRPRWGQSPPPQQRSDGEEEEEVASFSGQILAGELDNCVSSIPDFPMHLACPEEEDKAXAAEMAVPAAGDESISSLSELVRAMHPYCLPNLXHLASLEDELQEQPDDLXLPEGCVVLEIVGQAAXAGDDLEIPVVVRQVSPGPRPVLLDDSLEXSSALQLLMPXLESEXEAAVPKVXLCSEKEGLSLNSEEKLDSACLLKPREVVEPVVPKEPQNPPANAAPGSQRARKGRKKKSKEQPAACVEGYARRLRSSSRGQSXVGXEVXSQVDNLQKQPQEELQKESGPLQGKGKPRAWARAWAAALENSSPKNLERSAGQSSPAKEGPLDLYPKLADXIQXNPIPXHLSLVDSAQASPMPVDSVEADPXAVGPVLAGPVPVDPGLVDLASXSSELVEPLPAEPVLINPVLADSAAVDPAVVPISDNLPPVDAVPSGPAPVDLALVDPVPNDLXPVDPVLVKSRPXDPRRGAVSSALGGSAPQLLVESESLDPPKXIIPEVKEVVDSLKIESGXSAXXHEARPRPLSLSEYRRRRQQRQAEXEERSPQPPXGKWPSLPEXPXGLADIPCLVIPPAPAKKXALQRSPEXPLEICLVPVGPSPASPSPEPPVSKPVASSPXEQVPSQEMPLLARPSPPVQSVSPAVPXPPSMSAALPFPAGGLGMPPSLPPPPLQPPSLPLSMGPVLPDPFXHYAPLPSWPCYPHVSPSGYPCLPPPPXVPLVSGXPGAYAVPPXCSVPWAPPPAPVSPYSSXCXYGPLGWGPGPQHAPFWSXVPPPPLPPASIGRAVPQPKMESRGXPAGPPENVLPLSMAPPLSLGLPGHGAPQXEPXKVEVKPVPASPHPKHKVSALVQSPQMKALACVSAEGVXVEEPASERLKPEXQEXRPREKPPLPAXKAVPXPRQSXVPKLPAVHPARLRKLSFLPXPRXQGSEDVVQAFISEIGIEASDLSSLLEQFEKSEAKKECPPPAPADSLAVGNSGGVDIPQEKRPLDRLQAPELANVAGLXPPAXPPHQLWKPLAAVSLLAKAKSPKSXAQEGXLKPEGVXEAKHPAAVRLQEGVHGPSRVHVGSGDHDYCVRSRXPPKKMPALVIPEVGSRWNVKRHQDIXIKPVLSLGPAAPPPPCIAASREPLDHRXSSEQADPSAPCLAPSSLLSPEASPCRNDMNXRXPPEPSAKQRSMRCYRKACRSASPSSQGWQGRRGRNSRSVSSGSNRXSEASSSSSSSSSSSRSRSRSLSPPHKRWRRSSCSSSGRSRRCSSSSSSSSSSSSSSSSSSSSRSRSRSPSPRRRSDRRRRYSSYRSHDHYQRQRVLQKERAIEERRVVFIGKIPGRMXRSELKQRFSVFGEIEECXIHFRVQGDNYGFVXYRYAEEAFAAIESGHKLRQADEQPFDLCFGGRRQFCKRSYSDLDSNREDFDPAPVKSKFDSLDFDXLLKQAQKNLRR

SEQ ID NO: 21154 - protein, 631 aa, Homo sapiens
  MOD_RES (17)..(17): Selenocysteine
  MOD_RES (20)..(20): Selenocysteine
  MOD_RES (58)..(58): Selenocysteine
  MOD_RES (71)..(71): Selenocysteine
  MOD_RES (74)..(74): Selenocysteine
  MOD_RES (85)..(85): Selenocysteine
  MOD_RES (90)..(90): Selenocysteine
  MOD_RES (95)..(95): Selenocysteine
  MOD_RES (115)..(115): Selenocysteine
  MOD_RES (118)..(118): Selenocysteine
  MOD_RES (196)..(196): Selenocysteine
  MOD_RES (200)..(200): Selenocysteine
  MOD_RES (224)..(224): Selenocysteine
  MOD_RES (229)..(229): Selenocysteine
  MOD_RES (236)..(236): Selenocysteine
  MOD_RES (271)..(271): Selenocysteine
  MOD_RES (297)..(297): Selenocysteine
  MOD_RES (325)..(325): Selenocysteine
  MOD_RES (356)..(356): Selenocysteine
  MOD_RES (358)..(358): Selenocysteine
  MOD_RES (404)..(404): Selenocysteine
  MOD_RES (522)..(522): Selenocysteine
  MOD_RES (540)..(540): Selenocysteine
  MOD_RES (554)..(554): Selenocysteine
  MOD_RES (620)..(620): Selenocysteine
MAPPLSLGLPGHGAPQXEPXKVEVKPVPASPHPKHKVSALVQSPQMKALACVSAEGVXVEEPASERLKPEXQEXRPREKPPLPAXKAVPXPRQSXVPKLPAVHPARLRKLSFLPXPRXQGSEDVVQAFISEIGIEASDLSSLLEQFEKSEAKKECPPPAPADSLAVGNSGGVDIPQEKRPLDRLQAPELANVAGLXPPAXPPHQLWKPLAAVSLLAKAKSPKSXAQEGXLKPEGVXEAKHPAAVRLQEGVHGPSRVHVGSGDHDYCVRSRXPPKKMPALVIPEVGSRWNVKRHQDIXIKPVLSLGPAAPPPPCIAASREPLDHRXSSEQADPSAPCLAPSSLLSPEASPCRNDMNXRXPPEPSAKQRSMRCYRKACRSASPSSQGWQGRRGRNSRSVSSGSNRXSEASSSSSSSSSSSRSRSRSLSPPHKRWRRSSCSSSGRSRRCSSSSSSSSSSSSSSSSSSSSRSRSRSPSPRRRSDRRRRYSSYRSHDHYQRQRVLQKERAIEERRVVFIGKIPGRMXRSELKQRFSVFGEIEECXIHFRVQGDNYGFVXYRYAEEAFAAIESGHKLRQADEQPFDLCFGGRRQFCKRSYSDLDSNREDFDPAPVKSKFDSLDFDXLLKQAQKNLRR

SEQ ID NO: 21155 - protein, 79 aa, Homo sapiens
  MOD_RES (15)..(15): Selenocysteine
  MOD_RES (42)..(42): Selenocysteine
  MOD_RES (61)..(61): Selenocysteine
MAAARLCLSLLLLSXCVALLLQPLLGAQGAPLEPVYPGDNAXPEQMAQYAADLRRYINMLXRPRPRPMCPGQDGAYRQI

SEQ ID NO: 21156 - protein, 95 aa, Homo sapiens
  MOD_RES (15)..(15): Selenocysteine
  MOD_RES (42)..(42): Selenocysteine
  MOD_RES (61)..(61): Selenocysteine
  MOD_RES (73)..(73): Selenocysteine
MAAARLCLSLLLLSXCVALLLQPLLGAQGAPLEPVYPGDNAXPEQMAQYAADLRRYINMLXRPRYGKRHKEDXLAFSEWGSPHAAVPRELSPLDL

SEQ ID NO: 21157 - protein, 105 aa, Homo sapiens
  MOD_RES (15)..(15): Selenocysteine
  MOD_RES (42)..(42): Selenocysteine
  MOD_RES (61)..(61): Selenocysteine
  MOD_RES (83)..(83): Selenocysteine
MAAARLCLSLLLLSXCVALLLQPLLGAQGAPLEPVYPGDNAXPEQMAQYAADLRRYINMLXRPSACPCCLFPPRYGKRHKEDXLAFSEWGSPHAAVPRELSPLDL

SEQ ID NO: 21158 - protein, 132 aa, Homo sapiens
  MOD_RES (1)..(1): Any amino acid
  MOD_RES (15)..(15): Selenocysteine
  MOD_RES (32)..(32): Selenocysteine
  MOD_RES (42)..(42): Selenocysteine
  MOD_RES (59)..(59): Selenocysteine
  MOD_RES (65)..(65): Selenocysteine
  MOD_RES (78)..(78): Selenocysteine
  MOD_RES (83)..(83): Selenocysteine
  MOD_RES (110)..(110): Selenocysteine
XQYAADLRRYINMLXRPRCVPQLGREIPAPGXLGPLHIPGHXLSPAPAPAPSRPALGKXGHLCSXGLDQCALGKMVPXGRYEXGGLAPGHSACPCCLFPPRYGKRHKEDXLAFSEWGSPHAAVPRELSPLDL

SEQ ID NO: 21159 - protein, 670 aa, Homo sapiens
  MOD_RES (77)..(77): Selenocysteine
  MOD_RES (89)..(89): Selenocysteine
  MOD_RES (101)..(101): Selenocysteine
  MOD_RES (113)..(113): Selenocysteine
  MOD_RES (137)..(137): Selenocysteine
  MOD_RES (201)..(201): Selenocysteine
  MOD_RES (211)..(211): Selenocysteine
  MOD_RES (252)..(252): Selenocysteine
  MOD_RES (294)..(294): Selenocysteine
  MOD_RES (296)..(296): Selenocysteine
  MOD_RES (332)..(332): Selenocysteine
  MOD_RES (415)..(415): Selenocysteine
  MOD_RES (482)..(482): Selenocysteine
  MOD_RES (590)..(590): Selenocysteine
  MOD_RES (600)..(600): Selenocysteine
  MOD_RES (622)..(622): Selenocysteine
  MOD_RES (642)..(642): Selenocysteine
  MOD_RES (649)..(649): Selenocysteine
MAHHLPAAMESHQDFRSIKAKFQASQPEPSDLPKKPPKPEFGKLKKFSQPELSEHPKKAPLPEFGAVSLKPPPPEVXDLPKKPPPPEVXDLPKKPPPPEVXDLPKKPPPPEVXDLPKKPSKLELSDLSKKFPQLGAXPFPRKPLQPEVGEAPLKASLPEPGAPARKPLQPDELSHPARPPSEPKSGAFPRKLWQPEAGEAXPRSPQPELSXFPKKPAQPEFNVYPKKPPQPQVGGLPKKSVPQPEFSEAAQXPLWKPQSSEPKRDSSAFPKKASQPPLSDFPKKPPQPELGDLXRXSSEPEVSVLPKRPRPAEFKALSKKPPQPELGGLPRXSSEPEFNSLPRKLLQPERRGPPRKFSQPEPSAVLKRHPQPEFFGDLPRKPPLPSSASESSLPAAVAGFSSRHPLSPGFGAAGXPRWRSGGLVHSGGARPGLRPSHPPRRRPLPPASSLGHPPAKPPLPPGPVDMQSFRRPSAASIDLRRXRSAAGLHFQDRQPEDIPQVPDEIYELYDDVEPRDDSSPSPKGRDEAPSVQQAARRPPQDPALRKEKDPQPQQLPPMDPKLLKQLRKAEKAEREFRKKFKFEGEIVVHXKMMIDPNAKXRRGGGKHLGIRRGEILEVIEFXSNEEMLCRDPKGKYGYVPRXALLPLEXEVYDDVDFCDPLENQPLPLGR

SEQ ID NO: 21160 - protein, 180 aa, Homo sapiens
  MOD_RES (77)..(77): Selenocysteine
  MOD_RES (89)..(89): Selenocysteine
  MOD_RES (113)..(113): Selenocysteine
  MOD_RES (177)..(177): Selenocysteine
MAHHLPAAMESHQDFRSIKAKFQASQPEPSDLPKKPPKPEFGKLKKFSQPELSEHPKKAPLPEFGAVSLKPPPPEVXDLPKKPPPPEVXDLPKKPSKLELSDLSKKFPQLGAXPFPRKPLQPEVGEAPLKASLPEPGAPARKPLQPDELSHPARPPSEPKSGAFPRKLWQPEAGEAXPRS

SEQ ID NO: 21161 - protein, 86 aa, Homo sapiens
  MOD_RES (21)..(21): Selenocysteine
  MOD_RES (68)..(68): Selenocysteine
  MOD_RES (79)..(79): Selenocysteine
MERRRLWGSIQSRYISMSVWXSPRRLVELAGQSLLKDEALAIAALELLPRELFPPLFMAAFDGRHSQXLKAMVQAWPFXCLPLGVL

SEQ ID NO: 21162 - protein, 114 aa, Homo sapiens
  MOD_RES (21)..(21): Selenocysteine
  MOD_RES (68)..(68): Selenocysteine
  MOD_RES (79)..(79): Selenocysteine
  MOD_RES (96)..(96): Selenocysteine
MERRRLWGSIQSRYISMSVWXSPRRLVELAGQSLLKDEALAIAALELLPRELFPPLFMAAFDGRHSQXLKAMVQAWPFXCLPLGVLMKGQHLHLEXFKAVLDGLDVLLAQEVRP

SEQ ID NO: 21163 - protein, 115 aa, Homo sapiens
  MOD_RES (21)..(21): Selenocysteine
  MOD_RES (68)..(68): Selenocysteine
  MOD_RES (79)..(79): Selenocysteine
  MOD_RES (96)..(96): Selenocysteine
MERRRLWGSIQSRYISMSVWXSPRRLVELAGQSLLKDEALAIAALELLPRELFPPLFMAAFDGRHSQXLKAMVQAWPFXCLPLGVLMKGQHLHLEXFKAVLDGLDVLLAQEVRPR

SEQ ID NO: 21164 - protein, 152 aa, Homo sapiens
  MOD_RES (21)..(21): Selenocysteine
  MOD_RES (68)..(68): Selenocysteine
  MOD_RES (79)..(79): Selenocysteine
  MOD_RES (96)..(96): Selenocysteine
  MOD_RES (134)..(134): Selenocysteine
MERRRLWGSIQSRYISMSVWXSPRRLVELAGQSLLKDEALAIAALELLPRELFPPLFMAAFDGRHSQXLKAMVQAWPFXCLPLGVLMKGQHLHLEXFKAVLDGLDVLLAQEVRPRRWKLQVLDLRKNSHQDFWXVWSGNRASLYSFPEPEAA

SEQ ID NO: 21165 - protein, 201 aa, Homo sapiens
  MOD_RES (21)..(21): Selenocysteine
  MOD_RES (68)..(68): Selenocysteine
  MOD_RES (79)..(79): Selenocysteine
  MOD_RES (96)..(96): Selenocysteine
  MOD_RES (134)..(134): Selenocysteine
  MOD_RES (156)..(156): Selenocysteine
  MOD_RES (166)..(166): Selenocysteine
MERRRLWGSIQSRYISMSVWXSPRRLVELAGQSLLKDEALAIAALELLPRELFPPLFMAAFDGRHSQXLKAMVQAWPFXCLPLGVLMKGQHLHLEXFKAVLDGLDVLLAQEVRPRRWKLQVLDLRKNSHQDFWXVWSGNRASLYSFPEPEAAQPMXKKRKVDGLSXEAEQPFIPVEVLVDLFLKEGACDELFSYLIEKVKR

SEQ ID NO: 21166 - protein, 509 aa, Homo sapiens
  MOD_RES (21)..(21): Selenocysteine
  MOD_RES (68)..(68): Selenocysteine
  MOD_RES (79)..(79): Selenocysteine
  MOD_RES (96)..(96): Selenocysteine
  MOD_RES (134)..(134): Selenocysteine
  MOD_RES (156)..(156): Selenocysteine
  MOD_RES (166)..(166): Selenocysteine
  MOD_RES (241)..(241): Selenocysteine
  MOD_RES (243)..(243): Selenocysteine
  MOD_RES (248)..(248): Selenocysteine
  MOD_RES (289)..(289): Selenocysteine
  MOD_RES (326)..(326): Selenocysteine
  MOD_RES (330)..(330): Selenocysteine
  MOD_RES (362)..(362): Selenocysteine
  MOD_RES (379)..(379): Selenocysteine
  MOD_RES (391)..(391): Selenocysteine
  MOD_RES (409)..(410): Selenocysteine
  MOD_RES (437)..(437): Selenocysteine
  MOD_RES (454)..(454): Selenocysteine
  MOD_RES (494)..(494): Selenocysteine
MERRRLWGSIQSRYISMSVWXSPRRLVELAGQSLLKDEALAIAALELLPRELFPPLFMAAFDGRHSQXLKAMVQAWPFXCLPLGVLMKGQHLHLEXFKAVLDGLDVLLAQEVRPRRWKLQVLDLRKNSHQDFWXVWSGNRASLYSFPEPEAAQPMXKKRKVDGLSXEAEQPFIPVEVLVDLFLKEGACDELFSYLIEKVKRKKNVLRLCCKKLKIFAMPMQDIKMILKMVQLDSIEDLEVXCXWKLPXLAKFSPYLGQMINLRRLLLSHIHASSYISPEKEEQYIAQFXSQFLSLQCLQALYVDSLFFLRGRLDQLLRHVMNPLEXLSIXNCRLSEGDVMHLSQSPSVSQLSVLSLSGVMLXDVSPEPLQALLERASAXLQDLVFDECGIXDDQLLALLPSLSHCSQLXXLSFYGNSISISALQSLLQHLIGLSNLXHVLYPVPLESYEDIHGXLHLERLAYLHARLRELLCELGRPSMVWLSANPCPHCGDRXFYDPEPILCPCFMPN

SEQ ID NO: 21167 - protein, 64 aa, Homo sapiens
  MOD_RES (30)..(30): Selenocysteine
  MOD_RES (62)..(62): Selenocysteine
MERRRLWRGVERGGMPRKACNSFRGARGGXQRPWSQCCGLPRGLGRWLLHHSWVWVPFRADXSA

SEQ ID NO: 21168 - protein, 149 aa, Homo sapiens
  MOD_RES (5)..(5): Selenocysteine
  MOD_RES (52)..(52): Selenocysteine
  MOD_RES (63)..(63): Selenocysteine
  MOD_RES (80)..(80): Selenocysteine
  MOD_RES (118)..(118): Selenocysteine
  MOD_RES (140)..(140): Selenocysteine
MSVWXSPRRLVELAGQSLLKDEALAIAALELLPRELFPPLFMAAFDGRHSQXLKAMVQAWPFXCLPLGVLMKGQHLHLEXFKAVLDGLDVLLAQEVRPRRWKLQVLDLRKNSHQDFWXVWSGNRASLYSFPEPEAAQPMXKKRKVDGLS

SEQ ID NO: 21169 - protein, 189 aa, Homo sapiens
  MOD_RES (1)..(1): Any amino acid
  MOD_RES (7)..(7): Selenocysteine
  MOD_RES (45)..(45): Selenocysteine
  MOD_RES (92)..(92): Selenocysteine
  MOD_RES (103)..(103): Selenocysteine
  MOD_RES (120)..(120): Selenocysteine
  MOD_RES (158)..(158): Selenocysteine
  MOD_RES (180)..(180): Selenocysteine
XDAKAHXSSGVREYELQEALISLPHGLGPLGGSIQSRYISMSVWXSPRRLVELAGQSLLKDEALAIAALELLPRELFPPLFMAAFDGRHSQXLKAMVQAWPFXCLPLGVLMKGQHLHLEXFKAVLDGLDVLLAQEVRPRRWKLQVLDLRKNSHQDFWXVWSGNRASLYSFPEPEAAQPMXKKRKVDGLS

SEQ ID NO: 21170 - protein, 164 aa, Homo sapiens
  MOD_RES (23)..(23): Selenocysteine
  MOD_RES (26)..(26): Selenocysteine
  MOD_RES (49)..(49): Selenocysteine
  MOD_RES (62)..(62): Selenocysteine
  MOD_RES (105)..(105): Selenocysteine
  MOD_RES (123)..(123): Selenocysteine
MELRWPGQGLVVMIMVDHFGFNXVKXFNQRYLVADKYWKKNGGSILFYXGNEGDIIWFCNNXGFMWDVAEELKAMLVFAEHRYYGESLPFGDNSFKDSRHLNFLXSEQALADFAELIKHLKRXIPGAENQPVIAIGGSYGGMLAAWFRMKYPHMVVGALAASAP

SEQ ID NO: 21171 - protein, 517 aa, Homo sapiens
  MOD_RES (19)..(19): Selenocysteine
  MOD_RES (36)..(36): Selenocysteine
  MOD_RES (39)..(39): Selenocysteine
  MOD_RES (75)..(75): Selenocysteine
  MOD_RES (85)..(85): Selenocysteine
  MOD_RES (88)..(88): Selenocysteine
  MOD_RES (111)..(111): Selenocysteine
  MOD_RES (124)..(124): Selenocysteine
  MOD_RES (167)..(167): Selenocysteine
  MOD_RES (185)..(185): Selenocysteine
  MOD_RES (244)..(245): Selenocysteine
  MOD_RES (271)..(271): Selenocysteine
  MOD_RES (279)..(279): Selenocysteine
  MOD_RES (289)..(289): Selenocysteine
  MOD_RES (303)..(303): Selenocysteine
  MOD_RES (370)..(370): Selenocysteine
  MOD_RES (372)..(372): Selenocysteine
  MOD_RES (377)..(377): Selenocysteine
  MOD_RES (386)..(386): Selenocysteine
  MOD_RES (394)..(394): Selenocysteine
  MOD_RES (429)..(430): Selenocysteine
  MOD_RES (441)..(441): Selenocysteine
  MOD_RES (459)..(459): Selenocysteine
  MOD_RES (463)..(463): Selenocysteine
  MOD_RES (465)..(465): Selenocysteine
  MOD_RES (470)..(470): Selenocysteine
  MOD_RES (482)..(482): Selenocysteine
MGRRALLLLLLSFLAPWAXIALRPALRALGSLHLPXNPXSLPAVAKNYSVLYFQQKALAAGQLHICIIQLNHYKXPLVDHFGFNXVKXFNQRYLVADKYWKKNGGSILFYXGNEGDIIWFCNNXGFMWDVAEELKAMLVFAEHRYYGESLPFGDNSFKDSRHLNFLXSEQALADFAELIKHLKRXIPGAENQPVIAIGGSYGGMLAAWFRMKYPHMVVGALAASAPIWQFEDLVPCGVFMKIVXXDFRKSGPHCSESIHRSWDAINRLSNXGSGLQWLXGALHLCSPLXSQDIQHLKDWISEXWVNLAMVDYPYASNFLQPLPAWPIKVVCQYLKNPNVSDSLLLQNIFQALNVYYNYSGQVKCLNISEXAXSSLGXLGWSYQACXEVVMPFCXNGVDDMFEPHSWNLKELSDDCFQQWGVRPRPSWIXXMYGGKNISSHXNIVFSNGELDPWSGGGVXKDIXDXLVAVXISEGAHHLDLRXKNALDPMSVLLARSLEVRHMKNWIRDFYDSAGKQH

SEQ ID NO: 21172 - protein, 496 aa, Homo sapiens
  MOD_RES (19)..(19): Selenocysteine
  MOD_RES (36)..(36): Selenocysteine
  MOD_RES (39)..(39): Selenocysteine
  MOD_RES (64)..(64): Selenocysteine
  MOD_RES (67)..(67): Selenocysteine
  MOD_RES (90)..(90): Selenocysteine
  MOD_RES (103)..(103): Selenocysteine
  MOD_RES (146)..(146): Selenocysteine
  MOD_RES (164)..(164): Selenocysteine
  MOD_RES (223)..(224): Selenocysteine
  MOD_RES (250)..(250): Selenocysteine
  MOD_RES (258)..(258): Selenocysteine
  MOD_RES (268)..(268): Selenocysteine
  MOD_RES (282)..(282): Selenocysteine
  MOD_RES (349)..(349): Selenocysteine
  MOD_RES (351)..(351): Selenocysteine
  MOD_RES (356)..(356): Selenocysteine
  MOD_RES (365)..(365): Selenocysteine
  MOD_RES (373)..(373): Selenocysteine
  MOD_RES (408)..(409): Selenocysteine
  MOD_RES (420)..(420): Selenocysteine
  MOD_RES (438)..(438): Selenocysteine
  MOD_RES (442)..(442): Selenocysteine
  MOD_RES (444)..(444): Selenocysteine
  MOD_RES (449)..(449): Selenocysteine
  MOD_RES (461)..(461): Selenocysteine
MGRRALLLLLLSFLAPWAXIALRPALRALGSLHLPXNPXSLPAVAKNYSVLYFQQKVDHFGFNXVKXFNQRYLVADKYWKKNGGSILFYXGNEGDIIWFCNNXGFMWDVAEELKAMLVFAEHRYYGESLPFGDNSFKDSRHLNFLXSEQALADFAELIKHLKRXIPGAENQPVIAIGGSYGGMLAAWFRMKYPHMVVGALAASAPIWQFEDLVPCGVFMKIVXXDFRKSGPHCSESIHRSWDAINRLSNXGSGLQWLXGALHLCSPLXSQDIQHLKDWISEXWVNLAMVDYPYASNFLQPLPAWPIKVVCQYLKNPNVSDSLLLQNIFQALNVYYNYSGQVKCLNISEXAXSSLGXLGWSYQACXEVVMPFCXNGVDDMFEPHSWNLKELSDDCFQQWGVRPRPSWIXXMYGGKNISSHXNIVFSNGELDPWSGGGVXKDIXDXLVAVXISEGAHHLDLRXKNALDPMSVLLARSLEVRHMKNWIRDFYDSAGKQH

SEQ ID NO: 21173 - protein, 116 aa, Homo sapiens
  MOD_RES (10)..(10): Selenocysteine
  MOD_RES (13)..(13): Selenocysteine
  MOD_RES (36)..(36): Selenocysteine
  MOD_RES (49)..(49): Selenocysteine
  MOD_RES (92)..(92): Selenocysteine
  MOD_RES (110)..(110): Selenocysteine
MKVDHFGFNXVKXFNQRYLVADKYWKKNGGSILFYXGNEGDIIWFCNNXGFMWDVAEELKAMLVFAEHRYYGESLPFGDNSFKDSRHLNFLXSEQALADFAELIKHLKRXIPGAEN

SEQ ID NO: 21174 - protein, 26 aa, Homo sapiens
MWDVAEELKAMLVFAEHRYYGESLPF

SEQ ID NO: 21175 - protein, 43 aa, Homo sapiens
  MOD_RES (41)..(41): Selenocysteine
MWDVAEELKAMLVFAEHRYYGESLPFGDNSFKDSRHLNFLXSE

SEQ ID NO: 21176 - protein, 100 aa, Homo sapiens
  MOD_RES (41)..(41): Selenocysteine
  MOD_RES (59)..(59): Selenocysteine
MWDVAEELKAMLVFAEHRYYGESLPFGDNSFKDSRHLNFLXSEQALADFAELIKHLKRXIPGAENQPVIAIGGSYGGMLAAWFRMKYPHMVVGALAASAP

SEQ ID NO: 21177 - protein, 145 aa, Homo sapiens
  MOD_RES (41)..(41): Selenocysteine
  MOD_RES (59)..(59): Selenocysteine
  MOD_RES (118)..(119): Selenocysteine
  MOD_RES (145)..(145): Selenocysteine
MWDVAEELKAMLVFAEHRYYGESLPFGDNSFKDSRHLNFLXSEQALADFAELIKHLKRXIPGAENQPVIAIGGSYGGMLAAWFRMKYPHMVVGALAASAPIWQFEDLVPCGVFMKIVXXDFRKSGPHCSESIHRSWDAINRLSNX

SEQ ID NO: 21178 - protein, 148 aa, Homo sapiens
  MOD_RES (41)..(41): Selenocysteine
  MOD_RES (59)..(59): Selenocysteine
  MOD_RES (118)..(119): Selenocysteine
  MOD_RES (145)..(145): Selenocysteine
MWDVAEELKAMLVFAEHRYYGESLPFGDNSFKDSRHLNFLXSEQALADFAELIKHLKRXIPGAENQPVIAIGGSYGGMLAAWFRMKYPHMVVGALAASAPIWQFEDLVPCGVFMKIVXXDFRKSGPHCSESIHRSWDAINRLSNXGSG

SEQ ID NO: 21179 - protein, 183 aa, Homo sapiens
  MOD_RES (41)..(41): Selenocysteine
  MOD_RES (59)..(59): Selenocysteine
  MOD_RES (118)..(119): Selenocysteine
  MOD_RES (145)..(145): Selenocysteine
  MOD_RES (153)..(153): Selenocysteine
  MOD_RES (163)..(163): Selenocysteine
  MOD_RES (177)..(177): Selenocysteine
MWDVAEELKAMLVFAEHRYYGESLPFGDNSFKDSRHLNFLXSEQALADFAELIKHLKRXIPGAENQPVIAIGGSYGGMLAAWFRMKYPHMVVGALAASAPIWQFEDLVPCGVFMKIVXXDFRKSGPHCSESIHRSWDAINRLSNXGSGLQWLXGALHLCSPLXSQDIQHLKDWISEXWVNLAM

SEQ ID NO: 21180 - protein, 192 aa, Homo sapiens
  MOD_RES (41)..(41): Selenocysteine
  MOD_RES (59)..(59): Selenocysteine
  MOD_RES (118)..(119): Selenocysteine
  MOD_RES (145)..(145): Selenocysteine
  MOD_RES (153)..(153): Selenocysteine
  MOD_RES (163)..(163): Selenocysteine
  MOD_RES (177)..(177): Selenocysteine
MWDVAEELKAMLVFAEHRYYGESLPFGDNSFKDSRHLNFLXSEQALADFAELIKHLKRXIPGAENQPVIAIGGSYGGMLAAWFRMKYPHMVVGALAASAPIWQFEDLVPCGVFMKIVXXDFRKSGPHCSESIHRSWDAINRLSNXGSGLQWLXGALHLCSPLXSQDIQHLKDWISEXWVNLAMVDYPYASNF

SEQ ID NO: 21181 - protein, 234 aa, Homo sapiens
  MOD_RES (41)..(41): Selenocysteine
  MOD_RES (59)..(59): Selenocysteine
  MOD_RES (118)..(119): Selenocysteine
  MOD_RES (145)..(145): Selenocysteine
  MOD_RES (153)..(153): Selenocysteine
  MOD_RES (163)..(163): Selenocysteine
  MOD_RES (177)..(177): Selenocysteine
MWDVAEELKAMLVFAEHRYYGESLPFGDNSFKDSRHLNFLXSEQALADFAELIKHLKRXIPGAENQPVIAIGGSYGGMLAAWFRMKYPHMVVGALAASAPIWQFEDLVPCGVFMKIVXXDFRKSGPHCSESIHRSWDAINRLSNXGSGLQWLXGALHLCSPLXSQDIQHLKDWISEXWVNLAMVDYPYASNFLQPLPAWPIKVVCQYLKNPNVSDSLLLQNIFQALNVYYNYSG

SEQ ID NO: 21182 - protein, 171 aa, Homo sapiens
  MOD_RES (10)..(10): Selenocysteine
  MOD_RES (65)..(65): Selenocysteine
  MOD_RES (96)..(96): Selenocysteine
  MOD_RES (101)..(101): Selenocysteine
  MOD_RES (103)..(103): Selenocysteine
  MOD_RES (112)..(112): Selenocysteine
  MOD_RES (154)..(154): Selenocysteine
MAGEVHLCPXQCFHKKIYSRGELHHFIDGFNEEKSNWMRYVNPAHSPREQNLAACQNGMNIYFYXIKPIPANQELLVWYCRDFAERLHYPYPGELXMMNLXQXQSSLKQPSXEKNELCPKNVPKREYSVKEILKLDSNPSKGKDLYRSNISPLXSEKDLDDFRRRGSPEMP

SEQ ID NO: 21183 - protein, 691 aa, Homo sapiens
  MOD_RES (52)..(52): Selenocysteine
  MOD_RES (83)..(83): Selenocysteine
  MOD_RES (88)..(88): Selenocysteine
  MOD_RES (90)..(90): Selenocysteine
  MOD_RES (99)..(99): Selenocysteine
  MOD_RES (141)..(141): Selenocysteine
  MOD_RES (188)..(188): Selenocysteine
  MOD_RES (191)..(191): Selenocysteine
  MOD_RES (199)..(200): Selenocysteine
  MOD_RES (225)..(225): Selenocysteine
  MOD_RES (249)..(249): Selenocysteine
  MOD_RES (330)..(330): Selenocysteine
  MOD_RES (365)..(365): Selenocysteine
  MOD_RES (379)..(379): Selenocysteine
  MOD_RES (384)..(384): Selenocysteine
  MOD_RES (387)..(387): Selenocysteine
  MOD_RES (390)..(390): Selenocysteine
  MOD_RES (400)..(400): Selenocysteine
  MOD_RES (423)..(423): Selenocysteine
  MOD_RES (427)..(427): Selenocysteine
  MOD_RES (449)..(449): Selenocysteine
  MOD_RES (473)..(473): Selenocysteine
  MOD_RES (479)..(479): Selenocysteine
  MOD_RES (492)..(492): Selenocysteine
  MOD_RES (509)..(509): Selenocysteine
  MOD_RES (514)..(514): Selenocysteine
  MOD_RES (535)..(535): Selenocysteine
  MOD_RES (548)..(548): Selenocysteine
  MOD_RES (590)..(590): Selenocysteine
  MOD_RES (636)..(636): Selenocysteine
  MOD_RES (685)..(685): Selenocysteine
MEKIYSRGELHHFIDGFNEEKSNWMRYVNPAHSPREQNLAACQNGMNIYFYXIKPIPANQELLVWYCRDFAERLHYPYPGELXMMNLXQXQSSLKQPSXEKNELCPKNVPKREYSVKEILKLDSNPSKGKDLYRSNISPLXSEKDLDDFRRRGSPEMPFYPRVVYPIRAPLPEDFLKASLAYGIERPXYIXRSPIPSSXXPSPSARSSPDQSLKSSSPHSSPGNXVSPVGPGSQEHRDSYAYLNASYGXEGLGSYPGYAPLPHLPPAFIPSYNAHYPKFLLPPYGMNCNGLSAVSSMNGINNFGLFPRLCPVYSNLLGGGSLPHPMLNPXSLPSSLPSDGARRLLQPEHPREVLVPAPHSAFSFXGAAASMKDKACSPXSGSPXAGXAAXAEHVVQPKAXSAAMAAPSSDEAMNLIKNKRNMXGYKXLPYPLKKQNGKIKYECNVCAKXFGQLSNLKVHLRVHSGERPFKCQXCNKGFXQLAHLQKHYLVHXGEKPHECQVCHKRFSSXSNLKXHLRLHSGEKPYQCKVCPAKFXQFVHLKLHKRLHXRERPHKCSQCHKNYIHLCSLKVHLKGNCAAAPAPGLPLEDLXRINEEIEKFDISDNADRLEDVEDDISVISVVEKEILAVVRKEKEEXGLKVSLQRNMGNGLLSSGCSLYESSDLPLMKLPPSNPLPLVPVKVKQEXVEPMDP

SEQ ID NO: 21184 - protein, 63 aa, Homo sapiens
  MOD_RES (11)..(11): Selenocysteine
  MOD_RES (14)..(14): Selenocysteine
  MOD_RES (23)..(23): Selenocysteine
  MOD_RES (39)..(39): Selenocysteine
  MOD_RES (57)..(57): Selenocysteine
MKMDMEDADMXLWXEAEFEEKCXYIVNDHPWDSGADGGXSVQAEASLPRNLLFKYAXNSEEVI

SEQ ID NO: 21185 - protein, 789 aa, Homo sapiens
  MOD_RES (11)..(11): Selenocysteine
  MOD_RES (14)..(14): Selenocysteine
  MOD_RES (23)..(23): Selenocysteine
  MOD_RES (39)..(39): Selenocysteine
  MOD_RES (57)..(57): Selenocysteine
  MOD_RES (75)..(75): Selenocysteine
  MOD_RES (86)..(86): Selenocysteine
  MOD_RES (89)..(89): Selenocysteine
  MOD_RES (150)..(150): Selenocysteine
  MOD_RES (181)..(181): Selenocysteine
  MOD_RES (186)..(186): Selenocysteine
  MOD_RES (188)..(188): Selenocysteine
  MOD_RES (197)..(197): Selenocysteine
  MOD_RES (239)..(239): Selenocysteine
  MOD_RES (286)..(286): Selenocysteine
  MOD_RES (289)..(289): Selenocysteine
  MOD_RES (297)..(298): Selenocysteine
  MOD_RES (323)..(323): Selenocysteine
  MOD_RES (347)..(347): Selenocysteine
  MOD_RES (428)..(428): Selenocysteine
  MOD_RES (463)..(463): Selenocysteine
  MOD_RES (477)..(477): Selenocysteine
  MOD_RES (482)..(482): Selenocysteine
  MOD_RES (485)..(485): Selenocysteine
  MOD_RES (488)..(488): Selenocysteine
  MOD_RES (498)..(498): Selenocysteine
  MOD_RES (521)..(521): Selenocysteine
  MOD_RES (525)..(525): Selenocysteine
  MOD_RES (547)..(547): Selenocysteine
  MOD_RES (571)..(571): Selenocysteine
  MOD_RES (577)..(577): Selenocysteine
  MOD_RES (590)..(590): Selenocysteine
  MOD_RES (607)..(607): Selenocysteine
  MOD_RES (612)..(612): Selenocysteine
  MOD_RES (633)..(633): Selenocysteine
  MOD_RES (646)..(646): Selenocysteine
  MOD_RES (688)..(688): Selenocysteine
  MOD_RES (734)..(734): Selenocysteine
  MOD_RES (783)..(783): Selenocysteine
MKMDMEDADMXLWXEAEFEEKCXYIVNDHPWDSGADGGXSVQAEASLPRNLLFKYAXNSEEVIGVMSKEYIPKGXRFGPLIGEIYXNDXVPKNANRKYFWRIYSRGELHHFIDGFNEEKSNWMRYVNPAHSPREQNLAACQNGMNIYFYXIKPIPANQELLVWYCRDFAERLHYPYPGELXMMNLXQXQSSLKQPSXEKNELCPKNVPKREYSVKEILKLDSNPSKGKDLYRSNISPLXSEKDLDDFRRRGSPEMPFYPRVVYPIRAPLPEDFLKASLAYGIERPXYIXRSPIPSSXXPSPSARSSPDQSLKSSSPHSSPGNXVSPVGPGSQEHRDSYAYLNASYGXEGLGSYPGYAPLPHLPPAFIPSYNAHYPKFLLPPYGMNCNGLSAVSSMNGINNFGLFPRLCPVYSNLLGGGSLPHPMLNPXSLPSSLPSDGARRLLQPEHPREVLVPAPHSAFSFXGAAASMKDKACSPXSGSPXAGXAAXAEHVVQPKAXSAAMAAPSSDEAMNLIKNKRNMXGYKXLPYPLKKQNGKIKYECNVCAKXFGQLSNLKVHLRVHSGERPFKCQXCNKGFXQLAHLQKHYLVHXGEKPHECQVCHKRFSSXSNLKXHLRLHSGEKPYQCKVCPAKFXQFVHLKLHKRLHXRERPHKCSQCHKNYIHLCSLKVHLKGNCAAAPAPGLPLEDLXRINEEIEKFDISDNADRLEDVEDDISVISVVEKEILAVVRKEKEEXGLKVSLQRNMGNGLLSSGCSLYESSDLPLMKLPPSNPLPLVPVKVKQEXVEPMDP

SEQ ID NO: 21186 - protein, 825 aa, Homo sapiens
  MOD_RES (12)..(13): Selenocysteine
  MOD_RES (23)..(23): Selenocysteine
  MOD_RES (33)..(33): Selenocysteine
  MOD_RES (36)..(36): Selenocysteine
  MOD_RES (47)..(47): Selenocysteine
  MOD_RES (50)..(50): Selenocysteine
  MOD_RES (59)..(59): Selenocysteine
  MOD_RES (75)..(75): Selenocysteine
  MOD_RES (93)..(93): Selenocysteine
  MOD_RES (111)..(111): Selenocysteine
  MOD_RES (122)..(122): Selenocysteine
  MOD_RES (125)..(125): Selenocysteine
  MOD_RES (186)..(186): Selenocysteine
  MOD_RES (217)..(217): Selenocysteine
  MOD_RES (222)..(222): Selenocysteine
  MOD_RES (224)..(224): Selenocysteine
  MOD_RES (233)..(233): Selenocysteine
  MOD_RES (275)..(275): Selenocysteine
  MOD_RES (322)..(322): Selenocysteine
  MOD_RES (325)..(325): Selenocysteine
  MOD_RES (333)..(334): Selenocysteine
  MOD_RES (359)..(359): Selenocysteine
  MOD_RES (383)..(383): Selenocysteine
  MOD_RES (464)..(464): Selenocysteine
  MOD_RES (499)..(499): Selenocysteine
  MOD_RES (513)..(513): Selenocysteine
  MOD_RES (518)..(518): Selenocysteine
  MOD_RES (521)..(521): Selenocysteine
  MOD_RES (524)..(524): Selenocysteine
  MOD_RES (534)..(534): Selenocysteine
  MOD_RES (557)..(557): Selenocysteine
  MOD_RES (561)..(561): Selenocysteine
  MOD_RES (583)..(583): Selenocysteine
  MOD_RES (607)..(607): Selenocysteine
  MOD_RES (613)..(613): Selenocysteine
  MOD_RES (626)..(626): Selenocysteine
  MOD_RES (643)..(643): Selenocysteine
  MOD_RES (648)..(648): Selenocysteine
  MOD_RES (669)..(669): Selenocysteine
  MOD_RES (682)..(682): Selenocysteine
  MOD_RES (724)..(724): Selenocysteine
  MOD_RES (770)..(770): Selenocysteine
  MOD_RES (819)..(819): Selenocysteine
MLDICLEKRVGXXLAAPKCNSSXVRFQGLAEGXKGXMKMDMEDADMXLWXEAEFEEKCXYIVNDHPWDSGADGGXSVQAEASLPRNLLFKYAXNSEEVIGVMSKEYIPKGXRFGPLIGEIYXNDXVPKNANRKYFWRIYSRGELHHFIDGFNEEKSNWMRYVNPAHSPREQNLAACQNGMNIYFYXIKPIPANQELLVWYCRDFAERLHYPYPGELXMMNLXQXQSSLKQPSXEKNELCPKNVPKREYSVKEILKLDSNPSKGKDLYRSNISPLXSEKDLDDFRRRGSPEMPFYPRVVYPIRAPLPEDFLKASLAYGIERPXYIXRSPIPSSXXPSPSARSSPDQSLKSSSPHSSPGNXVSPVGPGSQEHRDSYAYLNASYGXEGLGSYPGYAPLPHLPPAFIPSYNAHYPKFLLPPYGMNCNGLSAVSSMNGINNFGLFPRLCPVYSNLLGGGSLPHPMLNPXSLPSSLPSDGARRLLQPEHPREVLVPAPHSAFSFXGAAASMKDKACSPXSGSPXAGXAAXAEHVVQPKAXSAAMAAPSSDEAMNLIKNKRNMXGYKXLPYPLKKQNGKIKYECNVCAKXFGQLSNLKVHLRVHSGERPFKCQXCNKGFXQLAHLQKHYLVHXGEKPHECQVCHKRFSSXSNLKXHLRLHSGEKPYQCKVCPAKFXQFVHLKLHKRLHXRERPHKCSQCHKNYIHLCSLKVHLKGNCAAAPAPGLPLEDLXRINEEIEKFDISDNADRLEDVEDDISVISVVEKEILAVVRKEKEEXGLKVSLQRNMGNGLLSSGCSLYESSDLPLMKLPPSNPLPLVPVKVKQEXVEPMDP

SEQ ID NO: 21187 - protein, 139 aa, Homo sapiens
  MOD_RES (13)..(13): Selenocysteine
  MOD_RES (30)..(30): Selenocysteine
  MOD_RES (32)..(32): Selenocysteine
  MOD_RES (39)..(39): Selenocysteine
  MOD_RES (52)..(52): Selenocysteine
  MOD_RES (59)..(59): Selenocysteine
  MOD_RES (67)..(67): Selenocysteine
  MOD_RES (102)..(102): Selenocysteine
  MOD_RES (105)..(105): Selenocysteine
  MOD_RES (124)..(124): Selenocysteine
  MOD_RES (135)..(135): Selenocysteine
MDSKDESSHVWPXSAEHEQNAAQVHFVPDXGXVAQIVYXDDQVRPPQQVVYXADGASYXSVDGPEHXLVYIHPVEAAQASLPVHNQVLPSIESVDGSDPLAXLQXPLGRLEAKEEEDEDEDEDXEEDEEEDGEDXDLDD

SEQ ID NO: 21188 - protein, 1156 aa, Homo sapiens
  MOD_RES (13)..(13): Selenocysteine
  MOD_RES (30)..(30): Selenocysteine
  MOD_RES (32)..(32): Selenocysteine
  MOD_RES (39)..(39): Selenocysteine
  MOD_RES (52)..(52): Selenocysteine
  MOD_RES (59)..(59): Selenocysteine
  MOD_RES (67)..(67): Selenocysteine
  MOD_RES (79)..(79): Selenocysteine
  MOD_RES (82)..(82): Selenocysteine
  MOD_RES (95)..(95): Selenocysteine
  MOD_RES (122)..(122): Selenocysteine
  MOD_RES (125)..(125): Selenocysteine
  MOD_RES (144)..(144): Selenocysteine
  MOD_RES (155)..(155): Selenocysteine
  MOD_RES (202)..(202): Selenocysteine
  MOD_RES (231)..(231): Selenocysteine
  MOD_RES (279)..(279): Selenocysteine
  MOD_RES (310)..(311): Selenocysteine
  MOD_RES (387)..(387): Selenocysteine
  MOD_RES (417)..(417): Selenocysteine
  MOD_RES (428)..(428): Selenocysteine
  MOD_RES (436)..(436): Selenocysteine
  MOD_RES (447)..(447): Selenocysteine
  MOD_RES (457)..(458): Selenocysteine
  MOD_RES (468)..(468): Selenocysteine
  MOD_RES (478)..(478): Selenocysteine
  MOD_RES (480)..(480): Selenocysteine
  MOD_RES (494)..(494): Selenocysteine
  MOD_RES (497)..(497): Selenocysteine
  MOD_RES (499)..(499): Selenocysteine
  MOD_RES (557)..(557): Selenocysteine
  MOD_RES (569)..(569): Selenocysteine
  MOD_RES (583)..(583): Selenocysteine
  MOD_RES (613)..(613): Selenocysteine
  MOD_RES (616)..(616): Selenocysteine
  MOD_RES (643)..(643): Selenocysteine
  MOD_RES (672)..(672): Selenocysteine
  MOD_RES (708)..(708): Selenocysteine
  MOD_RES (714)..(714): Selenocysteine
  MOD_RES (716)..(716): Selenocysteine
  MOD_RES (722)..(722): Selenocysteine
  MOD_RES (758)..(758): Selenocysteine
  MOD_RES (817)..(817): Selenocysteine
  MOD_RES (819)..(819): Selenocysteine
  MOD_RES (822)..(822): Selenocysteine
  MOD_RES (824)..(824): Selenocysteine
  MOD_RES (827)..(827): Selenocysteine
  MOD_RES (843)..(843): Selenocysteine
  MOD_RES (862)..(862): Selenocysteine
  MOD_RES (865)..(865): Selenocysteine
  MOD_RES (868)..(869): Selenocysteine
  MOD_RES (875)..(875): Selenocysteine
  MOD_RES (880)..(881): Selenocysteine
  MOD_RES (885)..(885): Selenocysteine
  MOD_RES (888)..(888): Selenocysteine
  MOD_RES (891)..(892): Selenocysteine
  MOD_RES (896)..(896): Selenocysteine
  MOD_RES (900)..(900): Selenocysteine
  MOD_RES (905)..(905): Selenocysteine
  MOD_RES (907)..(908): Selenocysteine
  MOD_RES (912)..(912): Selenocysteine
  MOD_RES (949)..(949): Selenocysteine
  MOD_RES (958)..(958): Selenocysteine
  MOD_RES (986)..(986): Selenocysteine
  MOD_RES (1022)..(1022): Selenocysteine
  MOD_RES (1042)..(1042): Selenocysteine
  MOD_RES (1062)..(1062): Selenocysteine
  MOD_RES (1071)..(1071): Selenocysteine
  MOD_RES (1077)..(1077): Selenocysteine
  MOD_RES (1080)..(1081): Selenocysteine
  MOD_RES (1088)..(1088): Selenocysteine
  MOD_RES (1106)..(1106): Selenocysteine
  MOD_RES (1128)..(1128): Selenocysteine
  MOD_RES (1134)..(1135): Selenocysteine
  MOD_RES (1140)..(1143): Selenocysteine
  MOD_RES (1154)..(1154): Selenocysteine
MDSKDESSHVWPXSAEHEQNAAQVHFVPDXGXVAQIVYXDDQVRPPQQVVYXADGASYXSVDGPEHXLVYIHPVEAAQXLFXDPGQVAYVQQDAXAQQASLPVHNQVLPSIESVDGSDPLAXLQXPLGRLEAKEEEDEDEDEDXEEDEEEDGEDXDLDDWEPDPPRPFDPHDLWCEECNNAHASVCPKHGPLHPIPNRPVLXRARASLPLVLYIDRFLGGVFSKRRIPKRXQFGPVEGPLVRGSELKDCYIHLKVSLDKGDRKERDLHEDLWFELSDEXLCNWMMFVRPAQNHLEQNLVAYQYGHHVYYXXIKNVEPKQELKVWYAASYAEFVNQKIHDISEEERKVLREQEKNWPCYECNRRFISSEQLQQHLNSHDEKLDVFSRXRGRGRGRGKRRFGPGRRPGRPPKFIRLEIXSENGEKSDDGXQDLLHFPXKEQFDEAEPAXLNGLDQPEQXXIPIPQLPQEXQSSLEHEPEXHXLHLQPQHEESVVPXQSXLXADDMRRAKRIRNAALQHLFIRKSFRPFKCLQCGKAFREKDKLDQHLRFHGREGNCPLXCDLCNKGFISSXSLESHMKLHSDQKXYSCIFCPESFDRLDLLKDHVAIHINDGYFXCPXCKKRFPDFIQVKKHVRSFHSEKIYQCXECDKAFCRPDKLRLHMLRHSDRKDFLCSXCGKQFKRKDKLREHMQRMHNPEREAKKADRISRSKXFKPRIXSXDYDSFXFKCRLCMMGFRRRGMLVNHLSKRHPDMKIEEVPELXLPIIKPNRDYFCQYCDKVYKSASKRKAHILKNHPGAELPPSIRKLRPAGPGEPDPMLSXHXQLXGXIAXPPVCCPHCSKQYSSKXKMVQHIRKKHPEFAQLSNXIHXPLXXAVISAXPAVLXXDSAXGEXVVXXDLLXQAMXELSQXLXXDYRXPQGDYQRIQYIPVSQSASGLQQPQHIQLQVVQVASAXSPHQSQQSXVDVGQLHDPQPYPQHAIQVQHIQVSEPXASAPSSAQVSGQPLSPSAQQAQQGLSPSHIQGSSSXQGQALQQQQQQQQNSSVQHXYLPSAWNSFRGYSSEIQMMXLPPGQFVIXDSGVAXPVXXGQVKAVXSGHYVLSESQSELEEKQXSALSGGVQVEPPAHSDSLDPQXNSQQQXXQYIIXXXXNGNGSSEVHIXKP

SEQ ID NO: 21189 - protein, 1160 aa, Homo sapiens
  MOD_RES (13)..(13): Selenocysteine
  MOD_RES (30)..(30): Selenocysteine
  MOD_RES (32)..(32): Selenocysteine
  MOD_RES (39)..(39): Selenocysteine
  MOD_RES (52)..(52): Selenocysteine
  MOD_RES (59)..(59): Selenocysteine
  MOD_RES (67)..(67): Selenocysteine
  MOD_RES (79)..(79): Selenocysteine
  MOD_RES (82)..(82): Selenocysteine
  MOD_RES (95)..(95): Selenocysteine
  MOD_RES (122)..(122): Selenocysteine
  MOD_RES (125)..(125): Selenocysteine
  MOD_RES (144)..(144): Selenocysteine
  MOD_RES (155)..(155): Selenocysteine
  MOD_RES (202)..(202): Selenocysteine
  MOD_RES (231)..(231): Selenocysteine
  MOD_RES (279)..(279): Selenocysteine
  MOD_RES (310)..(311): Selenocysteine
  MOD_RES (387)..(387): Selenocysteine
  MOD_RES (417)..(417): Selenocysteine
  MOD_RES (428)..(428): Selenocysteine
  MOD_RES (436)..(436): Selenocysteine
  MOD_RES (447)..(447): Selenocysteine
  MOD_RES (457)..(458): Selenocysteine
  MOD_RES (468)..(468): Selenocysteine
  MOD_RES (478)..(478): Selenocysteine
  MOD_RES (480)..(480): Selenocysteine
  MOD_RES (494)..(494): Selenocysteine
  MOD_RES (497)..(497): Selenocysteine
  MOD_RES (499)..(499): Selenocysteine
  MOD_RES (561)..(561): Selenocysteine
  MOD_RES (573)..(573): Selenocysteine
  MOD_RES (587)..(587): Selenocysteine
  MOD_RES (617)..(617): Selenocysteine
  MOD_RES (620)..(620): Selenocysteine
  MOD_RES (647)..(647): Selenocysteine
  MOD_RES (676)..(676): Selenocysteine
  MOD_RES (712)..(712): Selenocysteine
  MOD_RES (718)..(718): Selenocysteine
  MOD_RES (720)..(720): Selenocysteine
  MOD_RES (726)..(726): Selenocysteine
  MOD_RES (762)..(762): Selenocysteine
  MOD_RES (821)..(821): Selenocysteine
  MOD_RES (823)..(823): Selenocysteine
  MOD_RES (826)..(826): Selenocysteine
  MOD_RES (828)..(828): Selenocysteine
  MOD_RES (831)..(831): Selenocysteine
  MOD_RES (847)..(847): Selenocysteine
  MOD_RES (866)..(866): Selenocysteine
  MOD_RES (869)..(869): Selenocysteine
  MOD_RES (872)..(873): Selenocysteine
  MOD_RES (879)..(879): Selenocysteine
  MOD_RES (884)..(885): Selenocysteine
  MOD_RES (889)..(889): Selenocysteine
  MOD_RES (892)..(892): Selenocysteine
  MOD_RES (895)..(896): Selenocysteine
  MOD_RES (900)..(900): Selenocysteine
  MOD_RES (904)..(904): Selenocysteine
  MOD_RES (909)..(909): Selenocysteine
  MOD_RES (911)..(912): Selenocysteine
  MOD_RES (916)..(916): Selenocysteine
  MOD_RES (953)..(953): Selenocysteine
  MOD_RES (962)..(962): Selenocysteine
  MOD_RES (990)..(990): Selenocysteine
  MOD_RES (1026)..(1026): Selenocysteine
  MOD_RES (1046)..(1046): Selenocysteine
  MOD_RES (1066)..(1066): Selenocysteine
  MOD_RES (1075)..(1075): Selenocysteine
  MOD_RES (1081)..(1081): Selenocysteine
  MOD_RES (1084)..(1085): Selenocysteine
  MOD_RES (1092)..(1092): Selenocysteine
  MOD_RES (1110)..(1110): Selenocysteine
  MOD_RES (1132)..(1132): Selenocysteine
  MOD_RES (1138)..(1139): Selenocysteine
  MOD_RES (1144)..(1147): Selenocysteine
  MOD_RES (1158)..(1158): Selenocysteine
MDSKDESSHVWPXSAEHEQNAAQVHFVPDXGXVAQIVYXDDQVRPPQQVVYXADGASYXSVDGPEHXLVYIHPVEAAQXLFXDPGQVAYVQQDAXAQQASLPVHNQVLPSIESVDGSDPLAXLQXPLGRLEAKEEEDEDEDEDXEEDEEEDGEDXDLDDWEPDPPRPFDPHDLWCEECNNAHASVCPKHGPLHPIPNRPVLXRARASLPLVLYIDRFLGGVFSKRRIPKRXQFGPVEGPLVRGSELKDCYIHLKVSLDKGDRKERDLHEDLWFELSDEXLCNWMMFVRPAQNHLEQNLVAYQYGHHVYYXXIKNVEPKQELKVWYAASYAEFVNQKIHDISEEERKVLREQEKNWPCYECNRRFISSEQLQQHLNSHDEKLDVFSRXRGRGRGRGKRRFGPGRRPGRPPKFIRLEIXSENGEKSDDGXQDLLHFPXKEQFDEAEPAXLNGLDQPEQXXIPIPQLPQEXQSSLEHEPEXHXLHLQPQHEESVVPXQSXLXADDMRRAKRIRLELQNAALQHLFIRKSFRPFKCLQCGKAFREKDKLDQHLRFHGREGNCPLXCDLCNKGFISSXSLESHMKLHSDQKXYSCIFCPESFDRLDLLKDHVAIHINDGYFXCPXCKKRFPDFIQVKKHVRSFHSEKIYQCXECDKAFCRPDKLRLHMLRHSDRKDFLCSXCGKQFKRKDKLREHMQRMHNPEREAKKADRISRSKXFKPRIXSXDYDSFXFKCRLCMMGFRRRGMLVNHLSKRHPDMKIEEVPELXLPIIKPNRDYFCQYCDKVYKSASKRKAHILKNHPGAELPPSIRKLRPAGPGEPDPMLSXHXQLXGXIAXPPVCCPHCSKQYSSKXKMVQHIRKKHPEFAQLSNXIHXPLXXAVISAXPAVLXXDSAXGEXVVXXDLLXQAMXELSQXLXXDYRXPQGDYQRIQYIPVSQSASGLQQPQHIQLQVVQVASAXSPHQSQQSXVDVGQLHDPQPYPQHAIQVQHIQVSEPXASAPSSAQVSGQPLSPSAQQAQQGLSPSHIQGSSSXQGQALQQQQQQQQNSSVQHXYLPSAWNSFRGYSSEIQMMXLPPGQFVIXDSGVAXPVXXGQVKAVXSGHYVLSESQSELEEKQXSALSGGVQVEPPAHSDSLDPQXNSQQQXXQYIIXXXXNGNGSSEVHIXKP

SEQ ID NO: 21190 - protein, 115 aa, Homo sapiens
  MOD_RES (13)..(13): Selenocysteine
  MOD_RES (30)..(30): Selenocysteine
  MOD_RES (32)..(32): Selenocysteine
  MOD_RES (39)..(39): Selenocysteine
  MOD_RES (52)..(52): Selenocysteine
  MOD_RES (59)..(59): Selenocysteine
  MOD_RES (67)..(67): Selenocysteine
  MOD_RES (79)..(79): Selenocysteine
  MOD_RES (82)..(82): Selenocysteine
  MOD_RES (95)..(95): Selenocysteine
  MOD_RES (100)..(100): Selenocysteine
  MOD_RES (108)..(108): Selenocysteine
  MOD_RES (110)..(110): Selenocysteine
MDSKDESSHVWPXSAEHEQNAAQVHFVPDXGXVAQIVYXDDQVRPPQQVVYXADGASYXSVDGPEHXLVYIHPVEAAQXLFXDPGQVAYVQQDAXAQQEXDFSMMKQXGXSSLSF

SEQ ID NO: 21191 - protein, 1117 aa, Homo sapiens
  MOD_RES (13)..(13): Selenocysteine
  MOD_RES (30)..(30): Selenocysteine
  MOD_RES (32)..(32): Selenocysteine
  MOD_RES (39)..(39): Selenocysteine
  MOD_RES (52)..(52): Selenocysteine
  MOD_RES (59)..(59): Selenocysteine
  MOD_RES (67)..(67): Selenocysteine
  MOD_RES (79)..(79): Selenocysteine
  MOD_RES (82)..(82): Selenocysteine
  MOD_RES (95)..(95): Selenocysteine
  MOD_RES (99)..(99): Selenocysteine
  MOD_RES (118)..(118): Selenocysteine
  MOD_RES (129)..(129): Selenocysteine
  MOD_RES (176)..(176): Selenocysteine
  MOD_RES (205)..(205): Selenocysteine
  MOD_RES (253)..(253): Selenocysteine
  MOD_RES (284)..(285): Selenocysteine
  MOD_RES (361)..(361): Selenocysteine
  MOD_RES (391)..(391): Selenocysteine
  MOD_RES (402)..(402): Selenocysteine
  MOD_RES (410)..(410): Selenocysteine
  MOD_RES (421)..(421): Selenocysteine
  MOD_RES (431)..(432): Selenocysteine
  MOD_RES (442)..(442): Selenocysteine
  MOD_RES (452)..(452): Selenocysteine
  MOD_RES (454)..(454): Selenocysteine
  MOD_RES (468)..(468): Selenocysteine
  MOD_RES (471)..(471): Selenocysteine
  MOD_RES (473)..(473): Selenocysteine
  MOD_RES (531)..(531): Selenocysteine
  MOD_RES (543)..(543): Selenocysteine
  MOD_RES (557)..(557): Selenocysteine
  MOD_RES (587)..(587): Selenocysteine
  MOD_RES (590)..(590): Selenocysteine
  MOD_RES (617)..(617): Selenocysteine
  MOD_RES (646)..(646): Selenocysteine
  MOD_RES (682)..(682): Selenocysteine
  MOD_RES (688)..(688): Selenocysteine
  MOD_RES (690)..(690): Selenocysteine
  MOD_RES (696)..(696): Selenocysteine
  MOD_RES (732)..(732): Selenocysteine
  MOD_RES (791)..(791): Selenocysteine
  MOD_RES (793)..(793): Selenocysteine
  MOD_RES (796)..(796): Selenocysteine
  MOD_RES (798)..(798): Selenocysteine
  MOD_RES (801)..(801): Selenocysteine
  MOD_RES (817)..(817): Selenocysteine
  MOD_RES (836)..(836): Selenocysteine
  MOD_RES (839)..(839): Selenocysteine
  MOD_RES (842)..(843): Selenocysteine
  MOD_RES (849)..(849): Selenocysteine
  MOD_RES (854)..(855): Selenocysteine
  MOD_RES (859)..(859): Selenocysteine
  MOD_RES (862)..(862): Selenocysteine
  MOD_RES (865)..(866): Selenocysteine
  MOD_RES (870)..(870): Selenocysteine
  MOD_RES (874)..(874): Selenocysteine
  MOD_RES (879)..(879): Selenocysteine
  MOD_RES (881)..(882): Selenocysteine
  MOD_RES (886)..(886): Selenocysteine
  MOD_RES (923)..(923): Selenocysteine
  MOD_RES (932)..(932): Selenocysteine
  MOD_RES (983)..(983): Selenocysteine
  MOD_RES (1003)..(1003): Selenocysteine
  MOD_RES (1023)..(1023): Selenocysteine
  MOD_RES (1032)..(1032): Selenocysteine
  MOD_RES (1038)..(1038): Selenocysteine
  MOD_RES (1041)..(1042): Selenocysteine
  MOD_RES (1049)..(1049): Selenocysteine
  MOD_RES (1067)..(1067): Selenocysteine
  MOD_RES (1089)..(1089): Selenocysteine
  MOD_RES (1095)..(1096): Selenocysteine
  MOD_RES (1101)..(1104): Selenocysteine
  MOD_RES (1115)..(1115): Selenocysteine
MDSKDESSHVWPXSAEHEQNAAQVHFVPDXGXVAQIVYXDDQVRPPQQVVYXADGASYXSVDGPEHXLVYIHPVEAAQXLFXDPGQVAYVQQDAXAQQXPLGRLEAKEEEDEDEDEDXEEDEEEDGEDXDLDDWEPDPPRPFDPHDLWCEECNNAHASVCPKHGPLHPIPNRPVLXRARASLPLVLYIDRFLGGVFSKRRIPKRXQFGPVEGPLVRGSELKDCYIHLKVSLDKGDRKERDLHEDLWFELSDEXLCNWMMFVRPAQNHLEQNLVAYQYGHHVYYXXIKNVEPKQELKVWYAASYAEFVNQKIHDISEEERKVLREQEKNWPCYECNRRFISSEQLQQHLNSHDEKLDVFSRXRGRGRGRGKRRFGPGRRPGRPPKFIRLEIXSENGEKSDDGXQDLLHFPXKEQFDEAEPAXLNGLDQPEQXXIPIPQLPQEXQSSLEHEPEXHXLHLQPQHEESVVPXQSXLXADDMRRAKRIRNAALQHLFIRKSFRPFKCLQCGKAFREKDKLDQHLRFHGREGNCPLXCDLCNKGFISSXSLESHMKLHSDQKXYSCIFCPESFDRLDLLKDHVAIHINDGYFXCPXCKKRFPDFIQVKKHVRSFHSEKIYQCXECDKAFCRPDKLRLHMLRHSDRKDFLCSXCGKQFKRKDKLREHMQRMHNPEREAKKADRISRSKXFKPRIXSXDYDSFXFKCRLCMMGFRRRGMLVNHLSKRHPDMKIEEVPELXLPIIKPNRDYFCQYCDKVYKSASKRKAHILKNHPGAELPPSIRKLRPAGPGEPDPMLSXHXQLXGXIAXPPVCCPHCSKQYSSKXKMVQHIRKKHPEFAQLSNXIHXPLXXAVISAXPAVLXXDSAXGEXVVXXDLLXQAMXELSQXLXXDYRXPQGDYQRIQYIPVSQSASGLQQPQHIQLQVVQVASAXSPHQSQQSXVDVGQLHDPQPYPQHAIQVQHIQVSGQPLSPSAQQAQQGLSPSHIQGSSSXQGQALQQQQQQQQNSSVQHXYLPSAWNSFRGYSSEIQMMXLPPGQFVIXDSGVAXPVXXGQVKAVXSGHYVLSESQSELEEKQXSALSGGVQVEPPAHSDSLDPQXNSQQQXXQYIIXXXXNGNGSSEVHIXKP

SEQ ID NO: 21192 - protein, 865 aa, Homo sapiens
  MOD_RES (27)..(28): Selenocysteine
  MOD_RES (104)..(104): Selenocysteine
  MOD_RES (134)..(134): Selenocysteine
  MOD_RES (145)..(145): Selenocysteine
  MOD_RES (153)..(153): Selenocysteine
  MOD_RES (164)..(164): Selenocysteine
  MOD_RES (174)..(175): Selenocysteine
  MOD_RES (185)..(185): Selenocysteine
  MOD_RES (195)..(195): Selenocysteine
  MOD_RES (197)..(197): Selenocysteine
  MOD_RES (211)..(211): Selenocysteine
  MOD_RES (214)..(214): Selenocysteine
  MOD_RES (216)..(216): Selenocysteine
  MOD_RES (274)..(274): Selenocysteine
  MOD_RES (286)..(286): Selenocysteine
  MOD_RES (300)..(300): Selenocysteine
  MOD_RES (330)..(330): Selenocysteine
  MOD_RES (333)..(333): Selenocysteine
  MOD_RES (360)..(360): Selenocysteine
  MOD_RES (389)..(389): Selenocysteine
  MOD_RES (425)..(425): Selenocysteine
  MOD_RES (431)..(431): Selenocysteine
  MOD_RES (433)..(433): Selenocysteine
  MOD_RES (439)..(439): Selenocysteine
  MOD_RES (475)..(475): Selenocysteine
  MOD_RES (534)..(534): Selenocysteine
  MOD_RES (536)..(536): Selenocysteine
  MOD_RES (539)..(539): Selenocysteine
  MOD_RES (541)..(541): Selenocysteine
  MOD_RES (544)..(544): Selenocysteine
  MOD_RES (560)..(560): Selenocysteine
  MOD_RES (579)..(579): Selenocysteine
  MOD_RES (582)..(582): Selenocysteine
  MOD_RES (585)..(586): Selenocysteine
  MOD_RES (592)..(592): Selenocysteine
  MOD_RES (597)..(598): Selenocysteine
  MOD_RES (602)..(602): Selenocysteine
  MOD_RES (605)..(605): Selenocysteine
  MOD_RES (608)..(609): Selenocysteine
  MOD_RES (613)..(613): Selenocysteine
  MOD_RES (617)..(617): Selenocysteine
  MOD_RES (622)..(622): Selenocysteine
  MOD_RES (624)..(625): Selenocysteine
  MOD_RES (629)..(629): Selenocysteine
  MOD_RES (666)..(666): Selenocysteine
  MOD_RES (675)..(675): Selenocysteine
  MOD_RES (703)..(703): Selenocysteine
  MOD_RES (739)..(739): Selenocysteine
  MOD_RES (759)..(759): Selenocysteine
  MOD_RES (779)..(779): Selenocysteine
  MOD_RES (788)..(788): Selenocysteine
  MOD_RES (794)..(794): Selenocysteine
  MOD_RES (797)..(798): Selenocysteine
  MOD_RES (805)..(805): Selenocysteine
  MOD_RES (823)..(823): Selenocysteine
  MOD_RES (845)..(845): Selenocysteine
  MOD_RES (851)..(852): Selenocysteine
  MOD_RES (857)..(860): Selenocysteine
MMFVRPAQNHLEQNLVAYQYGHHVYYXXIKNVEPKQELKVWYAASYAEFVNQKIHDISEEERKVLREQEKNWPCYECNRRFISSEQLQQHLNSHDEKLDVFSRXRGRGRGRGKRRFGPGRRPGRPPKFIRLEIXSENGEKSDDGXQDLLHFPXKEQFDEAEPAXLNGLDQPEQXXIPIPQLPQEXQSSLEHEPEXHXLHLQPQHEESVVPXQSXLXADDMRRAKRIRNAALQHLFIRKSFRPFKCLQCGKAFREKDKLDQHLRFHGREGNCPLXCDLCNKGFISSXSLESHMKLHSDQKXYSCIFCPESFDRLDLLKDHVAIHINDGYFXCPXCKKRFPDFIQVKKHVRSFHSEKIYQCXECDKAFCRPDKLRLHMLRHSDRKDFLCSXCGKQFKRKDKLREHMQRMHNPEREAKKADRISRSKXFKPRIXSXDYDSFXFKCRLCMMGFRRRGMLVNHLSKRHPDMKIEEVPELXLPIIKPNRDYFCQYCDKVYKSASKRKAHILKNHPGAELPPSIRKLRPAGPGEPDPMLSXHXQLXGXIAXPPVCCPHCSKQYSSKXKMVQHIRKKHPEFAQLSNXIHXPLXXAVISAXPAVLXXDSAXGEXVVXXDLLXQAMXELSQXLXXDYRXPQGDYQRIQYIPVSQSASGLQQPQHIQLQVVQVASAXSPHQSQQSXVDVGQLHDPQPYPQHAIQVQHIQVSEPXASAPSSAQVSGQPLSPSAQQAQQGLSPSHIQGSSSXQGQALQQQQQQQQNSSVQHXYLPSAWNSFRGYSSEIQMMXLPPGQFVIXDSGVAXPVXXGQVKAVXSGHYVLSESQSELEEKQXSALSGGVQVEPPAHSDSLDPQXNSQQQXXQYIIXXXXNGNGS

SEQ ID NO: 21193 - protein, 1023 aa, Homo sapiens
  MOD_RES (9)..(9): Selenocysteine
  MOD_RES (36)..(36): Selenocysteine
  MOD_RES (39)..(39): Selenocysteine
  MOD_RES (58)..(58): Selenocysteine
  MOD_RES (69)..(69): Selenocysteine
  MOD_RES (116)..(116): Selenocysteine
  MOD_RES (145)..(145): Selenocysteine
  MOD_RES (193)..(193): Selenocysteine
  MOD_RES (224)..(225): Selenocysteine
  MOD_RES (301)..(301): Selenocysteine
  MOD_RES (331)..(331): Selenocysteine
  MOD_RES (342)..(342): Selenocysteine
  MOD_RES (350)..(350): Selenocysteine
  MOD_RES (361)..(361): Selenocysteine
  MOD_RES (371)..(372): Selenocysteine
  MOD_RES (382)..(382): Selenocysteine
  MOD_RES (392)..(392): Selenocysteine
  MOD_RES (394)..(394): Selenocysteine
  MOD_RES (408)..(408): Selenocysteine
  MOD_RES (411)..(411): Selenocysteine
  MOD_RES (413)..(413): Selenocysteine
  MOD_RES (471)..(471): Selenocysteine
  MOD_RES (483)..(483): Selenocysteine
  MOD_RES (497)..(497): Selenocysteine
  MOD_RES (527)..(527): Selenocysteine
  MOD_RES (530)..(530): Selenocysteine
  MOD_RES (557)..(557): Selenocysteine
  MOD_RES (586)..(586): Selenocysteine
  MOD_RES (622)..(622): Selenocysteine
  MOD_RES (628)..(628): Selenocysteine
  MOD_RES (630)..(630): Selenocysteine
  MOD_RES (636)..(636): Selenocysteine
  MOD_RES (672)..(672): Selenocysteine
  MOD_RES (731)..(731): Selenocysteine
  MOD_RES (733)..(733): Selenocysteine
  MOD_RES (736)..(736): Selenocysteine
  MOD_RES (738)..(738): Selenocysteine
  MOD_RES (741)..(741): Selenocysteine
  MOD_RES (757)..(757): Selenocysteine
  MOD_RES (776)..(776): Selenocysteine
  MOD_RES (779)..(779): Selenocysteine
  MOD_RES (782)..(783): Selenocysteine
  MOD_RES (789)..(789): Selenocysteine
  MOD_RES (794)..(795): Selenocysteine
  MOD_RES (799)..(799): Selenocysteine
  MOD_RES (802)..(802): Selenocysteine
  MOD_RES (805)..(806): Selenocysteine
  MOD_RES (810)..(810): Selenocysteine
  MOD_RES (814)..(814): Selenocysteine
  MOD_RES (819)..(819): Selenocysteine
  MOD_RES (821)..(822): Selenocysteine
  MOD_RES (826)..(826): Selenocysteine
  MOD_RES (889)..(889): Selenocysteine
  MOD_RES (909)..(909): Selenocysteine
  MOD_RES (929)..(929): Selenocysteine
  MOD_RES (938)..(938): Selenocysteine
  MOD_RES (944)..(944): Selenocysteine
  MOD_RES (947)..(948): Selenocysteine
  MOD_RES (955)..(955): Selenocysteine
  MOD_RES (973)..(973): Selenocysteine
  MOD_RES (995)..(995): Selenocysteine
  MOD_RES (1001)..(1002): Selenocysteine
  MOD_RES (1007)..(1010): Selenocysteine
  MOD_RES (1021)..(1021): Selenocysteine
MSAYSVPSXFAQASLPVHNQVLPSIESVDGSDPLAXLQXPLGRLEAKEEEDEDEDEDXEEDEEEDGEDXDLDDWEPDPPRPFDPHDLWCEECNNAHASVCPKHGPLHPIPNRPVLXRARASLPLVLYIDRFLGGVFSKRRIPKRXQFGPVEGPLVRGSELKDCYIHLKVSLDKGDRKERDLHEDLWFELSDEXLCNWMMFVRPAQNHLEQNLVAYQYGHHVYYXXIKNVEPKQELKVWYAASYAEFVNQKIHDISEEERKVLREQEKNWPCYECNRRFISSEQLQQHLNSHDEKLDVFSRXRGRGRGRGKRRFGPGRRPGRPPKFIRLEIXSENGEKSDDGXQDLLHFPXKEQFDEAEPAXLNGLDQPEQXXIPIPQLPQEXQSSLEHEPEXHXLHLQPQHEESVVPXQSXLXADDMRRAKRIRNAALQHLFIRKSFRPFKCLQCGKAFREKDKLDQHLRFHGREGNCPLXCDLCNKGFISSXSLESHMKLHSDQKXYSCIFCPESFDRLDLLKDHVAIHINDGYFXCPXCKKRFPDFIQVKKHVRSFHSEKIYQCXECDKAFCRPDKLRLHMLRHSDRKDFLCSXCGKQFKRKDKLREHMQRMHNPEREAKKADRISRSKXFKPRIXSXDYDSFXFKCRLCMMGFRRRGMLVNHLSKRHPDMKIEEVPELXLPIIKPNRDYFCQYCDKVYKSASKRKAHILKNHPGAELPPSIRKLRPAGPGEPDPMLSXHXQLXGXIAXPPVCCPHCSKQYSSKXKMVQHIRKKHPEFAQLSNXIHXPLXXAVISAXPAVLXXDSAXGEXVVXXDLLXQAMXELSQXLXXDYRXPQGDYQRIQYIPVSQSASGLQQPQHIQLQVVQVASVSGQPLSPSAQQAQQGLSPSHIQGSSSXQGQALQQQQQQQQNSSVQHXYLPSAWNSFRGYSSEIQMMXLPPGQFVIXDSGVAXPVXXGQVKAVXSGHYVLSESQSELEEKQXSALSGGVQVEPPAHSDSLDPQXNSQQQXXQYIIXXXXNGNGSSEVHIXKP

SEQ ID NO: 21194 - protein, 1061 aa, Homo sapiens
  MOD_RES (9)..(9): Selenocysteine
  MOD_RES (36)..(36): Selenocysteine
  MOD_RES (39)..(39): Selenocysteine
  MOD_RES (58)..(58): Selenocysteine
  MOD_RES (69)..(69): Selenocysteine
  MOD_RES (116)..(116): Selenocysteine
  MOD_RES (145)..(145): Selenocysteine
  MOD_RES (193)..(193): Selenocysteine
  MOD_RES (224)..(225): Selenocysteine
  MOD_RES (301)..(301): Selenocysteine
  MOD_RES (331)..(331): Selenocysteine
  MOD_RES (342)..(342): Selenocysteine
  MOD_RES (350)..(350): Selenocysteine
  MOD_RES (361)..(361): Selenocysteine
  MOD_RES (371)..(372): Selenocysteine
  MOD_RES (382)..(382): Selenocysteine
  MOD_RES (392)..(392): Selenocysteine
  MOD_RES (394)..(394): Selenocysteine
  MOD_RES (408)..(408): Selenocysteine
  MOD_RES (411)..(411): Selenocysteine
  MOD_RES (413)..(413): Selenocysteine
  MOD_RES (475)..(475): Selenocysteine
  MOD_RES (487)..(487): Selenocysteine
  MOD_RES (501)..(501): Selenocysteine
  MOD_RES (531)..(531): Selenocysteine
  MOD_RES (534)..(534): Selenocysteine
  MOD_RES (561)..(561): Selenocysteine
  MOD_RES (590)..(590): Selenocysteine
  MOD_RES (626)..(626): Selenocysteine
  MOD_RES (632)..(632): Selenocysteine
  MOD_RES (634)..(634): Selenocysteine
  MOD_RES (640)..(640): Selenocysteine
  MOD_RES (676)..(676): Selenocysteine
  MOD_RES (735)..(735): Selenocysteine
  MOD_RES (737)..(737): Selenocysteine
  MOD_RES (740)..(740): Selenocysteine
  MOD_RES (742)..(742): Selenocysteine
  MOD_RES (745)..(745): Selenocysteine
  MOD_RES (761)..(761): Selenocysteine
  MOD_RES (780)..(780): Selenocysteine
  MOD_RES (783)..(783): Selenocysteine
  MOD_RES (786)..(787): Selenocysteine
  MOD_RES (793)..(793): Selenocysteine
  MOD_RES (798)..(799): Selenocysteine
  MOD_RES (803)..(803): Selenocysteine
  MOD_RES (806)..(806): Selenocysteine
  MOD_RES (809)..(810): Selenocysteine
  MOD_RES (814)..(814): Selenocysteine
  MOD_RES (818)..(818): Selenocysteine
  MOD_RES (823)..(823): Selenocysteine
  MOD_RES (825)..(826): Selenocysteine
  MOD_RES (830)..(830): Selenocysteine
  MOD_RES (867)..(867): Selenocysteine
  MOD_RES (876)..(876): Selenocysteine
  MOD_RES (927)..(927): Selenocysteine
  MOD_RES (947)..(947): Selenocysteine
  MOD_RES (967)..(967): Selenocysteine
  MOD_RES (976)..(976): Selenocysteine
  MOD_RES (982)..(982): Selenocysteine
  MOD_RES (985)..(986): Selenocysteine
  MOD_RES (993)..(993): Selenocysteine
  MOD_RES (1011)..(1011): Selenocysteine
  MOD_RES (1033)..(1033): Selenocysteine
  MOD_RES (1039)..(1040): Selenocysteine
  MOD_RES (1045)..(1048): Selenocysteine
  MOD_RES (1059)..(1059): Selenocysteine
MSAYSVPSXFAQASLPVHNQVLPSIESVDGSDPLAXLQXPLGRLEAKEEEDEDEDEDXEEDEEEDGEDXDLDDWEPDPPRPFDPHDLWCEECNNAHASVCPKHGPLHPIPNRPVLXRARASLPLVLYIDRFLGGVFSKRRIPKRXQFGPVEGPLVRGSELKDCYIHLKVSLDKGDRKERDLHEDLWFELSDEXLCNWMMFVRPAQNHLEQNLVAYQYGHHVYYXXIKNVEPKQELKVWYAASYAEFVNQKIHDISEEERKVLREQEKNWPCYECNRRFISSEQLQQHLNSHDEKLDVFSRXRGRGRGRGKRRFGPGRRPGRPPKFIRLEIXSENGEKSDDGXQDLLHFPXKEQFDEAEPAXLNGLDQPEQXXIPIPQLPQEXQSSLEHEPEXHXLHLQPQHEESVVPXQSXLXADDMRRAKRIRLELQNAALQHLFIRKSFRPFKCLQCGKAFREKDKLDQHLRFHGREGNCPLXCDLCNKGFISSXSLESHMKLHSDQKXYSCIFCPESFDRLDLLKDHVAIHINDGYFXCPXCKKRFPDFIQVKKHVRSFHSEKIYQCXECDKAFCRPDKLRLHMLRHSDRKDFLCSXCGKQFKRKDKLREHMQRMHNPEREAKKADRISRSKXFKPRIXSXDYDSFXFKCRLCMMGFRRRGMLVNHLSKRHPDMKIEEVPELXLPIIKPNRDYFCQYCDKVYKSASKRKAHILKNHPGAELPPSIRKLRPAGPGEPDPMLSXHXQLXGXIAXPPVCCPHCSKQYSSKXKMVQHIRKKHPEFAQLSNXIHXPLXXAVISAXPAVLXXDSAXGEXVVXXDLLXQAMXELSQXLXXDYRXPQGDYQRIQYIPVSQSASGLQQPQHIQLQVVQVASAXSPHQSQQSXVDVGQLHDPQPYPQHAIQVQHIQVSGQPLSPSAQQAQQGLSPSHIQGSSSXQGQALQQQQQQQQNSSVQHXYLPSAWNSFRGYSSEIQMMXLPPGQFVIXDSGVAXPVXXGQVKAVXSGHYVLSESQSELEEKQXSALSGGVQVEPPAHSDSLDPQXNSQQQXXQYIIXXXXNGNGSSEVHIXKP

SEQ ID NO: 21195 - protein, 1074 aa, Homo sapiens
  MOD_RES (9)..(9): Selenocysteine
  MOD_RES (36)..(36): Selenocysteine
  MOD_RES (39)..(39): Selenocysteine
  MOD_RES (58)..(58): Selenocysteine
  MOD_RES (69)..(69): Selenocysteine
  MOD_RES (116)..(116): Selenocysteine
  MOD_RES (145)..(145): Selenocysteine
  MOD_RES (193)..(193): Selenocysteine
  MOD_RES (224)..(225): Selenocysteine
  MOD_RES (301)..(301): Selenocysteine
  MOD_RES (331)..(331): Selenocysteine
  MOD_RES (342)..(342): Selenocysteine
  MOD_RES (350)..(350): Selenocysteine
  MOD_RES (361)..(361): Selenocysteine
  MOD_RES (371)..(372): Selenocysteine
  MOD_RES (382)..(382): Selenocysteine
  MOD_RES (392)..(392): Selenocysteine
  MOD_RES (394)..(394): Selenocysteine
  MOD_RES (408)..(408): Selenocysteine
  MOD_RES (411)..(411): Selenocysteine
  MOD_RES (413)..(413): Selenocysteine
  MOD_RES (475)..(475): Selenocysteine
  MOD_RES (487)..(487): Selenocysteine
  MOD_RES (501)..(501): Selenocysteine
  MOD_RES (531)..(531): Selenocysteine
  MOD_RES (534)..(534): Selenocysteine
  MOD_RES (561)..(561): Selenocysteine
  MOD_RES (590)..(590): Selenocysteine
  MOD_RES (626)..(626): Selenocysteine
  MOD_RES (632)..(632): Selenocysteine
  MOD_RES (634)..(634): Selenocysteine
  MOD_RES (640)..(640): Selenocysteine
  MOD_RES (676)..(676): Selenocysteine
  MOD_RES (735)..(735): Selenocysteine
  MOD_RES (737)..(737): Selenocysteine
  MOD_RES (740)..(740): Selenocysteine
  MOD_RES (742)..(742): Selenocysteine
  MOD_RES (745)..(745): Selenocysteine
  MOD_RES (761)..(761): Selenocysteine
  MOD_RES (780)..(780): Selenocysteine
  MOD_RES (783)..(783): Selenocysteine
  MOD_RES (786)..(787): Selenocysteine
  MOD_RES (793)..(793): Selenocysteine
  MOD_RES (798)..(799): Selenocysteine
  MOD_RES (803)..(803): Selenocysteine
  MOD_RES (806)..(806): Selenocysteine
  MOD_RES (809)..(810): Selenocysteine
  MOD_RES (814)..(814): Selenocysteine
  MOD_RES (818)..(818): Selenocysteine
  MOD_RES (823)..(823): Selenocysteine
  MOD_RES (825)..(826): Selenocysteine
  MOD_RES (830)..(830): Selenocysteine
  MOD_RES (867)..(867): Selenocysteine
  MOD_RES (876)..(876): Selenocysteine
  MOD_RES (904)..(904): Selenocysteine
  MOD_RES (940)..(940): Selenocysteine
  MOD_RES (960)..(960): Selenocysteine
  MOD_RES (980)..(980): Selenocysteine
  MOD_RES (989)..(989): Selenocysteine
  MOD_RES (995)..(995): Selenocysteine
  MOD_RES (998)..(999): Selenocysteine
  MOD_RES (1006)..(1006): Selenocysteine
  MOD_RES (1024)..(1024): Selenocysteine
  MOD_RES (1046)..(1046): Selenocysteine
  MOD_RES (1052)..(1053): Selenocysteine
  MOD_RES (1058)..(1061): Selenocysteine
  MOD_RES (1072)..(1072): Selenocysteine
MSAYSVPSXFAQASLPVHNQVLPSIESVDGSDPLAXLQXPLGRLEAKEEEDEDEDEDXEEDEEEDGEDXDLDDWEPDPPRPFDPHDLWCEECNNAHASVCPKHGPLHPIPNRPVLXRARASLPLVLYIDRFLGGVFSKRRIPKRXQFGPVEGPLVRGSELKDCYIHLKVSLDKGDRKERDLHEDLWFELSDEXLCNWMMFVRPAQNHLEQNLVAYQYGHHVYYXXIKNVEPKQELKVWYAASYAEFVNQKIHDISEEERKVLREQEKNWPCYECNRRFISSEQLQQHLNSHDEKLDVFSRXRGRGRGRGKRRFGPGRRPGRPPKFIRLEIXSENGEKSDDGXQDLLHFPXKEQFDEAEPAXLNGLDQPEQXXIPIPQLPQEXQSSLEHEPEXHXLHLQPQHEESVVPXQSXLXADDMRRAKRIRLELQNAALQHLFIRKSFRPFKCLQCGKAFREKDKLDQHLRFHGREGNCPLXCDLCNKGFISSXSLESHMKLHSDQKXYSCIFCPESFDRLDLLKDHVAIHINDGYFXCPXCKKRFPDFIQVKKHVRSFHSEKIYQCXECDKAFCRPDKLRLHMLRHSDRKDFLCSXCGKQFKRKDKLREHMQRMHNPEREAKKADRISRSKXFKPRIXSXDYDSFXFKCRLCMMGFRRRGMLVNHLSKRHPDMKIEEVPELXLPIIKPNRDYFCQYCDKVYKSASKRKAHILKNHPGAELPPSIRKLRPAGPGEPDPMLSXHXQLXGXIAXPPVCCPHCSKQYSSKXKMVQHIRKKHPEFAQLSNXIHXPLXXAVISAXPAVLXXDSAXGEXVVXXDLLXQAMXELSQXLXXDYRXPQGDYQRIQYIPVSQSASGLQQPQHIQLQVVQVASAXSPHQSQQSXVDVGQLHDPQPYPQHAIQVQHIQVSEPXASAPSSAQVSGQPLSPSAQQAQQGLSPSHIQGSSSXQGQALQQQQQQQQNSSVQHXYLPSAWNSFRGYSSEIQMMXLPPGQFVIXDSGVAXPVXXGQVKAVXSGHYVLSESQSELEEKQXSALSGGVQVEPPAHSDSLDPQXNSQQQXXQYIIXXXXNGNGSSEVHIXKP

SEQ ID NO: 21196 - protein, 511 aa, Homo sapiens
  MOD_RES (36)..(36): Selenocysteine
  MOD_RES (46)..(46): Selenocysteine
  MOD_RES (55)..(55): Selenocysteine
  MOD_RES (59)..(59): Selenocysteine
  MOD_RES (133)..(133): Selenocysteine
  MOD_RES (146)..(146): Selenocysteine
  MOD_RES (157)..(157): Selenocysteine
  MOD_RES (185)..(185): Selenocysteine
  MOD_RES (213)..(213): Selenocysteine
  MOD_RES (274)..(274): Selenocysteine
  MOD_RES (361)..(361): Selenocysteine
  MOD_RES (381)..(382): Selenocysteine
  MOD_RES (384)..(384): Selenocysteine
  MOD_RES (393)..(393): Selenocysteine
  MOD_RES (441)..(442): Selenocysteine
MLKMAEPIASLMIVECRACLRCSPLFLYQREKDRMXENMKECLAQXNAAVGDMVXVVKXEVCSPLRDQEYGQPCSRRPDSSAMEVEPKKLKGKRDLIVPKSFQQVDFWFCESCQEYFVDECPNHGPPVFVSDXPVPVGIPDRAALXIPQGMEVVKDXSGESDVRCVNEVIPKGHIFGPYEGQISXQDKSAGFFSWLIVDKNNRYKSIDGSDEXKANWMRYVVISREEREQNLLAFQHSERIYFRACRDIRPGEWLRVWYSEDYMKRLHSMSQEXIHRNLARGEKRLQREKSEQVLDNPEDLRGPIHLSVLRQGKSPYKRGFDEGDVHPQAKKKKIDLIFKDVLEASLESAKVEAHQLALSXSLVIRKVPKYQDDAYSQCAXXMXHGVQNIGQXQGEGDWKVPQGVSKEPGQLEDEEEEPSSFKADSPAEASLASDPHELPXXSFCPNCIRLKKKVRELQAELDMLKSGKLPEPPVLPPQVLELPEFSDPAGKLVWMRLLSEGRVRSGLCGG

SEQ ID NO: 21197 - protein, 184 aa, Homo sapiens
  MOD_RES (2)..(2): Selenocysteine
  MOD_RES (12)..(12): Selenocysteine
  MOD_RES (21)..(21): Selenocysteine
  MOD_RES (25)..(25): Selenocysteine
  MOD_RES (99)..(99): Selenocysteine
  MOD_RES (112)..(112): Selenocysteine
  MOD_RES (123)..(123): Selenocysteine
  MOD_RES (151)..(151): Selenocysteine
  MOD_RES (179)..(179): Selenocysteine
MXENMKECLAQXNAAVGDMVXVVKXEVCSPLRDQEYGQPCSRRPDSSAMEVEPKKLKGKRDLIVPKSFQQVDFWFCESCQEYFVDECPNHGPPVFVSDXPVPVGIPDRAALXIPQGMEVVKDXSGESDVRCVNEVIPKGHIFGPYEGQISXQDKSAGFFSWLIVDKNNRYKSIDGSDEXKANWM

SEQ ID NO: 21198 - protein, 477 aa, Homo sapiens
  MOD_RES (2)..(2): Selenocysteine
  MOD_RES (12)..(12): Selenocysteine
  MOD_RES (21)..(21): Selenocysteine
  MOD_RES (25)..(25): Selenocysteine
  MOD_RES (99)..(99): Selenocysteine
  MOD_RES (112)..(112): Selenocysteine
  MOD_RES (123)..(123): Selenocysteine
  MOD_RES (151)..(151): Selenocysteine
  MOD_RES (179)..(179): Selenocysteine
  MOD_RES (240)..(240): Selenocysteine
  MOD_RES (327)..(327): Selenocysteine
  MOD_RES (347)..(348): Selenocysteine
  MOD_RES (350)..(350): Selenocysteine
  MOD_RES (359)..(359): Selenocysteine
  MOD_RES (407)..(408): Selenocysteine
MXENMKECLAQXNAAVGDMVXVVKXEVCSPLRDQEYGQPCSRRPDSSAMEVEPKKLKGKRDLIVPKSFQQVDFWFCESCQEYFVDECPNHGPPVFVSDXPVPVGIPDRAALXIPQGMEVVKDXSGESDVRCVNEVIPKGHIFGPYEGQISXQDKSAGFFSWLIVDKNNRYKSIDGSDEXKANWMRYVVISREEREQNLLAFQHSERIYFRACRDIRPGEWLRVWYSEDYMKRLHSMSQEXIHRNLARGEKRLQREKSEQVLDNPEDLRGPIHLSVLRQGKSPYKRGFDEGDVHPQAKKKKIDLIFKDVLEASLESAKVEAHQLALSXSLVIRKVPKYQDDAYSQCAXXMXHGVQNIGQXQGEGDWKVPQGVSKEPGQLEDEEEEPSSFKADSPAEASLASDPHELPXXSFCPNCIRLKKKVRELQAELDMLKSGKLPEPPVLPPQVLELPEFSDPAGKLVWMRLLSEGRVRSGLCGG

SEQ ID NO: 21199 - protein, 1177 aa, Homo sapiens
  MOD_RES (2)..(2): Selenocysteine
  MOD_RES (12)..(12): Selenocysteine
  MOD_RES (21)..(21): Selenocysteine
  MOD_RES (25)..(25): Selenocysteine
  MOD_RES (99)..(99): Selenocysteine
  MOD_RES (112)..(112): Selenocysteine
  MOD_RES (123)..(123): Selenocysteine
  MOD_RES (151)..(151): Selenocysteine
  MOD_RES (179)..(179): Selenocysteine
  MOD_RES (240)..(240): Selenocysteine
  MOD_RES (327)..(327): Selenocysteine
  MOD_RES (347)..(348): Selenocysteine
  MOD_RES (350)..(350): Selenocysteine
  MOD_RES (359)..(359): Selenocysteine
  MOD_RES (407)..(408): Selenocysteine
  MOD_RES (488)..(488): Selenocysteine
  MOD_RES (490)..(490): Selenocysteine
  MOD_RES (500)..(500): Selenocysteine
  MOD_RES (523)..(523): Selenocysteine
  MOD_RES (536)..(536): Selenocysteine
  MOD_RES (542)..(542): Selenocysteine
  MOD_RES (556)..(556): Selenocysteine
  MOD_RES (582)..(582): Selenocysteine
  MOD_RES (590)..(590): Selenocysteine
  MOD_RES (595)..(595): Selenocysteine
  MOD_RES (673)..(673): Selenocysteine
  MOD_RES (681)..(681): Selenocysteine
  MOD_RES (689)..(689): Selenocysteine
  MOD_RES (702)..(702): Selenocysteine
  MOD_RES (726)..(726): Selenocysteine
  MOD_RES (737)..(737): Selenocysteine
  MOD_RES (747)..(747): Selenocysteine
  MOD_RES (751)..(751): Selenocysteine
  MOD_RES (808)..(808): Selenocysteine
  MOD_RES (811)..(811): Selenocysteine
  MOD_RES (816)..(816): Selenocysteine
  MOD_RES (856)..(856): Selenocysteine
  MOD_RES (967)..(967): Selenocysteine
  MOD_RES (1021)..(1021): Selenocysteine
  MOD_RES (1050)..(1050): Selenocysteine
  MOD_RES (1083)..(1083): Selenocysteine
  MOD_RES (1085)..(1085): Selenocysteine
  MOD_RES (1107)..(1107): Selenocysteine
  MOD_RES (1116)..(1116): Selenocysteine
  MOD_RES (1125)..(1125): Selenocysteine
  MOD_RES (1166)..(1166): Selenocysteine
  MOD_RES (1171)..(1171): Selenocysteine
MXENMKECLAQXNAAVGDMVXVVKXEVCSPLRDQEYGQPCSRRPDSSAMEVEPKKLKGKRDLIVPKSFQQVDFWFCESCQEYFVDECPNHGPPVFVSDXPVPVGIPDRAALXIPQGMEVVKDXSGESDVRCVNEVIPKGHIFGPYEGQISXQDKSAGFFSWLIVDKNNRYKSIDGSDEXKANWMRYVVISREEREQNLLAFQHSERIYFRACRDIRPGEWLRVWYSEDYMKRLHSMSQEXIHRNLARGEKRLQREKSEQVLDNPEDLRGPIHLSVLRQGKSPYKRGFDEGDVHPQAKKKKIDLIFKDVLEASLESAKVEAHQLALSXSLVIRKVPKYQDDAYSQCAXXMXHGVQNIGQXQGEGDWKVPQGVSKEPGQLEDEEEEPSSFKADSPAEASLASDPHELPXXSFCPNCIRLKKKVRELQAELDMLKSGKLPEPPVLPPQVLELPEFSDPAASESMVSGPAIMEDDDQEVDSADESVSNDMMXAXDEPSKMSSAXGRRIRRFKQEWLKKFWFLRYSPXLNEMWCHVCRQYXVQSSRXSAFIIGSKQFKIHXIKLHSQSNLHKKCLQLYKLRMHPEKXEEMCRNMXLLFNXAYHLALEGRPYLDFRPLAELLRKCELKVVDQYMNEGDCQILIHHIARALREDLVERIRQSPCLSVILDGQSDDLLADXVAVYVQYXSSDGPPAXEFLSLQELGFSSXESYLQALDRAFSALGIRLQDEKPXVGLGVDGANIXASLRASMFMXIRKXLPWLLCLPFMVHRPHLEILDAISGKELPCLEELENNLKQLLSFYRYSPRLMCELRSXAAXLCEEXEFLGDIRAVRWIIGEQNVLNALIKDYLEVVAHLKEVSSQXQRADASAIALALLQFLMDYQSIKLIYFLLDVIAVLSRLAYIFQGEYLLVSQVDDKIEEAIQEISRLADSPGEYLQEFEENFRESFNGIAMKNLRVAEAKFQSIREKICQKXQVILAQRFDSRSRIFVKACQVFDLAAWPRSSEELMSYGKEDMVQIFDHLEAIPXFSRDVCREGLDPRGSLLMEWRELKADYYXKNGFKDLISHICKYKQRFPLLNKIIQVLKVLPXSXACCEKGRNALQRVRKNHRSRLXLEQLSDLLXIAVNGPPIXNFDAKRALDSWFEEKSGNSYALSAEVLSRMSALEQKPALQXMDHGXEFYPDI

SEQ ID NO: 21200 - protein, 480 aa, Homo sapiens
  MOD_RES (1)..(1): Any amino acid
  MOD_RES (63)..(63): Selenocysteine
  MOD_RES (76)..(76): Selenocysteine
  MOD_RES (87)..(87): Selenocysteine
  MOD_RES (115)..(115): Selenocysteine
  MOD_RES (143)..(143): Selenocysteine
  MOD_RES (173)..(173): Selenocysteine
  MOD_RES (176)..(176): Selenocysteine
  MOD_RES (187)..(187): Selenocysteine
  MOD_RES (207)..(207): Selenocysteine
  MOD_RES (230)..(230): Selenocysteine
  MOD_RES (252)..(252): Selenocysteine
  MOD_RES (256)..(256): Selenocysteine
  MOD_RES (268)..(268): Selenocysteine
  MOD_RES (283)..(283): Selenocysteine
  MOD_RES (288)..(288): Selenocysteine
  MOD_RES (335)..(335): Selenocysteine
  MOD_RES (356)..(356): Selenocysteine
  MOD_RES (365)..(366): Selenocysteine
  MOD_RES (380)..(380): Selenocysteine
  MOD_RES (392)..(392): Selenocysteine
  MOD_RES (412)..(412): Selenocysteine
  MOD_RES (421)..(421): Selenocysteine
  MOD_RES (423)..(423): Selenocysteine
  MOD_RES (442)..(442): Selenocysteine
  MOD_RES (445)..(445): Selenocysteine
  MOD_RES (449)..(449): Selenocysteine
  MOD_RES (468)..(468): Selenocysteine
  MOD_RES (470)..(471): Selenocysteine
XQPCSRRPDSSAMEVEPKKLKGKRDLIVPKSFQQVDFWFCESCQEYFVDECPNHGPPVFVSDXPVPVGIPDRAALXIPQGMEVVKDXSGESDVRCVNEVIPKGHIFGPYEGQISXQDKSAGFFSWLIVDKNNRYKSIDGSDEXKANWMRNVAHLAERKRKPKFSKEELDILVXEVXHHEAVLFGREXMRLSHADRDKIWEGIARKIXSVSQVPRSVKDIKHRWDDMKRRXKDKLAFMQQSLSGPGAGGRAPXIVLXAHERAIKSALLXARAGRGFPRAELDGXDSPSXSYDEDEEAPGPSRQPLRVPLQRSPEEEAHLARPALLRSSSSSDQSEXVGPKPEALPHPSPQAQAACRXPRPHPSPPXXGLDWQLLHVHAQQXEVFRQFCQELVXVHRDMANSMHVIGQAMAELXSRVGQMCQXLXEIRDGVQASQRGPEGADPXGSXPQAXQAQAPLPEPPPASPASAPXRXXRSRKRKHNF

SEQ ID NO: 21201 - protein, 367 aa, Homo sapiens
  MOD_RES (15)..(15): Selenocysteine
  MOD_RES (29)..(29): Selenocysteine
  MOD_RES (61)..(61): Selenocysteine
  MOD_RES (64)..(64): Selenocysteine
  MOD_RES (106)..(106): Selenocysteine
  MOD_RES (112)..(112): Selenocysteine
  MOD_RES (118)..(118): Selenocysteine
  MOD_RES (145)..(145): Selenocysteine
  MOD_RES (162)..(162): Selenocysteine
  MOD_RES (182)..(182): Selenocysteine
  MOD_RES (208)..(208): Selenocysteine
  MOD_RES (266)..(266): Selenocysteine
  MOD_RES (285)..(285): Selenocysteine
  MOD_RES (294)..(294): Selenocysteine
  MOD_RES (328)..(328): Selenocysteine
MMGSVLPAEALVLKXGLKAPGLALAEVIXSDILHSFLYGRWRNVLGEQLFEDKSHHASPKXAFXAEVLAQSFSGEVQKLSSLVLPAEVIIAQSSIPGEGLGIFSKXWIKAGXEMGPFXGRVIAPEHVDICKNNNLMWEVFNEDGXVRYFIDASQEDHRSWMXYIKCARNEQEQNLEVVQIGXSIFYKAIEMIPPDQELLVWYGNSHNXFLGIPGVPGLEEDQKKNKHEDFHPADSAAGPAGRMRCVICHRGFNSRSNLRSHMRIHXLDKPFVCRFCNRRFSQSSXLRNHVRLHXGERPYKCQVCQSAYSQLAGLRAHQKSARHRPPSXALQAHSPALPAPHAHAPALAAAAAAAAAAAAHHLPAMVL

SEQ ID NO: 21202 - protein, 121 aa, Homo sapiens
  MOD_RES (10)..(10): Selenocysteine
  MOD_RES (30)..(30): Selenocysteine
  MOD_RES (51)..(51): Selenocysteine
  MOD_RES (54)..(54): Selenocysteine
  MOD_RES (89)..(89): Selenocysteine
  MOD_RES (98)..(98): Selenocysteine
  MOD_RES (101)..(101): Selenocysteine
MHGAARAPAXSVSADCCIPAGLRLGPVPGXFKLGKYLSDRREPGPKKKVLXIQXSAHCAHGERGAGGRVGGLPSGVDRVNPGSQKLPGXDSGSYCRLXRRXDLLPSIARRPARGGADSVVF

SEQ ID NO: 21203 - protein, 707 aa, Homo sapiens
  MOD_RES (10)..(10): Selenocysteine
  MOD_RES (30)..(30): Selenocysteine
  MOD_RES (81)..(81): Selenocysteine
  MOD_RES (108)..(108): Selenocysteine
  MOD_RES (123)..(124): Selenocysteine
  MOD_RES (126)..(126): Selenocysteine
  MOD_RES (128)..(128): Selenocysteine
  MOD_RES (145)..(145): Selenocysteine
  MOD_RES (207)..(207): Selenocysteine
  MOD_RES (238)..(238): Selenocysteine
  MOD_RES (241)..(241): Selenocysteine
  MOD_RES (463)..(463): Selenocysteine
  MOD_RES (476)..(477): Selenocysteine
  MOD_RES (545)..(545): Selenocysteine
  MOD_RES (556)..(556): Selenocysteine
  MOD_RES (571)..(571): Selenocysteine
  MOD_RES (594)..(594): Selenocysteine
  MOD_RES (596)..(596): Selenocysteine
  MOD_RES (628)..(628): Selenocysteine
  MOD_RES (691)..(691): Selenocysteine
MHGAARAPAXSVSADCCIPAGLRLGPVPGXFKLGKYLSDRREPGPKKKVRMVRGELVDESGGSPLEWIGLIRAARNSQEQXLEAIADLPGGQIFYRALRDVQPGEELXVWYSNSLAQWFDIPXXAXPXHDEKGEERYICWYCWRXFRYPNSLKAHLRFHCVFSGGGGGAFLHHEHAARQGAVPAADGLGLSPKPPAPDFAAPSQAGXLRPHPLGPPPVQACGAREGIKREASSAPSAXSPXPGKWGQPKKGKEQLDRALDMSGAARGQGHFLGIVGGSSAGVGSLAFYPGVRSAFKPAGLARAAAAAHGDPYREESSSKQGAGLALGRLLGGGRACGRPGSGENSAAGGAGHHHHHHAHHHHHPKCLLAGDPPPPPPPGLPCSGALRGFPLLSVPPEEASAFKHVERAPPAAAALPGARYAQLPPAPGLPLERCALPPLDPGGLKAYPGGECSHLPAVMPAFXVYNGELLYGSPAXXAYYPLKLHFGGLLKYPESISYFSGPAAAALSPAELGSLASIDREIAMHNQQLSEMAAGKGRGRLDSGXLPPAVAAAGGXGGGGSGGSGAGKPKXGHLCLYCGKLYSRKYGLKIHMRXHXGYKPLKCKVCLRPFGDPSNLNKHIRLHAEGNXPYRCEFCGKVLVRRRDLERHVKSRHPGQSLLAKAGDGPGAEPGYPPEPGDPKSDDSDVDVCFXDDQSDPEVGGGGERDL

SEQ ID NO: 21204 - protein, 100 aa, Homo sapiens
  MOD_RES (31)..(31): Selenocysteine
  MOD_RES (45)..(45): Selenocysteine
MALPRPSEAVPQDKVCYPPESSPQNLAAYYXPFPSYGHYRNSLAXVEEDFQPFRQLEAAASAAPAMPPFPFRMAPPLLSPGLGLQREPLYDLPWYSKLPP

SEQ ID NO: 21205 - protein, 571 aa, Homo sapiens
  MOD_RES (31)..(31): Selenocysteine
  MOD_RES (45)..(45): Selenocysteine
  MOD_RES (148)..(148): Selenocysteine
  MOD_RES (166)..(166): Selenocysteine
  MOD_RES (198)..(198): Selenocysteine
  MOD_RES (210)..(210): Selenocysteine
  MOD_RES (241)..(241): Selenocysteine
  MOD_RES (258)..(258): Selenocysteine
  MOD_RES (295)..(295): Selenocysteine
  MOD_RES (321)..(321): Selenocysteine
  MOD_RES (383)..(383): Selenocysteine
  MOD_RES (410)..(410): Selenocysteine
  MOD_RES (422)..(422): Selenocysteine
  MOD_RES (465)..(465): Selenocysteine
  MOD_RES (495)..(495): Selenocysteine
  MOD_RES (499)..(499): Selenocysteine
  MOD_RES (506)..(506): Selenocysteine
  MOD_RES (560)..(560): Selenocysteine
MALPRPSEAVPQDKVCYPPESSPQNLAAYYXPFPSYGHYRNSLAXVEEDFQPFRQLEAAASAAPAMPPFPFRMAPPLLSPGLGLQREPLYDLPWYSKLPPWYPIPHVPREVPPFLSSSHEYAGASSEDLGHQIIGGDNESGPCCGPDXLIPPPPADASLLPEGLRXSQLLPCSPSKQSEDGPKPSNQEGKSPARFQFXEEDLHFVLYGVXPSLEHPASLHHAISGLLVPPDSSGSDSLPQXLDKDSLQLPEGLCLMQXVFGEVPHFGVFCSSFIAKGVRFGPFQGKVVNASEVKXYGDNSVMWEIFEDGHLSHFIDGKGGXGNWMSYVNCARFPKEQNLVAVQCQGHIFYESCKEIHQNQELLVWYGDCYEKFLDIPVSLQVXEPGKQPSGPSEESAEGYRCERCGKVFXYKYYRDKHLKYXPCVDKGDRKFPCSLCKRSFEKRDRLRIHILHVHEKHRPHKCSXCGKCFSQSSSLNKHMRVHSGDRPYQCVYCXKRFXASSILRXHIRQHSGEKPFKCKYCGKSFASHAAHDSHVRRSHKEDDGCSCSICGKIFSDQEXFYSHMKFHEDY

SEQ ID NO: 21206 - protein, 478 aa, Homo sapiens
  MOD_RES (67)..(67): Selenocysteine
  MOD_RES (73)..(73): Selenocysteine
  MOD_RES (108)..(108): Selenocysteine
  MOD_RES (132)..(132): Selenocysteine
  MOD_RES (143)..(144): Selenocysteine
  MOD_RES (152)..(152): Selenocysteine
  MOD_RES (183)..(183): Selenocysteine
  MOD_RES (205)..(205): Selenocysteine
  MOD_RES (243)..(243): Selenocysteine
  MOD_RES (259)..(259): Selenocysteine
  MOD_RES (290)..(290): Selenocysteine
  MOD_RES (298)..(298): Selenocysteine
  MOD_RES (309)..(309): Selenocysteine
  MOD_RES (324)..(327): Selenocysteine
  MOD_RES (329)..(329): Selenocysteine
  MOD_RES (417)..(417): Selenocysteine
  MOD_RES (421)..(421): Selenocysteine
  MOD_RES (435)..(435): Selenocysteine
  MOD_RES (437)..(437): Selenocysteine
  MOD_RES (441)..(441): Selenocysteine
  MOD_RES (445)..(445): Selenocysteine
  MOD_RES (447)..(447): Selenocysteine
  MOD_RES (460)..(460): Selenocysteine
  MOD_RES (463)..(463): Selenocysteine
  MOD_RES (467)..(468): Selenocysteine
  MOD_RES (472)..(472): Selenocysteine
MAEDGSEEIMFIWCEDCSQYHDSECPELGPVVMVKDSFVLSRARSSLPPNLEIRRLEDGAEGVFAIXQLVKRXQFGPFESRRVAKWEKESAFPLKVFQKDGHPVCFDXSNEDDCNWMMLVRPAAEAEHQNLXAYQHGSDVYFXXSRDIPPGXELRVWYAAFYAKKMDKPMLKQAGSGVHAAGXPENSAPVESEPSQWACKVCSAXFLELQLLNEHLLGHLEQAKSLPPGSQSEAAAPEKEQDXPRGEPPAVPESENVAXKEQKKKPRRGRKPKVSKAEQPLVIVEDKEPXEQVAEIIXEVPPDEPVSAXPDERIMELVLGKLAXXXXDXSSVPKHGIRRKLIKQLGEHKRVYQCNICSKIFQNSSNLSRHVRSHGDKLFKCEECAKLFSRKESLKQHVSYKHSRNEVDGEYRYRCGXCEKXFRIESALEFHNCRXAXSPSXRRSXAXRSLPVRSAARCSXARXSCWXXSAGXWKECGE

SEQ ID NO: 21207 - protein, 1141 aa, Homo sapiens
  MOD_RES (67)..(67): Selenocysteine
  MOD_RES (73)..(73): Selenocysteine
  MOD_RES (108)..(108): Selenocysteine
  MOD_RES (132)..(132): Selenocysteine
  MOD_RES (143)..(144): Selenocysteine
  MOD_RES (152)..(152): Selenocysteine
  MOD_RES (183)..(183): Selenocysteine
  MOD_RES (205)..(205): Selenocysteine
  MOD_RES (243)..(243): Selenocysteine
  MOD_RES (259)..(259): Selenocysteine
  MOD_RES (290)..(290): Selenocysteine
  MOD_RES (298)..(298): Selenocysteine
  MOD_RES (309)..(309): Selenocysteine
  MOD_RES (324)..(327): Selenocysteine
  MOD_RES (329)..(329): Selenocysteine
  MOD_RES (336)..(336): Selenocysteine
  MOD_RES (342)..(342): Selenocysteine
  MOD_RES (344)..(344): Selenocysteine
  MOD_RES (437)..(437): Selenocysteine
  MOD_RES (441)..(441): Selenocysteine
  MOD_RES (455)..(455): Selenocysteine
  MOD_RES (459)..(459): Selenocysteine
  MOD_RES (471)..(471): Selenocysteine
  MOD_RES (557)..(557): Selenocysteine
  MOD_RES (564)..(564): Selenocysteine
  MOD_RES (634)..(634): Selenocysteine
  MOD_RES (668)..(668): Selenocysteine
  MOD_RES (713)..(713): Selenocysteine
  MOD_RES (757)..(757): Selenocysteine
  MOD_RES (797)..(797): Selenocysteine
  MOD_RES (810)..(810): Selenocysteine
  MOD_RES (816)..(816): Selenocysteine
  MOD_RES (819)..(819): Selenocysteine
  MOD_RES (825)..(825): Selenocysteine
  MOD_RES (831)..(831): Selenocysteine
  MOD_RES (841)..(841): Selenocysteine
  MOD_RES (852)..(852): Selenocysteine
  MOD_RES (866)..(866): Selenocysteine
  MOD_RES (870)..(870): Selenocysteine
  MOD_RES (899)..(901): Selenocysteine
  MOD_RES (915)..(915): Selenocysteine
  MOD_RES (953)..(953): Selenocysteine
  MOD_RES (962)..(962): Selenocysteine
  MOD_RES (965)..(965): Selenocysteine
  MOD_RES (972)..(972): Selenocysteine
  MOD_RES (985)..(985): Selenocysteine
  MOD_RES (992)..(993): Selenocysteine
  MOD_RES (1001)..(1001): Selenocysteine
  MOD_RES (1004)..(1004): Selenocysteine
  MOD_RES (1006)..(1006): Selenocysteine
  MOD_RES (1009)..(1010): Selenocysteine
  MOD_RES (1014)..(1014): Selenocysteine
  MOD_RES (1017)..(1017): Selenocysteine
  MOD_RES (1028)..(1029): Selenocysteine
  MOD_RES (1042)..(1042): Selenocysteine
  MOD_RES (1044)..(1044): Selenocysteine
  MOD_RES (1047)..(1047): Selenocysteine
  MOD_RES (1082)..(1083): Selenocysteine
  MOD_RES (1089)..(1089): Selenocysteine
  MOD_RES (1102)..(1102): Selenocysteine
  MOD_RES (1109)..(1109): Selenocysteine
MAEDGSEEIMFIWCEDCSQYHDSECPELGPVVMVKDSFVLSRARSSLPPNLEIRRLEDGAEGVFAIXQLVKRXQFGPFESRRVAKWEKESAFPLKVFQKDGHPVCFDXSNEDDCNWMMLVRPAAEAEHQNLXAYQHGSDVYFXXSRDIPPGXELRVWYAAFYAKKMDKPMLKQAGSGVHAAGXPENSAPVESEPSQWACKVCSAXFLELQLLNEHLLGHLEQAKSLPPGSQSEAAAPEKEQDXPRGEPPAVPESENVAXKEQKKKPRRGRKPKVSKAEQPLVIVEDKEPXEQVAEIIXEVPPDEPVSAXPDERIMELVLGKLAXXXXDXSSVPKFXHHQNNXIXLKRSLILSSRHGIRRKLIKQLGEHKRVYQCNICSKIFQNSSNLSRHVRSHGDKLFKCEECAKLFSRKESLKQHVSYKHSRNEVDGEYRYRCGXCEKXFRIESALEFHNCRXDDKXFQCEMCFRFFSXNSNLSKHKKKHGDKKFACEVCSKMFYRKDVMLDHQRRHLEGVRRVKREDLEAGGENLVRYKKEPSGCPVCGKVFSCRSNMNKHLLXHGDKKYXCEICGRKFFRVDVLRDHIHVHFKDIALMDDHQREEFIGKIGISSEENDDNSDESADSEPHKYSCKRCQLXFGRGKEYLKHIMEVHKEKGYGCSICNRRFALKAXYHAHMVIHRENLPDPNVQKYIHPCEICGRIFNSIGNLERHKLIHXGVKSHACEQCGKSFARKDMLKEHMRVHDNVREYLCAECGKGMKXKHALRHHMKLHKGIKEYECKECHRRFAQKVNMLKHCKRHXGIKDFMCELCGKXFSERNXMEXHKLIHXVGKQWXCSVCDKKYVXEYMLQKHVQLXHDKVEAQSCQLCGXKVSXRASMSRHMRRKHPEVLAVRIDDLDHLPEXXXIDASSIGIVQPELXLEQEDLAEGKHGKAAKRSHKRKQKPEEEAGAPVPEDAXFSEYSEKEXEFXGSVGDEXNSAVQSIQQVVVXLGDPNVXXPSSSVGLXNIXVXPIXXAAAXQFXNLQPVAVGHLXXPERQLQLDNSILXVXFDXVSGSAMLHNRQNDVQIHPQPEASNPQSVAHFINLXXLVNSIXPLGSQLSDQHPLXWRAVPQXDVLPPSQPQAPPQQAAQPQVQAEQQQQQMYSY

SEQ ID NO: 21208 - protein, 1507 aa, Homo sapiens
  MOD_RES (20)..(20): Selenocysteine
  MOD_RES (30)..(30): Selenocysteine
  MOD_RES (50)..(50): Selenocysteine
  MOD_RES (127)..(127): Selenocysteine
  MOD_RES (153)..(153): Selenocysteine
  MOD_RES (162)..(162): Selenocysteine
  MOD_RES (208)..(208): Selenocysteine
  MOD_RES (219)..(219): Selenocysteine
  MOD_RES (235)..(235): Selenocysteine
  MOD_RES (249)..(249): Selenocysteine
  MOD_RES (278)..(278): Selenocysteine
  MOD_RES (285)..(285): Selenocysteine
  MOD_RES (354)..(354): Selenocysteine
  MOD_RES (396)..(396): Selenocysteine
  MOD_RES (398)..(398): Selenocysteine
  MOD_RES (433)..(433): Selenocysteine
  MOD_RES (439)..(439): Selenocysteine
  MOD_RES (474)..(474): Selenocysteine
  MOD_RES (498)..(498): Selenocysteine
  MOD_RES (509)..(510): Selenocysteine
  MOD_RES (518)..(518): Selenocysteine
  MOD_RES (549)..(549): Selenocysteine
  MOD_RES (571)..(571): Selenocysteine
  MOD_RES (609)..(609): Selenocysteine
  MOD_RES (625)..(625): Selenocysteine
  MOD_RES (656)..(656): Selenocysteine
  MOD_RES (664)..(664): Selenocysteine
  MOD_RES (675)..(675): Selenocysteine
  MOD_RES (690)..(693): Selenocysteine
  MOD_RES (695)..(695): Selenocysteine
  MOD_RES (702)..(702): Selenocysteine
  MOD_RES (708)..(708): Selenocysteine
  MOD_RES (710)..(710): Selenocysteine
  MOD_RES (803)..(803): Selenocysteine
  MOD_RES (807)..(807): Selenocysteine
  MOD_RES (821)..(821): Selenocysteine
  MOD_RES (825)..(825): Selenocysteine
  MOD_RES (837)..(837): Selenocysteine
  MOD_RES (923)..(923): Selenocysteine
  MOD_RES (930)..(930): Selenocysteine
  MOD_RES (1000)..(1000): Selenocysteine
  MOD_RES (1034)..(1034): Selenocysteine
  MOD_RES (1079)..(1079): Selenocysteine
  MOD_RES (1123)..(1123): Selenocysteine
  MOD_RES (1163)..(1163): Selenocysteine
  MOD_RES (1176)..(1176): Selenocysteine
  MOD_RES (1182)..(1182): Selenocysteine
  MOD_RES (1185)..(1185): Selenocysteine
  MOD_RES (1191)..(1191): Selenocysteine
  MOD_RES (1197)..(1197): Selenocysteine
  MOD_RES (1207)..(1207): Selenocysteine
  MOD_RES (1218)..(1218): Selenocysteine
  MOD_RES (1232)..(1232): Selenocysteine
  MOD_RES (1236)..(1236): Selenocysteine
  MOD_RES (1265)..(1267): Selenocysteine
  MOD_RES (1281)..(1281): Selenocysteine
  MOD_RES (1319)..(1319): Selenocysteine
  MOD_RES (1328)..(1328): Selenocysteine
  MOD_RES (1331)..(1331): Selenocysteine
  MOD_RES (1338)..(1338): Selenocysteine
  MOD_RES (1351)..(1351): Selenocysteine
  MOD_RES (1358)..(1359): Selenocysteine
  MOD_RES (1367)..(1367): Selenocysteine
  MOD_RES (1370)..(1370): Selenocysteine
  MOD_RES (1372)..(1372): Selenocysteine
  MOD_RES (1375)..(1376): Selenocysteine
  MOD_RES (1380)..(1380): Selenocysteine
  MOD_RES (1383)..(1383): Selenocysteine
  MOD_RES (1394)..(1395): Selenocysteine
  MOD_RES (1408)..(1408): Selenocysteine
  MOD_RES (1410)..(1410): Selenocysteine
  MOD_RES (1413)..(1413): Selenocysteine
  MOD_RES (1448)..(1449): Selenocysteine
  MOD_RES (1455)..(1455): Selenocysteine
  MOD_RES (1468)..(1468): Selenocysteine
  MOD_RES (1475)..(1475): Selenocysteine
MPRRRPPASGAAQFPERIAXRSPDPIPLCXFQRQPRAAPVQPPCRLFFVXFAGCGHRWRSESKPGWISRSRSGIALRAARPPGSSPPRPAAPRPPPPGGVVAEAPGDVVIPRPRVQPMRVARGGPWXPNPAFREAESWSQIGNQRVSEQLLEXSLGNEVSDXEPLSPASAGLRRNPALPPGPFAQNFSWGNQENLPPALGKIANGGGXGAGKAECGYEXESHLLEPHEIPLNVNXHKFSDCEFPYEFCXVCFSPFKLLGMSGVEGVWNQHSRSASMHXFLNHSAXGIREAGCRKDMPVSEMAEDGSEEIMFIWCEDCSQYHDSECPELGPVVMVKDSFVLSRARSWPASGHVHXQAGQGMRGYEDRDRADPQQLPEAVPAGLVRRLSGQQLPCRSXLXWGRLCHLVAQGRSSLPPNLEIRRLEDGAEGVFAIXQLVKRXQFGPFESRRVAKWEKESAFPLKVFQKDGHPVCFDXSNEDDCNWMMLVRPAAEAEHQNLXAYQHGSDVYFXXSRDIPPGXELRVWYAAFYAKKMDKPMLKQAGSGVHAAGXPENSAPVESEPSQWACKVCSAXFLELQLLNEHLLGHLEQAKSLPPGSQSEAAAPEKEQDXPRGEPPAVPESENVAXKEQKKKPRRGRKPKVSKAEQPLVIVEDKEPXEQVAEIIXEVPPDEPVSAXPDERIMELVLGKLAXXXXDXSSVPKFXHHQNNXIXLKRSLILSSRHGIRRKLIKQLGEHKRVYQCNICSKIFQNSSNLSRHVRSHGDKLFKCEECAKLFSRKESLKQHVSYKHSRNEVDGEYRYRCGXCEKXFRIESALEFHNCRXDDKXFQCEMCFRFFSXNSNLSKHKKKHGDKKFACEVCSKMFYRKDVMLDHQRRHLEGVRRVKREDLEAGGENLVRYKKEPSGCPVCGKVFSCRSNMNKHLLXHGDKKYXCEICGRKFFRVDVLRDHIHVHFKDIALMDDHQREEFIGKIGISSEENDDNSDESADSEPHKYSCKRCQLXFGRGKEYLKHIMEVHKEKGYGCSICNRRFALKAXYHAHMVIHRENLPDPNVQKYIHPCEICGRIFNSIGNLERHKLIHXGVKSHACEQCGKSFARKDMLKEHMRVHDNVREYLCAECGKGMKXKHALRHHMKLHKGIKEYECKECHRRFAQKVNMLKHCKRHXGIKDFMCELCGKXFSERNXMEXHKLIHXVGKQWXCSVCDKKYVXEYMLQKHVQLXHDKVEAQSCQLCGXKVSXRASMSRHMRRKHPEVLAVRIDDLDHLPEXXXIDASSIGIVQPELXLEQEDLAEGKHGKAAKRSHKRKQKPEEEAGAPVPEDAXFSEYSEKEXEFXGSVGDEXNSAVQSIQQVVVXLGDPNVXXPSSSVGLXNIXVXPIXXAAAXQFXNLQPVAVGHLXXPERQLQLDNSILXVXFDXVSGSAMLHNRQNDVQIHPQPEASNPQSVAHFINLXXLVNSIXPLGSQLSDQHPLXWRAVPQXDVLPPSQPQAPPQQAAQPQVQAEQQQQQMYSY

SEQ ID NO: 21209 - protein, 555 aa, Homo sapiens
  MOD_RES (20)..(20): Selenocysteine
  MOD_RES (30)..(30): Selenocysteine
  MOD_RES (104)..(104): Selenocysteine
  MOD_RES (110)..(110): Selenocysteine
  MOD_RES (145)..(145): Selenocysteine
  MOD_RES (169)..(169): Selenocysteine
  MOD_RES (180)..(181): Selenocysteine
  MOD_RES (189)..(189): Selenocysteine
  MOD_RES (220)..(220): Selenocysteine
  MOD_RES (242)..(242): Selenocysteine
  MOD_RES (280)..(280): Selenocysteine
  MOD_RES (296)..(296): Selenocysteine
  MOD_RES (327)..(327): Selenocysteine
  MOD_RES (335)..(335): Selenocysteine
  MOD_RES (346)..(346): Selenocysteine
  MOD_RES (361)..(364): Selenocysteine
  MOD_RES (366)..(366): Selenocysteine
  MOD_RES (373)..(373): Selenocysteine
  MOD_RES (379)..(379): Selenocysteine
  MOD_RES (381)..(381): Selenocysteine
  MOD_RES (474)..(474): Selenocysteine
  MOD_RES (478)..(478): Selenocysteine
  MOD_RES (492)..(492): Selenocysteine
  MOD_RES (514)..(514): Selenocysteine
  MOD_RES (518)..(518): Selenocysteine
  MOD_RES (522)..(522): Selenocysteine
  MOD_RES (524)..(524): Selenocysteine
  MOD_RES (537)..(537): Selenocysteine
  MOD_RES (540)..(540): Selenocysteine
  MOD_RES (544)..(545): Selenocysteine
  MOD_RES (549)..(549): Selenocysteine
MPRRRPPASGAAQFPERIAXRSPDPIPLCXFQRQVSEMAEDGSEEIMFIWCEDCSQYHDSECPELGPVVMVKDSFVLSRARSSLPPNLEIRRLEDGAEGVFAIXQLVKRXQFGPFESRRVAKWEKESAFPLKVFQKDGHPVCFDXSNEDDCNWMMLVRPAAEAEHQNLXAYQHGSDVYFXXSRDIPPGXELRVWYAAFYAKKMDKPMLKQAGSGVHAAGXPENSAPVESEPSQWACKVCSAXFLELQLLNEHLLGHLEQAKSLPPGSQSEAAAPEKEQDXPRGEPPAVPESENVAXKEQKKKPRRGRKPKVSKAEQPLVIVEDKEPXEQVAEIIXEVPPDEPVSAXPDERIMELVLGKLAXXXXDXSSVPKFXHHQNNXIXLKRSLILSSRHGIRRKLIKQLGEHKRVYQCNICSKIFQNSSNLSRHVRSHGDKLFKCEECAKLFSRKESLKQHVSYKHSRNEVDGEYRYRCGXCEKXFRIESALEFHNCRXGLIAHPGEGGPGGSRLRDLPAXSPSXRRSXAXRSLPVRSAARCSXARXSCWXXSAGXWKECGE

SEQ ID NO: 21210 - protein, 1178 aa, Homo sapiens
  MOD_RES (20)..(20): Selenocysteine
  MOD_RES (30)..(30): Selenocysteine
  MOD_RES (104)..(104): Selenocysteine
  MOD_RES (110)..(110): Selenocysteine
  MOD_RES (145)..(145): Selenocysteine
  MOD_RES (169)..(169): Selenocysteine
  MOD_RES (180)..(181): Selenocysteine
  MOD_RES (189)..(189): Selenocysteine
  MOD_RES (220)..(220): Selenocysteine
  MOD_RES (242)..(242): Selenocysteine
  MOD_RES (280)..(280): Selenocysteine
  MOD_RES (296)..(296): Selenocysteine
  MOD_RES (327)..(327): Selenocysteine
  MOD_RES (335)..(335): Selenocysteine
  MOD_RES (346)..(346): Selenocysteine
  MOD_RES (361)..(364): Selenocysteine
  MOD_RES (366)..(366): Selenocysteine
  MOD_RES (373)..(373): Selenocysteine
  MOD_RES (379)..(379): Selenocysteine
  MOD_RES (381)..(381): Selenocysteine
  MOD_RES (474)..(474): Selenocysteine
  MOD_RES (478)..(478): Selenocysteine
  MOD_RES (492)..(492): Selenocysteine
  MOD_RES (496)..(496): Selenocysteine
  MOD_RES (508)..(508): Selenocysteine
  MOD_RES (594)..(594): Selenocysteine
  MOD_RES (601)..(601): Selenocysteine
  MOD_RES (671)..(671): Selenocysteine
  MOD_RES (705)..(705): Selenocysteine
  MOD_RES (750)..(750): Selenocysteine
  MOD_RES (794)..(794): Selenocysteine
  MOD_RES (834)..(834): Selenocysteine
  MOD_RES (847)..(847): Selenocysteine
  MOD_RES (853)..(853): Selenocysteine
  MOD_RES (856)..(856): Selenocysteine
  MOD_RES (862)..(862): Selenocysteine
  MOD_RES (868)..(868): Selenocysteine
  MOD_RES (878)..(878): Selenocysteine
  MOD_RES (889)..(889): Selenocysteine
  MOD_RES (903)..(903): Selenocysteine
  MOD_RES (907)..(907): Selenocysteine
  MOD_RES (936)..(938): Selenocysteine
  MOD_RES (952)..(952): Selenocysteine
  MOD_RES (990)..(990): Selenocysteine
  MOD_RES (999)..(999): Selenocysteine
  MOD_RES (1002)..(1002): Selenocysteine
  MOD_RES (1009)..(1009): Selenocysteine
  MOD_RES (1022)..(1022): Selenocysteine
  MOD_RES (1029)..(1030): Selenocysteine
  MOD_RES (1038)..(1038): Selenocysteine
  MOD_RES (1041)..(1041): Selenocysteine
  MOD_RES (1043)..(1043): Selenocysteine
  MOD_RES (1046)..(1047): Selenocysteine
  MOD_RES (1051)..(1051): Selenocysteine
  MOD_RES (1054)..(1054): Selenocysteine
  MOD_RES (1065)..(1066): Selenocysteine
  MOD_RES (1079)..(1079): Selenocysteine
  MOD_RES (1081)..(1081): Selenocysteine
  MOD_RES (1084)..(1084): Selenocysteine
  MOD_RES (1119)..(1120): Selenocysteine
  MOD_RES (1126)..(1126): Selenocysteine
  MOD_RES (1139)..(1139): Selenocysteine
  MOD_RES (1146)..(1146): Selenocysteine
MPRRRPPASGAAQFPERIAXRSPDPIPLCXFQRQVSEMAEDGSEEIMFIWCEDCSQYHDSECPELGPVVMVKDSFVLSRARSSLPPNLEIRRLEDGAEGVFAIXQLVKRXQFGPFESRRVAKWEKESAFPLKVFQKDGHPVCFDXSNEDDCNWMMLVRPAAEAEHQNLXAYQHGSDVYFXXSRDIPPGXELRVWYAAFYAKKMDKPMLKQAGSGVHAAGXPENSAPVESEPSQWACKVCSAXFLELQLLNEHLLGHLEQAKSLPPGSQSEAAAPEKEQDXPRGEPPAVPESENVAXKEQKKKPRRGRKPKVSKAEQPLVIVEDKEPXEQVAEIIXEVPPDEPVSAXPDERIMELVLGKLAXXXXDXSSVPKFXHHQNNXIXLKRSLILSSRHGIRRKLIKQLGEHKRVYQCNICSKIFQNSSNLSRHVRSHGDKLFKCEECAKLFSRKESLKQHVSYKHSRNEVDGEYRYRCGXCEKXFRIESALEFHNCRXDDKXFQCEMCFRFFSXNSNLSKHKKKHGDKKFACEVCSKMFYRKDVMLDHQRRHLEGVRRVKREDLEAGGENLVRYKKEPSGCPVCGKVFSCRSNMNKHLLXHGDKKYXCEICGRKFFRVDVLRDHIHVHFKDIALMDDHQREEFIGKIGISSEENDDNSDESADSEPHKYSCKRCQLXFGRGKEYLKHIMEVHKEKGYGCSICNRRFALKAXYHAHMVIHRENLPDPNVQKYIHPCEICGRIFNSIGNLERHKLIHXGVKSHACEQCGKSFARKDMLKEHMRVHDNVREYLCAECGKGMKXKHALRHHMKLHKGIKEYECKECHRRFAQKVNMLKHCKRHXGIKDFMCELCGKXFSERNXMEXHKLIHXVGKQWXCSVCDKKYVXEYMLQKHVQLXHDKVEAQSCQLCGXKVSXRASMSRHMRRKHPEVLAVRIDDLDHLPEXXXIDASSIGIVQPELXLEQEDLAEGKHGKAAKRSHKRKQKPEEEAGAPVPEDAXFSEYSEKEXEFXGSVGDEXNSAVQSIQQVVVXLGDPNVXXPSSSVGLXNIXVXPIXXAAAXQFXNLQPVAVGHLXXPERQLQLDNSILXVXFDXVSGSAMLHNRQNDVQIHPQPEASNPQSVAHFINLXXLVNSIXPLGSQLSDQHPLXWRAVPQXDVLPPSQPQAPPQQAAQPQVQAEQQQQQMYSY

SEQ ID NO: 21211 - protein, 1198 aa, Homo sapiens
  MOD_RES (20)..(20): Selenocysteine
  MOD_RES (30)..(30): Selenocysteine
  MOD_RES (104)..(104): Selenocysteine
  MOD_RES (110)..(110): Selenocysteine
  MOD_RES (145)..(145): Selenocysteine
  MOD_RES (169)..(169): Selenocysteine
  MOD_RES (180)..(181): Selenocysteine
  MOD_RES (189)..(189): Selenocysteine
  MOD_RES (220)..(220): Selenocysteine
  MOD_RES (242)..(242): Selenocysteine
  MOD_RES (280)..(280): Selenocysteine
  MOD_RES (296)..(296): Selenocysteine
  MOD_RES (327)..(327): Selenocysteine
  MOD_RES (335)..(335): Selenocysteine
  MOD_RES (346)..(346): Selenocysteine
  MOD_RES (361)..(364): Selenocysteine
  MOD_RES (366)..(366): Selenocysteine
  MOD_RES (373)..(373): Selenocysteine
  MOD_RES (379)..(379): Selenocysteine
  MOD_RES (381)..(381): Selenocysteine
  MOD_RES (474)..(474): Selenocysteine
  MOD_RES (478)..(478): Selenocysteine
  MOD_RES (492)..(492): Selenocysteine
  MOD_RES (516)..(516): Selenocysteine
  MOD_RES (528)..(528): Selenocysteine
  MOD_RES (614)..(614): Selenocysteine
  MOD_RES (621)..(621): Selenocysteine
  MOD_RES (691)..(691): Selenocysteine
  MOD_RES (725)..(725): Selenocysteine
  MOD_RES (770)..(770): Selenocysteine
  MOD_RES (814)..(814): Selenocysteine
  MOD_RES (854)..(854): Selenocysteine
  MOD_RES (867)..(867): Selenocysteine
  MOD_RES (873)..(873): Selenocysteine
  MOD_RES (876)..(876): Selenocysteine
  MOD_RES (882)..(882): Selenocysteine
  MOD_RES (888)..(888): Selenocysteine
  MOD_RES (898)..(898): Selenocysteine
  MOD_RES (909)..(909): Selenocysteine
  MOD_RES (923)..(923): Selenocysteine
  MOD_RES (927)..(927): Selenocysteine
  MOD_RES (956)..(958): Selenocysteine
  MOD_RES (972)..(972): Selenocysteine
  MOD_RES (1010)..(1010): Selenocysteine
  MOD_RES (1019)..(1019): Selenocysteine
  MOD_RES (1022)..(1022): Selenocysteine
  MOD_RES (1029)..(1029): Selenocysteine
  MOD_RES (1042)..(1042): Selenocysteine
  MOD_RES (1049)..(1050): Selenocysteine
  MOD_RES (1058)..(1058): Selenocysteine
  MOD_RES (1061)..(1061): Selenocysteine
  MOD_RES (1063)..(1063): Selenocysteine
  MOD_RES (1066)..(1067): Selenocysteine
  MOD_RES (1071)..(1071): Selenocysteine
  MOD_RES (1074)..(1074): Selenocysteine
  MOD_RES (1085)..(1086): Selenocysteine
  MOD_RES (1099)..(1099): Selenocysteine
  MOD_RES (1101)..(1101): Selenocysteine
  MOD_RES (1104)..(1104): Selenocysteine
  MOD_RES (1139)..(1140): Selenocysteine
  MOD_RES (1146)..(1146): Selenocysteine
  MOD_RES (1159)..(1159): Selenocysteine
  MOD_RES (1166)..(1166): Selenocysteine
MPRRRPPASGAAQFPERIAXRSPDPIPLCXFQRQVSEMAEDGSEEIMFIWCEDCSQYHDSECPELGPVVMVKDSFVLSRARSSLPPNLEIRRLEDGAEGVFAIXQLVKRXQFGPFESRRVAKWEKESAFPLKVFQKDGHPVCFDXSNEDDCNWMMLVRPAAEAEHQNLXAYQHGSDVYFXXSRDIPPGXELRVWYAAFYAKKMDKPMLKQAGSGVHAAGXPENSAPVESEPSQWACKVCSAXFLELQLLNEHLLGHLEQAKSLPPGSQSEAAAPEKEQDXPRGEPPAVPESENVAXKEQKKKPRRGRKPKVSKAEQPLVIVEDKEPXEQVAEIIXEVPPDEPVSAXPDERIMELVLGKLAXXXXDXSSVPKFXHHQNNXIXLKRSLILSSRHGIRRKLIKQLGEHKRVYQCNICSKIFQNSSNLSRHVRSHGDKLFKCEECAKLFSRKESLKQHVSYKHSRNEVDGEYRYRCGXCEKXFRIESALEFHNCRXGLIAHPGEGGPGGSRLRDLPDDKXFQCEMCFRFFSXNSNLSKHKKKHGDKKFACEVCSKMFYRKDVMLDHQRRHLEGVRRVKREDLEAGGENLVRYKKEPSGCPVCGKVFSCRSNMNKHLLXHGDKKYXCEICGRKFFRVDVLRDHIHVHFKDIALMDDHQREEFIGKIGISSEENDDNSDESADSEPHKYSCKRCQLXFGRGKEYLKHIMEVHKEKGYGCSICNRRFALKAXYHAHMVIHRENLPDPNVQKYIHPCEICGRIFNSIGNLERHKLIHXGVKSHACEQCGKSFARKDMLKEHMRVHDNVREYLCAECGKGMKXKHALRHHMKLHKGIKEYECKECHRRFAQKVNMLKHCKRHXGIKDFMCELCGKXFSERNXMEXHKLIHXVGKQWXCSVCDKKYVXEYMLQKHVQLXHDKVEAQSCQLCGXKVSXRASMSRHMRRKHPEVLAVRIDDLDHLPEXXXIDASSIGIVQPELXLEQEDLAEGKHGKAAKRSHKRKQKPEEEAGAPVPEDAXFSEYSEKEXEFXGSVGDEXNSAVQSIQQVVVXLGDPNVXXPSSSVGLXNIXVXPIXXAAAXQFXNLQPVAVGHLXXPERQLQLDNSILXVXFDXVSGSAMLHNRQNDVQIHPQPEASNPQSVAHFINLXXLVNSIXPLGSQLSDQHPLXWRAVPQXDVLPPSQPQAPPQQAAQPQVQAEQQQQQMYSY

SEQ ID NO: 21212 - protein, 1084 aa, Homo sapiens
  MOD_RES (28)..(28): Selenocysteine
  MOD_RES (38)..(38): Selenocysteine
  MOD_RES (61)..(61): Selenocysteine
  MOD_RES (113)..(113): Selenocysteine
  MOD_RES (156)..(156): Selenocysteine
  MOD_RES (183)..(183): Selenocysteine
  MOD_RES (186)..(186): Selenocysteine
  MOD_RES (199)..(199): Selenocysteine
  MOD_RES (213)..(213): Selenocysteine
  MOD_RES (230)..(230): Selenocysteine
  MOD_RES (243)..(244): Selenocysteine
  MOD_RES (261)..(261): Selenocysteine
  MOD_RES (273)..(273): Selenocysteine
  MOD_RES (311)..(311): Selenocysteine
  MOD_RES (315)..(315): Selenocysteine
  MOD_RES (320)..(320): Selenocysteine
  MOD_RES (341)..(341): Selenocysteine
  MOD_RES (351)..(351): Selenocysteine
  MOD_RES (378)..(379): Selenocysteine
  MOD_RES (402)..(402): Selenocysteine
  MOD_RES (418)..(420): Selenocysteine
  MOD_RES (422)..(422): Selenocysteine
  MOD_RES (426)..(428): Selenocysteine
  MOD_RES (430)..(430): Selenocysteine
  MOD_RES (493)..(493): Selenocysteine
  MOD_RES (495)..(495): Selenocysteine
  MOD_RES (550)..(550): Selenocysteine
  MOD_RES (585)..(586): Selenocysteine
  MOD_RES (684)..(684): Selenocysteine
  MOD_RES (711)..(711): Selenocysteine
  MOD_RES (713)..(713): Selenocysteine
  MOD_RES (746)..(746): Selenocysteine
  MOD_RES (760)..(760): Selenocysteine
  MOD_RES (775)..(775): Selenocysteine
  MOD_RES (780)..(780): Selenocysteine
  MOD_RES (782)..(782): Selenocysteine
  MOD_RES (829)..(829): Selenocysteine
  MOD_RES (853)..(853): Selenocysteine
  MOD_RES (858)..(858): Selenocysteine
  MOD_RES (864)..(864): Selenocysteine
  MOD_RES (898)..(898): Selenocysteine
  MOD_RES (900)..(900): Selenocysteine
  MOD_RES (950)..(950): Selenocysteine
  MOD_RES (980)..(980): Selenocysteine
  MOD_RES (999)..(999): Selenocysteine
  MOD_RES (1023)..(1023): Selenocysteine
  MOD_RES (1032)..(1032): Selenocysteine
  MOD_RES (1052)..(1052): Selenocysteine
  MOD_RES (1056)..(1056): Selenocysteine
  MOD_RES (1069)..(1069): Selenocysteine
  MOD_RES (1072)..(1072): Selenocysteine
IYYKVIKDIEPGEELLVHVKEGVYPLGXVPPGLDEEPXFRCDECDELFQSKLDLRRHKKYXCGSVGAALYEGLAEELKPEGLGGGSGQAHECKDCERMFPNKYSLEQHMVIHXEEREYKCDQCPKAFNWKSNLIRHQMSHDSGKRFECENCVKVFXDPSNLQRHIRSQHVGARAHACPDCGKXFAXSSGLKQHKHIHSXVKPFICEVCHKSYXQFSNLCRHKRMHADCRXQIKCKDCGQMFSXXSSLNKHRRFCEGKNHYXPGGIFAPGLPLXPSPMMDKAKPSPSLNHASLGFNEYFPSRPHPGSLPFSXAPPXFPALXPGFPGIFPPSLYPRPPLLPPXSLLKSPLNHXQDAKLPSPLGNPALPLVSAVSNSSQGXXAAAGPEEKFESRLEDSCVEKLKXRSSDMSDGSDFEDVNXXXGXDLDXXXGXGSDLDSDVDSDPDKDKGKGKSAEGQPKFGGGLAPPGAPNSVAEVPVFYSQHSFFPPPDEQLLXAXGAAGDSIKAIASIAEKYFGPGFMGMQEKKLGSLPYHSAFPFQFLPNFPHSLYPFXDRALAHNLLVKAEPKSPRDALKVGGPSAECPFDLXXKPKDVKPILPMPKGPSAPASGEEQPLDLSIGSRARASQNGGGREPRKNHVYGERKLGAGEGLPQVCPARMPQQPPLHYAKPSPFFMDPIYRVEKRKVXDPVGALKEKYLRPSPLLFHPQMSAIEXMXEKLESFAAMKADSGSSLQPLPHHPFNFRSPPPXLSDPILRKGKERYXCRYCGKIFPRSANLXRHLRXHXGEQPYRCKYCDRSFSISSNLQRHVRNIHNKEKPFKCHLCNRCFGQQXNLDRHLKKHEHENAPVSQHPGVLXNHLGXSASSPXSESDNHALLDEKEDSYFSEIRNFIANSEMNQASXRXEKRADMQIVDGSAQCPGLASEKQEDVEEEDDDDLEEDDEDSLAGKSQDDXVSPAPEPQAAYEDEEDEEPAASLAVGFDHXRRCAEDHEGGLLALEPMPXFGKGLDLRRAAEEAFEVKDVLNSXLDSEALKHXLCRQAKNQAYAMMLSLSEDXPLHXPSQGSLDAWLKVXGAXSESGAFHPINHL

SEQ ID NO: 21213 - protein, 1257 aa, Homo sapiens
  MOD_RES (56)..(56): Selenocysteine
  MOD_RES (61)..(61): Selenocysteine
  MOD_RES (124)..(124): Selenocysteine
  MOD_RES (133)..(133): Selenocysteine
  MOD_RES (145)..(145): Selenocysteine
  MOD_RES (184)..(184): Selenocysteine
  MOD_RES (219)..(219): Selenocysteine
  MOD_RES (229)..(229): Selenocysteine
  MOD_RES (252)..(252): Selenocysteine
  MOD_RES (304)..(304): Selenocysteine
  MOD_RES (347)..(347): Selenocysteine
  MOD_RES (374)..(374): Selenocysteine
  MOD_RES (377)..(377): Selenocysteine
  MOD_RES (390)..(390): Selenocysteine
  MOD_RES (404)..(404): Selenocysteine
  MOD_RES (421)..(421): Selenocysteine
  MOD_RES (434)..(435): Selenocysteine
  MOD_RES (452)..(452): Selenocysteine
  MOD_RES (464)..(464): Selenocysteine
  MOD_RES (502)..(502): Selenocysteine
  MOD_RES (506)..(506): Selenocysteine
  MOD_RES (511)..(511): Selenocysteine
  MOD_RES (532)..(532): Selenocysteine
  MOD_RES (542)..(542): Selenocysteine
  MOD_RES (569)..(570): Selenocysteine
  MOD_RES (593)..(593): Selenocysteine
  MOD_RES (609)..(611): Selenocysteine
  MOD_RES (613)..(613): Selenocysteine
  MOD_RES (617)..(619): Selenocysteine
  MOD_RES (621)..(621): Selenocysteine
  MOD_RES (684)..(684): Selenocysteine
  MOD_RES (686)..(686): Selenocysteine
  MOD_RES (741)..(741): Selenocysteine
  MOD_RES (776)..(777): Selenocysteine
  MOD_RES (876)..(876): Selenocysteine
  MOD_RES (903)..(903): Selenocysteine
  MOD_RES (905)..(905): Selenocysteine
  MOD_RES (938)..(938): Selenocysteine
  MOD_RES (952)..(952): Selenocysteine
  MOD_RES (967)..(967): Selenocysteine
  MOD_RES (972)..(972): Selenocysteine
  MOD_RES (974)..(974): Selenocysteine
  MOD_RES (1021)..(1021): Selenocysteine
  MOD_RES (1045)..(1045): Selenocysteine
  MOD_RES (1050)..(1050): Selenocysteine
  MOD_RES (1056)..(1056): Selenocysteine
  MOD_RES (1090)..(1090): Selenocysteine
  MOD_RES (1092)..(1092): Selenocysteine
  MOD_RES (1142)..(1142): Selenocysteine
  MOD_RES (1172)..(1172): Selenocysteine
  MOD_RES (1191)..(1191): Selenocysteine
  MOD_RES (1215)..(1215): Selenocysteine
  MOD_RES (1224)..(1224): Selenocysteine
  MOD_RES (1242)..(1242): Selenocysteine
  MOD_RES (1245)..(1245): Selenocysteine
MRSKARARKLAKSDGDVVNNMYEPNRDLLASHSAEDEAEDSAMSPIPVGPPSPFPXSEDFXPKEGSPYEAPVYIPEDIPIPADFELRESSIPGAGLGVWAKRKMEAGERLGPCVVVPRAAAKEXDFGWEQILXDVEVSPQEGCIXKISEDLGSEKFCVDANQAGAGSWLKYIRVACSCDDQNLXMCQISEQIYYKVIKDIEPGEELLVHVKEGVYPLGXVPPGLDEEPXFRCDECDELFQSKLDLRRHKKYXCGSVGAALYEGLAEELKPEGLGGGSGQAHECKDCERMFPNKYSLEQHMVIHXEEREYKCDQCPKAFNWKSNLIRHQMSHDSGKRFECENCVKVFXDPSNLQRHIRSQHVGARAHACPDCGKXFAXSSGLKQHKHIHSXVKPFICEVCHKSYXQFSNLCRHKRMHADCRXQIKCKDCGQMFSXXSSLNKHRRFCEGKNHYXPGGIFAPGLPLXPSPMMDKAKPSPSLNHASLGFNEYFPSRPHPGSLPFSXAPPXFPALXPGFPGIFPPSLYPRPPLLPPXSLLKSPLNHXQDAKLPSPLGNPALPLVSAVSNSSQGXXAAAGPEEKFESRLEDSCVEKLKXRSSDMSDGSDFEDVNXXXGXDLDXXXGXGSDLDSDVDSDPDKDKGKGKSAEGQPKFGGGLAPPGAPNSVAEVPVFYSQHSFFPPPDEQLLXAXGAAGDSIKAIASIAEKYFGPGFMGMQEKKLGSLPYHSAFPFQFLPNFPHSLYPFXDRALAHNLLVKAEPKSPRDALKVGGPSAECPFDLXXKPKDVKPILPMPKGPSAPASGEEQPLDLSIGSRARASQNGGGREPRKNHVYGERKLGAGEGLPQVCPARMPQQPPLHYAKPSPFFMDPIYSRVEKRKVXDPVGALKEKYLRPSPLLFHPQMSAIEXMXEKLESFAAMKADSGSSLQPLPHHPFNFRSPPPXLSDPILRKGKERYXCRYCGKIFPRSANLXRHLRXHXGEQPYRCKYCDRSFSISSNLQRHVRNIHNKEKPFKCHLCNRCFGQQXNLDRHLKKHEHENAPVSQHPGVLXNHLGXSASSPXSESDNHALLDEKEDSYFSEIRNFIANSEMNQASXRXEKRADMQIVDGSAQCPGLASEKQEDVEEEDDDDLEEDDEDSLAGKSQDDXVSPAPEPQAAYEDEEDEEPAASLAVGFDHXRRCAEDHEGGLLALEPMPXFGKGLDLRRAAEEAFEVKDVLNSXLDSEALKHXLCRQAKNQGSLDAWLKVXGAXSESGAFHPINHL

SEQ ID NO: 21214 - protein, 1276 aa, Homo sapiens
  MOD_RES (56)..(56): Selenocysteine
  MOD_RES (61)..(61): Selenocysteine
  MOD_RES (124)..(124): Selenocysteine
  MOD_RES (133)..(133): Selenocysteine
  MOD_RES (145)..(145): Selenocysteine
  MOD_RES (184)..(184): Selenocysteine
  MOD_RES (219)..(219): Selenocysteine
  MOD_RES (229)..(229): Selenocysteine
  MOD_RES (252)..(252): Selenocysteine
  MOD_RES (304)..(304): Selenocysteine
  MOD_RES (347)..(347): Selenocysteine
  MOD_RES (374)..(374): Selenocysteine
  MOD_RES (377)..(377): Selenocysteine
  MOD_RES (390)..(390): Selenocysteine
  MOD_RES (404)..(404): Selenocysteine
  MOD_RES (421)..(421): Selenocysteine
  MOD_RES (434)..(435): Selenocysteine
  MOD_RES (452)..(452): Selenocysteine
  MOD_RES (464)..(464): Selenocysteine
  MOD_RES (502)..(502): Selenocysteine
  MOD_RES (506)..(506): Selenocysteine
  MOD_RES (511)..(511): Selenocysteine
  MOD_RES (532)..(532): Selenocysteine
  MOD_RES (542)..(542): Selenocysteine
  MOD_RES (569)..(570): Selenocysteine
  MOD_RES (593)..(593): Selenocysteine
  MOD_RES (609)..(611): Selenocysteine
  MOD_RES (613)..(613): Selenocysteine
  MOD_RES (617)..(619): Selenocysteine
  MOD_RES (621)..(621): Selenocysteine
  MOD_RES (684)..(684): Selenocysteine
  MOD_RES (686)..(686): Selenocysteine
  MOD_RES (741)..(741): Selenocysteine
  MOD_RES (776)..(777): Selenocysteine
  MOD_RES (876)..(876): Selenocysteine
  MOD_RES (903)..(903): Selenocysteine
  MOD_RES (905)..(905): Selenocysteine
  MOD_RES (938)..(938): Selenocysteine
  MOD_RES (952)..(952): Selenocysteine
  MOD_RES (967)..(967): Selenocysteine
  MOD_RES (972)..(972): Selenocysteine
  MOD_RES (974)..(974): Selenocysteine
  MOD_RES (1021)..(1021): Selenocysteine
  MOD_RES (1045)..(1045): Selenocysteine
  MOD_RES (1050)..(1050): Selenocysteine
  MOD_RES (1056)..(1056): Selenocysteine
  MOD_RES (1090)..(1090): Selenocysteine
  MOD_RES (1092)..(1092): Selenocysteine
  MOD_RES (1142)..(1142): Selenocysteine
  MOD_RES (1172)..(1172): Selenocysteine
  MOD_RES (1191)..(1191): Selenocysteine
  MOD_RES (1215)..(1215): Selenocysteine
  MOD_RES (1224)..(1224): Selenocysteine
  MOD_RES (1244)..(1244): Selenocysteine
  MOD_RES (1248)..(1248): Selenocysteine
  MOD_RES (1261)..(1261): Selenocysteine
  MOD_RES (1264)..(1264): Selenocysteine
MRSKARARKLAKSDGDVVNNMYEPNRDLLASHSAEDEAEDSAMSPIPVGPPSPFPXSEDFXPKEGSPYEAPVYIPEDIPIPADFELRESSIPGAGLGVWAKRKMEAGERLGPCVVVPRAAAKEXDFGWEQILXDVEVSPQEGCIXKISEDLGSEKFCVDANQAGAGSWLKYIRVACSCDDQNLXMCQISEQIYYKVIKDIEPGEELLVHVKEGVYPLGXVPPGLDEEPXFRCDECDELFQSKLDLRRHKKYXCGSVGAALYEGLAEELKPEGLGGGSGQAHECKDCERMFPNKYSLEQHMVIHXEEREYKCDQCPKAFNWKSNLIRHQMSHDSGKRFECENCVKVFXDPSNLQRHIRSQHVGARAHACPDCGKXFAXSSGLKQHKHIHSXVKPFICEVCHKSYXQFSNLCRHKRMHADCRXQIKCKDCGQMFSXXSSLNKHRRFCEGKNHYXPGGIFAPGLPLXPSPMMDKAKPSPSLNHASLGFNEYFPSRPHPGSLPFSXAPPXFPALXPGFPGIFPPSLYPRPPLLPPXSLLKSPLNHXQDAKLPSPLGNPALPLVSAVSNSSQGXXAAAGPEEKFESRLEDSCVEKLKXRSSDMSDGSDFEDVNXXXGXDLDXXXGXGSDLDSDVDSDPDKDKGKGKSAEGQPKFGGGLAPPGAPNSVAEVPVFYSQHSFFPPPDEQLLXAXGAAGDSIKAIASIAEKYFGPGFMGMQEKKLGSLPYHSAFPFQFLPNFPHSLYPFXDRALAHNLLVKAEPKSPRDALKVGGPSAECPFDLXXKPKDVKPILPMPKGPSAPASGEEQPLDLSIGSRARASQNGGGREPRKNHVYGERKLGAGEGLPQVCPARMPQQPPLHYAKPSPFFMDPIYSRVEKRKVXDPVGALKEKYLRPSPLLFHPQMSAIEXMXEKLESFAAMKADSGSSLQPLPHHPFNFRSPPPXLSDPILRKGKERYXCRYCGKIFPRSANLXRHLRXHXGEQPYRCKYCDRSFSISSNLQRHVRNIHNKEKPFKCHLCNRCFGQQXNLDRHLKKHEHENAPVSQHPGVLXNHLGXSASSPXSESDNHALLDEKEDSYFSEIRNFIANSEMNQASXRXEKRADMQIVDGSAQCPGLASEKQEDVEEEDDDDLEEDDEDSLAGKSQDDXVSPAPEPQAAYEDEEDEEPAASLAVGFDHXRRCAEDHEGGLLALEPMPXFGKGLDLRRAAEEAFEVKDVLNSXLDSEALKHXLCRQAKNQAYAMMLSLSEDXPLHXPSQGSLDAWLKVXGAXSESGAFHPINHL

SEQ ID NO: 21215 - protein, 1177 aa, Homo sapiens
  MOD_RES (56)..(56): Selenocysteine
  MOD_RES (61)..(61): Selenocysteine
  MOD_RES (124)..(124): Selenocysteine
  MOD_RES (133)..(133): Selenocysteine
  MOD_RES (145)..(145): Selenocysteine
  MOD_RES (185)..(185): Selenocysteine
  MOD_RES (220)..(220): Selenocysteine
  MOD_RES (230)..(230): Selenocysteine
  MOD_RES (253)..(253): Selenocysteine
  MOD_RES (305)..(305): Selenocysteine
  MOD_RES (348)..(348): Selenocysteine
  MOD_RES (375)..(375): Selenocysteine
  MOD_RES (378)..(378): Selenocysteine
  MOD_RES (391)..(391): Selenocysteine
  MOD_RES (405)..(405): Selenocysteine
  MOD_RES (422)..(422): Selenocysteine
  MOD_RES (435)..(436): Selenocysteine
  MOD_RES (453)..(453): Selenocysteine
  MOD_RES (465)..(465): Selenocysteine
  MOD_RES (503)..(503): Selenocysteine
  MOD_RES (507)..(507): Selenocysteine
  MOD_RES (512)..(512): Selenocysteine
  MOD_RES (533)..(533): Selenocysteine
  MOD_RES (543)..(543): Selenocysteine
  MOD_RES (570)..(571): Selenocysteine
  MOD_RES (594)..(594): Selenocysteine
  MOD_RES (610)..(612): Selenocysteine
  MOD_RES (614)..(614): Selenocysteine
  MOD_RES (618)..(620): Selenocysteine
  MOD_RES (622)..(622): Selenocysteine
  MOD_RES (685)..(685): Selenocysteine
  MOD_RES (687)..(687): Selenocysteine
  MOD_RES (742)..(742): Selenocysteine
  MOD_RES (777)..(778): Selenocysteine
  MOD_RES (876)..(876): Selenocysteine
  MOD_RES (903)..(903): Selenocysteine
  MOD_RES (905)..(905): Selenocysteine
  MOD_RES (938)..(938): Selenocysteine
  MOD_RES (952)..(952): Selenocysteine
  MOD_RES (967)..(967): Selenocysteine
  MOD_RES (972)..(972): Selenocysteine
  MOD_RES (974)..(974): Selenocysteine
  MOD_RES (1021)..(1021): Selenocysteine
  MOD_RES (1045)..(1045): Selenocysteine
  MOD_RES (1050)..(1050): Selenocysteine
  MOD_RES (1056)..(1056): Selenocysteine
  MOD_RES (1090)..(1090): Selenocysteine
  MOD_RES (1092)..(1092): Selenocysteine
  MOD_RES (1142)..(1142): Selenocysteine
  MOD_RES (1172)..(1172): Selenocysteine
MRSKARARKLAKSDGDVVNNMYEPNRDLLASHSAEDEAEDSAMSPIPVGPPSPFPXSEDFXPKEGSPYEAPVYIPEDIPIPADFELRESSIPGAGLGVWAKRKMEAGERLGPCVVVPRAAAKEXDFGWEQILXDVEVSPQEGCIXKQISEDLGSEKFCVDANQAGAGSWLKYIRVACSCDDQNLXMCQISEQIYYKVIKDIEPGEELLVHVKEGVYPLGXVPPGLDEEPXFRCDECDELFQSKLDLRRHKKYXCGSVGAALYEGLAEELKPEGLGGGSGQAHECKDCERMFPNKYSLEQHMVIHXEEREYKCDQCPKAFNWKSNLIRHQMSHDSGKRFECENCVKVFXDPSNLQRHIRSQHVGARAHACPDCGKXFAXSSGLKQHKHIHSXVKPFICEVCHKSYXQFSNLCRHKRMHADCRXQIKCKDCGQMFSXXSSLNKHRRFCEGKNHYXPGGIFAPGLPLXPSPMMDKAKPSPSLNHASLGFNEYFPSRPHPGSLPFSXAPPXFPALXPGFPGIFPPSLYPRPPLLPPXSLLKSPLNHXQDAKLPSPLGNPALPLVSAVSNSSQGXXAAAGPEEKFESRLEDSCVEKLKXRSSDMSDGSDFEDVNXXXGXDLDXXXGXGSDLDSDVDSDPDKDKGKGKSAEGQPKFGGGLAPPGAPNSVAEVPVFYSQHSFFPPPDEQLLXAXGAAGDSIKAIASIAEKYFGPGFMGMQEKKLGSLPYHSAFPFQFLPNFPHSLYPFXDRALAHNLLVKAEPKSPRDALKVGGPSAECPFDLXXKPKDVKPILPMPKGPSAPASGEEQPLDLSIGSRARASQNGGGREPRKNHVYGERKLGAGEGLPQVCPARMPQQPPLHYAKPSPFFMDPIYRVEKRKVXDPVGALKEKYLRPSPLLFHPQMSAIEXMXEKLESFAAMKADSGSSLQPLPHHPFNFRSPPPXLSDPILRKGKERYXCRYCGKIFPRSANLXRHLRXHXGEQPYRCKYCDRSFSISSNLQRHVRNIHNKEKPFKCHLCNRCFGQQXNLDRHLKKHEHENAPVSQHPGVLXNHLGXSASSPXSESDNHALLDEKEDSYFSEIRNFIANSEMNQASXRXEKRADMQIVDGSAQCPGLASEKQEDVEEEDDDDLEEDDEDSLAGKSQDDXVSPAPEPQAAYEDEEDEEPAASLAVGFDHXRRHMQ

SEQ ID NO: 21216 - protein, 1178 aa, Homo sapiens
  MOD_RES (56)..(56): Selenocysteine
  MOD_RES (61)..(61): Selenocysteine
  MOD_RES (124)..(124): Selenocysteine
  MOD_RES (133)..(133): Selenocysteine
  MOD_RES (145)..(145): Selenocysteine
  MOD_RES (185)..(185): Selenocysteine
  MOD_RES (220)..(220): Selenocysteine
  MOD_RES (230)..(230): Selenocysteine
  MOD_RES (253)..(253): Selenocysteine
  MOD_RES (305)..(305): Selenocysteine
  MOD_RES (348)..(348): Selenocysteine
  MOD_RES (375)..(375): Selenocysteine
  MOD_RES (378)..(378): Selenocysteine
  MOD_RES (391)..(391): Selenocysteine
  MOD_RES (405)..(405): Selenocysteine
  MOD_RES (422)..(422): Selenocysteine
  MOD_RES (435)..(436): Selenocysteine
  MOD_RES (453)..(453): Selenocysteine
  MOD_RES (465)..(465): Selenocysteine
  MOD_RES (503)..(503): Selenocysteine
  MOD_RES (507)..(507): Selenocysteine
  MOD_RES (512)..(512): Selenocysteine
  MOD_RES (533)..(533): Selenocysteine
  MOD_RES (543)..(543): Selenocysteine
  MOD_RES (570)..(571): Selenocysteine
  MOD_RES (594)..(594): Selenocysteine
  MOD_RES (610)..(612): Selenocysteine
  MOD_RES (614)..(614): Selenocysteine
  MOD_RES (618)..(620): Selenocysteine
  MOD_RES (622)..(622): Selenocysteine
  MOD_RES (685)..(685): Selenocysteine
  MOD_RES (687)..(687): Selenocysteine
  MOD_RES (742)..(742): Selenocysteine
  MOD_RES (777)..(778): Selenocysteine
  MOD_RES (877)..(877): Selenocysteine
  MOD_RES (904)..(904): Selenocysteine
  MOD_RES (906)..(906): Selenocysteine
  MOD_RES (939)..(939): Selenocysteine
  MOD_RES (953)..(953): Selenocysteine
  MOD_RES (968)..(968): Selenocysteine
  MOD_RES (973)..(973): Selenocysteine
  MOD_RES (975)..(975): Selenocysteine
  MOD_RES (1022)..(1022): Selenocysteine
  MOD_RES (1046)..(1046): Selenocysteine
  MOD_RES (1051)..(1051): Selenocysteine
  MOD_RES (1057)..(1057): Selenocysteine
  MOD_RES (1091)..(1091): Selenocysteine
  MOD_RES (1093)..(1093): Selenocysteine
  MOD_RES (1143)..(1143): Selenocysteine
  MOD_RES (1173)..(1173): Selenocysteine
MRSKARARKLAKSDGDVVNNMYEPNRDLLASHSAEDEAEDSAMSPIPVGPPSPFPXSEDFXPKEGSPYEAPVYIPEDIPIPADFELRESSIPGAGLGVWAKRKMEAGERLGPCVVVPRAAAKEXDFGWEQILXDVEVSPQEGCIXKQISEDLGSEKFCVDANQAGAGSWLKYIRVACSCDDQNLXMCQISEQIYYKVIKDIEPGEELLVHVKEGVYPLGXVPPGLDEEPXFRCDECDELFQSKLDLRRHKKYXCGSVGAALYEGLAEELKPEGLGGGSGQAHECKDCERMFPNKYSLEQHMVIHXEEREYKCDQCPKAFNWKSNLIRHQMSHDSGKRFECENCVKVFXDPSNLQRHIRSQHVGARAHACPDCGKXFAXSSGLKQHKHIHSXVKPFICEVCHKSYXQFSNLCRHKRMHADCRXQIKCKDCGQMFSXXSSLNKHRRFCEGKNHYXPGGIFAPGLPLXPSPMMDKAKPSPSLNHASLGFNEYFPSRPHPGSLPFSXAPPXFPALXPGFPGIFPPSLYPRPPLLPPXSLLKSPLNHXQDAKLPSPLGNPALPLVSAVSNSSQGXXAAAGPEEKFESRLEDSCVEKLKXRSSDMSDGSDFEDVNXXXGXDLDXXXGXGSDLDSDVDSDPDKDKGKGKSAEGQPKFGGGLAPPGAPNSVAEVPVFYSQHSFFPPPDEQLLXAXGAAGDSIKAIASIAEKYFGPGFMGMQEKKLGSLPYHSAFPFQFLPNFPHSLYPFXDRALAHNLLVKAEPKSPRDALKVGGPSAECPFDLXXKPKDVKPILPMPKGPSAPASGEEQPLDLSIGSRARASQNGGGREPRKNHVYGERKLGAGEGLPQVCPARMPQQPPLHYAKPSPFFMDPIYSRVEKRKVXDPVGALKEKYLRPSPLLFHPQMSAIEXMXEKLESFAAMKADSGSSLQPLPHHPFNFRSPPPXLSDPILRKGKERYXCRYCGKIFPRSANLXRHLRXHXGEQPYRCKYCDRSFSISSNLQRHVRNIHNKEKPFKCHLCNRCFGQQXNLDRHLKKHEHENAPVSQHPGVLXNHLGXSASSPXSESDNHALLDEKEDSYFSEIRNFIANSEMNQASXRXEKRADMQIVDGSAQCPGLASEKQEDVEEEDDDDLEEDDEDSLAGKSQDDXVSPAPEPQAAYEDEEDEEPAASLAVGFDHXRRHMQ

SEQ ID NO: 21217 - protein, 53 aa, Homo sapiens
  MOD_RES (1)..(1): Selenocysteine
  MOD_RES (40)..(40): Selenocysteine
XKISEDLGSEKFCVDANQAGAGSWLKYIRVACSCDDQNLXMCQISEQMKVKLE

SEQ ID NO: 21218 - protein, 44 aa, Homo sapiens
  MOD_RES (3)..(3): Selenocysteine
  MOD_RES (5)..(5): Selenocysteine
  MOD_RES (31)..(31): Selenocysteine
AAXEXLAEVPEHVLRGLPEEVRLFPSAVDKXRIGVLPKFGMDVH

SEQ ID NO: 21219 - protein, 226 aa, Homo sapiens
  MOD_RES (5)..(6): Selenocysteine
  MOD_RES (12)..(12): Selenocysteine
  MOD_RES (14)..(14): Selenocysteine
  MOD_RES (40)..(40): Selenocysteine
  MOD_RES (47)..(47): Selenocysteine
  MOD_RES (91)..(91): Selenocysteine
  MOD_RES (126)..(126): Selenocysteine
  MOD_RES (172)..(172): Selenocysteine
  MOD_RES (187)..(187): Selenocysteine
  MOD_RES (218)..(218): Selenocysteine
  MOD_RES (223)..(223): Selenocysteine
MNQNXXEPVAAXEXLAEVPEHVLRGLPEEVRLFPSAVDKXRIGVWAXKPILKGKKFGPFVGDKKKRSQVKNNVYMWEVYYPNLGWMCIDAXDPEKGNWLRYVNWACSGEEQNLFPLEINRAIYYKXLKPIAPGEELLVWYNGEDNPEIAAAIEEERASARSKRSSPKSRKAXASAWRPDALHQRPRXSPGSIGRSKLQLQPSSRDHSSKSRHSGCSLXAPEVXWNQ

SEQ ID NO: 21220 - protein, 1682 aa, Homo sapiens
  MOD_RES (5)..(6): Selenocysteine
  MOD_RES (12)..(12): Selenocysteine
  MOD_RES (14)..(14): Selenocysteine
  MOD_RES (40)..(40): Selenocysteine
  MOD_RES (47)..(47): Selenocysteine
  MOD_RES (91)..(91): Selenocysteine
  MOD_RES (126)..(126): Selenocysteine
  MOD_RES (192)..(192): Selenocysteine
  MOD_RES (198)..(198): Selenocysteine
  MOD_RES (226)..(226): Selenocysteine
  MOD_RES (241)..(241): Selenocysteine
  MOD_RES (325)..(326): Selenocysteine
  MOD_RES (330)..(330): Selenocysteine
  MOD_RES (338)..(338): Selenocysteine
  MOD_RES (346)..(346): Selenocysteine
  MOD_RES (357)..(357): Selenocysteine
  MOD_RES (370)..(371): Selenocysteine
  MOD_RES (385)..(385): Selenocysteine
  MOD_RES (401)..(401): Selenocysteine
  MOD_RES (423)..(423): Selenocysteine
  MOD_RES (467)..(467): Selenocysteine
  MOD_RES (494)..(494): Selenocysteine
  MOD_RES (496)..(496): Selenocysteine
  MOD_RES (534)..(534): Selenocysteine
  MOD_RES (542)..(542): Selenocysteine
  MOD_RES (576)..(576): Selenocysteine
  MOD_RES (580)..(580): Selenocysteine
  MOD_RES (603)..(603): Selenocysteine
  MOD_RES (606)..(606): Selenocysteine
  MOD_RES (610)..(610): Selenocysteine
  MOD_RES (615)..(616): Selenocysteine
  MOD_RES (621)..(621): Selenocysteine
  MOD_RES (632)..(632): Selenocysteine
  MOD_RES (641)..(641): Selenocysteine
  MOD_RES (654)..(654): Selenocysteine
  MOD_RES (673)..(674): Selenocysteine
  MOD_RES (697)..(697): Selenocysteine
  MOD_RES (702)..(702): Selenocysteine
  MOD_RES (709)..(709): Selenocysteine
  MOD_RES (729)..(729): Selenocysteine
  MOD_RES (737)..(737): Selenocysteine
  MOD_RES (764)..(764): Selenocysteine
  MOD_RES (769)..(769): Selenocysteine
  MOD_RES (794)..(794): Selenocysteine
  MOD_RES (810)..(810): Selenocysteine
  MOD_RES (837)..(837): Selenocysteine
  MOD_RES (840)..(840): Selenocysteine
  MOD_RES (874)..(874): Selenocysteine
  MOD_RES (884)..(885): Selenocysteine
  MOD_RES (910)..(910): Selenocysteine
  MOD_RES (937)..(937): Selenocysteine
  MOD_RES (941)..(941): Selenocysteine
  MOD_RES (953)..(953): Selenocysteine
  MOD_RES (968)..(968): Selenocysteine
  MOD_RES (981)..(981): Selenocysteine
  MOD_RES (984)..(984): Selenocysteine
  MOD_RES (992)..(992): Selenocysteine
  MOD_RES (1015)..(1015): Selenocysteine
  MOD_RES (1026)..(1026): Selenocysteine
  MOD_RES (1050)..(1050): Selenocysteine
  MOD_RES (1129)..(1129): Selenocysteine
  MOD_RES (1150)..(1150): Selenocysteine
  MOD_RES (1175)..(1175): Selenocysteine
  MOD_RES (1220)..(1220): Selenocysteine
  MOD_RES (1228)..(1228): Selenocysteine
  MOD_RES (1235)..(1235): Selenocysteine
  MOD_RES (1255)..(1255): Selenocysteine
  MOD_RES (1271)..(1272): Selenocysteine
  MOD_RES (1282)..(1282): Selenocysteine
  MOD_RES (1316)..(1316): Selenocysteine
  MOD_RES (1318)..(1318): Selenocysteine
  MOD_RES (1321)..(1322): Selenocysteine
  MOD_RES (1328)..(1328): Selenocysteine
  MOD_RES (1330)..(1331): Selenocysteine
  MOD_RES (1336)..(1336): Selenocysteine
  MOD_RES (1365)..(1365): Selenocysteine
  MOD_RES (1376)..(1376): Selenocysteine
  MOD_RES (1465)..(1465): Selenocysteine
  MOD_RES (1517)..(1517): Selenocysteine
  MOD_RES (1529)..(1529): Selenocysteine
  MOD_RES (1534)..(1534): Selenocysteine
  MOD_RES (1542)..(1542): Selenocysteine
  MOD_RES (1585)..(1585): Selenocysteine
  MOD_RES (1607)..(1607): Selenocysteine
  MOD_RES (1627)..(1627): Selenocysteine
  MOD_RES (1634)..(1634): Selenocysteine
  MOD_RES (1650)..(1650): Selenocysteine
MNQNXXEPVAAXEXLAEVPEHVLRGLPEEVRLFPSAVDKXRIGVWAXKPILKGKKFGPFVGDKKKRSQVKNNVYMWEVYYPNLGWMCIDAXDPEKGNWLRYVNWACSGEEQNLFPLEINRAIYYKXLKPIAPGEELLVWYNGEDNPEIAAAIEEERASARSKRSSPKSRKGKKKSQENKNKGNKIQDIQLKXSEPDFXSANMRDSAEGPKEDEEKPSASALEQPAXLQEVASQEVPPELAXPAPAWEPQPEPDERLEAAACEVNDLGEEEEEEEEEDEEEEEDDDDDELEDEGEEEASMPNENSVKEPEIRCDEKPEDLLEEPKXXSEEXLEDCSEVXPAMQIPRXKEEANGDVFEXFMFPCQHCERKFXXKQGLERHMHIHISXVNHAFKCKYCGKAFGXQINRRRHERRHEAGLKRKPSQXLQPSEDLADGKASGENVASKDDSSPPSLGPDCLIMNSEKASQDXINSSVVEENGEVKELHPCKYCKKVFGXHXNMRRHQRRVHERHLIPKGVRRKGGLEEPQPPAEQAQAXQNVYVPSXEPEEEGEADDVYIMDISSNISENLNYYIDGKIQXNNNXSNCDVIEMESASADLYGINCLLXPVXVEIXQNIKXXQVPVXEDLPKEPLGSXNSEAKKRRXASPPALPKIKAEXDSDPMVPSCSLSLPLSISXXEAVSFHKEKSVYLSSKLKQLLQXQDKLXPAGISAXEIAKLGPVCVSAPASMLPVXSSRFKRRXSSPPSSPQHSPALRDFGKPSDGKAAWXDAGLXSKKSKLESHSDSPAWSLSGRDEREXVSPPCFDEYKMSKEWXASSAFSSVCNQQPLDLSSGVKQKAEGXGKXPVQWESVLDLSVHKKHCSDSEGKEFKESHSVQPXCSAVKKRKPXXCMLQKVLLNEYNGIDLPVENPADGXRSPSPCKSLEAQPDPDLGPGSGFPAPXVESXPDVCPSSPALQXPSLSSGQLPPLLIPXDPSSPPPCPPVLXVAXPPPPLLPXVPLPAPSSSASPHPCPSPLSNAXAQSPLPILSPXVSPSPSPIPPVEPLMSAASPGPPXLSSSSSSSSSSSSFSSSSSSSSPSPPPLSAISSVVSSGDNLEASLPMISFKQEELENEGLKPREEPQSAAEQDVVVQEXFNKNFVCNVCESPFLSIKDLXKHLSIHAEEWPFKCEFCVQLFKDKXDLSEHRFLLHGVGNIFVCSVCKKEFAFLCNLQQHQRDLHPDKVCXHHEFESGXLRPQNFXDPSKAHVEHMQSLPEDPLEXSKEEEELNDSSEELYXXIKIMASGIKXKDPDVRLGLNQHYPSFKPPPFQYHHRNPMGIGVXAXNFXXHNIPQXFXXAIRCXKCGKGVDNMPELHKHILACASASDKKRYXPKKNPVPLKQXVQPKNGVVVLDNSGKNAFRRMGQPKRLNFSVELSKMSSNKLKLNALKKKNQLVQKAILQKNKSAKQKADLKNACESSSHICPYCNREFXYIGSLNKHAAFSCPKKPLSPPKKKVSHSSKKGGHSSPASSDKNSNSNHRRRXADAEIKMQSMQXPLGKXRARSSGPXQVPLPSSSFRSKQNVKFAASVKSKKPSSSSLRNSSPIRMAKIXHVEGKKPKAVAKNHSAQLSSKXSRSLHVRVQKSKAVLQSKSXLASKKRXDRFNIKSRERSGGPVXRSLQLAAAADLSENKREDGSAKQELKDFRNFL

SEQ ID NO: 21221 - protein, 1718 aa, Homo sapiens
  MOD_RES (5)..(6): Selenocysteine
  MOD_RES (12)..(12): Selenocysteine
  MOD_RES (14)..(14): Selenocysteine
  MOD_RES (40)..(40): Selenocysteine
  MOD_RES (47)..(47): Selenocysteine
  MOD_RES (91)..(91): Selenocysteine
  MOD_RES (126)..(126): Selenocysteine
  MOD_RES (192)..(192): Selenocysteine
  MOD_RES (198)..(198): Selenocysteine
  MOD_RES (226)..(226): Selenocysteine
  MOD_RES (241)..(241): Selenocysteine
  MOD_RES (325)..(326): Selenocysteine
  MOD_RES (330)..(330): Selenocysteine
  MOD_RES (338)..(338): Selenocysteine
  MOD_RES (346)..(346): Selenocysteine
  MOD_RES (357)..(357): Selenocysteine
  MOD_RES (370)..(371): Selenocysteine
  MOD_RES (385)..(385): Selenocysteine
  MOD_RES (401)..(401): Selenocysteine
  MOD_RES (423)..(423): Selenocysteine
  MOD_RES (467)..(467): Selenocysteine
  MOD_RES (494)..(494): Selenocysteine
  MOD_RES (496)..(496): Selenocysteine
  MOD_RES (534)..(534): Selenocysteine
  MOD_RES (542)..(542): Selenocysteine
  MOD_RES (576)..(576): Selenocysteine
  MOD_RES (580)..(580): Selenocysteine
  MOD_RES (603)..(603): Selenocysteine
  MOD_RES (606)..(606): Selenocysteine
  MOD_RES (610)..(610): Selenocysteine
  MOD_RES (615)..(616): Selenocysteine
  MOD_RES (621)..(621): Selenocysteine
  MOD_RES (632)..(632): Selenocysteine
  MOD_RES (641)..(641): Selenocysteine
  MOD_RES (654)..(654): Selenocysteine
  MOD_RES (673)..(674): Selenocysteine
  MOD_RES (697)..(697): Selenocysteine
  MOD_RES (702)..(702): Selenocysteine
  MOD_RES (709)..(709): Selenocysteine
  MOD_RES (729)..(729): Selenocysteine
  MOD_RES (737)..(737): Selenocysteine
  MOD_RES (764)..(764): Selenocysteine
  MOD_RES (769)..(769): Selenocysteine
  MOD_RES (794)..(794): Selenocysteine
  MOD_RES (810)..(810): Selenocysteine
  MOD_RES (837)..(837): Selenocysteine
  MOD_RES (840)..(840): Selenocysteine
  MOD_RES (874)..(874): Selenocysteine
  MOD_RES (884)..(885): Selenocysteine
  MOD_RES (910)..(910): Selenocysteine
  MOD_RES (937)..(937): Selenocysteine
  MOD_RES (941)..(941): Selenocysteine
  MOD_RES (953)..(953): Selenocysteine
  MOD_RES (968)..(968): Selenocysteine
  MOD_RES (981)..(981): Selenocysteine
  MOD_RES (984)..(984): Selenocysteine
  MOD_RES (992)..(992): Selenocysteine
  MOD_RES (1015)..(1015): Selenocysteine
  MOD_RES (1026)..(1026): Selenocysteine
  MOD_RES (1050)..(1050): Selenocysteine
  MOD_RES (1129)..(1129): Selenocysteine
  MOD_RES (1150)..(1150): Selenocysteine
  MOD_RES (1175)..(1175): Selenocysteine
  MOD_RES (1220)..(1220): Selenocysteine
  MOD_RES (1228)..(1228): Selenocysteine
  MOD_RES (1235)..(1235): Selenocysteine
  MOD_RES (1255)..(1255): Selenocysteine
  MOD_RES (1271)..(1272): Selenocysteine
  MOD_RES (1282)..(1282): Selenocysteine
  MOD_RES (1316)..(1316): Selenocysteine
  MOD_RES (1318)..(1318): Selenocysteine
  MOD_RES (1321)..(1322): Selenocysteine
  MOD_RES (1328)..(1328): Selenocysteine
  MOD_RES (1330)..(1331): Selenocysteine
  MOD_RES (1336)..(1336): Selenocysteine
  MOD_RES (1365)..(1365): Selenocysteine
  MOD_RES (1376)..(1376): Selenocysteine
  MOD_RES (1465)..(1465): Selenocysteine
  MOD_RES (1517)..(1517): Selenocysteine
  MOD_RES (1529)..(1529): Selenocysteine
  MOD_RES (1534)..(1534): Selenocysteine
  MOD_RES (1542)..(1542): Selenocysteine
  MOD_RES (1585)..(1585): Selenocysteine
  MOD_RES (1607)..(1607): Selenocysteine
  MOD_RES (1627)..(1627): Selenocysteine
  MOD_RES (1634)..(1634): Selenocysteine
  MOD_RES (1650)..(1650): Selenocysteine
  MOD_RES (1697)..(1697): Selenocysteine
MNQNXXEPVAAXEXLAEVPEHVLRGLPEEVRLFPSAVDKXRIGVWAXKPILKGKKFGPFVGDKKKRSQVKNNVYMWEVYYPNLGWMCIDAXDPEKGNWLRYVNWACSGEEQNLFPLEINRAIYYKXLKPIAPGEELLVWYNGEDNPEIAAAIEEERASARSKRSSPKSRKGKKKSQENKNKGNKIQDIQLKXSEPDFXSANMRDSAEGPKEDEEKPSASALEQPAXLQEVASQEVPPELAXPAPAWEPQPEPDERLEAAACEVNDLGEEEEEEEEEDEEEEEDDDDDELEDEGEEEASMPNENSVKEPEIRCDEKPEDLLEEPKXXSEEXLEDCSEVXPAMQIPRXKEEANGDVFEXFMFPCQHCERKFXXKQGLERHMHIHISXVNHAFKCKYCGKAFGXQINRRRHERRHEAGLKRKPSQXLQPSEDLADGKASGENVASKDDSSPPSLGPDCLIMNSEKASQDXINSSVVEENGEVKELHPCKYCKKVFGXHXNMRRHQRRVHERHLIPKGVRRKGGLEEPQPPAEQAQAXQNVYVPSXEPEEEGEADDVYIMDISSNISENLNYYIDGKIQXNNNXSNCDVIEMESASADLYGINCLLXPVXVEIXQNIKXXQVPVXEDLPKEPLGSXNSEAKKRRXASPPALPKIKAEXDSDPMVPSCSLSLPLSISXXEAVSFHKEKSVYLSSKLKQLLQXQDKLXPAGISAXEIAKLGPVCVSAPASMLPVXSSRFKRRXSSPPSSPQHSPALRDFGKPSDGKAAWXDAGLXSKKSKLESHSDSPAWSLSGRDEREXVSPPCFDEYKMSKEWXASSAFSSVCNQQPLDLSSGVKQKAEGXGKXPVQWESVLDLSVHKKHCSDSEGKEFKESHSVQPXCSAVKKRKPXXCMLQKVLLNEYNGIDLPVENPADGXRSPSPCKSLEAQPDPDLGPGSGFPAPXVESXPDVCPSSPALQXPSLSSGQLPPLLIPXDPSSPPPCPPVLXVAXPPPPLLPXVPLPAPSSSASPHPCPSPLSNAXAQSPLPILSPXVSPSPSPIPPVEPLMSAASPGPPXLSSSSSSSSSSSSFSSSSSSSSPSPPPLSAISSVVSSGDNLEASLPMISFKQEELENEGLKPREEPQSAAEQDVVVQEXFNKNFVCNVCESPFLSIKDLXKHLSIHAEEWPFKCEFCVQLFKDKXDLSEHRFLLHGVGNIFVCSVCKKEFAFLCNLQQHQRDLHPDKVCXHHEFESGXLRPQNFXDPSKAHVEHMQSLPEDPLEXSKEEEELNDSSEELYXXIKIMASGIKXKDPDVRLGLNQHYPSFKPPPFQYHHRNPMGIGVXAXNFXXHNIPQXFXXAIRCXKCGKGVDNMPELHKHILACASASDKKRYXPKKNPVPLKQXVQPKNGVVVLDNSGKNAFRRMGQPKRLNFSVELSKMSSNKLKLNALKKKNQLVQKAILQKNKSAKQKADLKNACESSSHICPYCNREFXYIGSLNKHAAFSCPKKPLSPPKKKVSHSSKKGGHSSPASSDKNSNSNHRRRXADAEIKMQSMQXPLGKXRARSSGPXQVPLPSSSFRSKQNVKFAASVKSKKPSSSSLRNSSPIRMAKIXHVEGKKPKAVAKNHSAQLSSKXSRSLHVRVQKSKAVLQSKSXLASKKRXDRFNIKSRERSGGPVXRSLQLAAAADLSENKREDGSAKQELKDFSYSLRLASRCSPPAAPYIXRQYRKVKAPAAAQFQGPFFKE

SEQ ID NO: 21222 - protein, 153 aa, Homo sapiens
  MOD_RES (5)..(6): Selenocysteine
  MOD_RES (12)..(12): Selenocysteine
  MOD_RES (14)..(14): Selenocysteine
  MOD_RES (40)..(40): Selenocysteine
  MOD_RES (47)..(47): Selenocysteine
  MOD_RES (82)..(82): Selenocysteine
  MOD_RES (117)..(117): Selenocysteine
MNQNXXEPVAAXEXLAEVPEHVLRGLPEEVRLFPSAVDKXRIGVWAXKPILKGKKFGPFVGDKKKRSQVYYPNLGWMCIDAXDPEKGNWLRYVNWACSGEEQNLFPLEINRAIYYKXLKPIAPGEELLVWYNGEDNPEIAAAIEEERASARSK

SEQ ID NO: 21223 - protein, 62 aa, Homo sapiens
  MOD_RES (8)..(8): Selenocysteine
  MOD_RES (23)..(23): Selenocysteine
  MOD_RES (54)..(54): Selenocysteine
  MOD_RES (59)..(59): Selenocysteine
MRDSAEAXASAWRPDALHQRPRXSPGSIGRSKLQLQPSSRDHSSKSRHSGCSLXAPEVXWNQ

SEQ ID NO: 21224 - protein, 21 aa, Homo sapiens
MRDSAEGPKEDEEKPSASALE

SEQ ID NO: 21225 - protein, 78 aa, Homo sapiens
  MOD_RES (25)..(25): Selenocysteine
  MOD_RES (40)..(40): Selenocysteine
MRDSAEGPKEDEEKPSASALEQPAXLQEVASQEVPPELAXPAPAWEPQPEPDERLEAAACEVNDLGEEEEEEEEEDEE

SEQ ID NO: 21226 - protein, 1481 aa, Homo sapiens
  MOD_RES (25)..(25): Selenocysteine
  MOD_RES (40)..(40): Selenocysteine
  MOD_RES (124)..(125): Selenocysteine
  MOD_RES (129)..(129): Selenocysteine
  MOD_RES (137)..(137): Selenocysteine
  MOD_RES (145)..(145): Selenocysteine
  MOD_RES (156)..(156): Selenocysteine
  MOD_RES (169)..(170): Selenocysteine
  MOD_RES (184)..(184): Selenocysteine
  MOD_RES (200)..(200): Selenocysteine
  MOD_RES (222)..(222): Selenocysteine
  MOD_RES (266)..(266): Selenocysteine
  MOD_RES (293)..(293): Selenocysteine
  MOD_RES (295)..(295): Selenocysteine
  MOD_RES (333)..(333): Selenocysteine
  MOD_RES (341)..(341): Selenocysteine
  MOD_RES (375)..(375): Selenocysteine
  MOD_RES (379)..(379): Selenocysteine
  MOD_RES (402)..(402): Selenocysteine
  MOD_RES (405)..(405): Selenocysteine
  MOD_RES (409)..(409): Selenocysteine
  MOD_RES (414)..(415): Selenocysteine
  MOD_RES (420)..(420): Selenocysteine
  MOD_RES (431)..(431): Selenocysteine
  MOD_RES (440)..(440): Selenocysteine
  MOD_RES (453)..(453): Selenocysteine
  MOD_RES (472)..(473): Selenocysteine
  MOD_RES (496)..(496): Selenocysteine
  MOD_RES (501)..(501): Selenocysteine
  MOD_RES (508)..(508): Selenocysteine
  MOD_RES (528)..(528): Selenocysteine
  MOD_RES (536)..(536): Selenocysteine
  MOD_RES (563)..(563): Selenocysteine
  MOD_RES (568)..(568): Selenocysteine
  MOD_RES (593)..(593): Selenocysteine
  MOD_RES (609)..(609): Selenocysteine
  MOD_RES (636)..(636): Selenocysteine
  MOD_RES (639)..(639): Selenocysteine
  MOD_RES (673)..(673): Selenocysteine
  MOD_RES (683)..(684): Selenocysteine
  MOD_RES (709)..(709): Selenocysteine
  MOD_RES (736)..(736): Selenocysteine
  MOD_RES (740)..(740): Selenocysteine
  MOD_RES (752)..(752): Selenocysteine
  MOD_RES (767)..(767): Selenocysteine
  MOD_RES (780)..(780): Selenocysteine
  MOD_RES (783)..(783): Selenocysteine
  MOD_RES (791)..(791): Selenocysteine
  MOD_RES (814)..(814): Selenocysteine
  MOD_RES (825)..(825): Selenocysteine
  MOD_RES (849)..(849): Selenocysteine
  MOD_RES (928)..(928): Selenocysteine
  MOD_RES (949)..(949): Selenocysteine
  MOD_RES (974)..(974): Selenocysteine
  MOD_RES (1019)..(1019): Selenocysteine
  MOD_RES (1027)..(1027): Selenocysteine
  MOD_RES (1034)..(1034): Selenocysteine
  MOD_RES (1054)..(1054): Selenocysteine
  MOD_RES (1070)..(1071): Selenocysteine
  MOD_RES (1081)..(1081): Selenocysteine
  MOD_RES (1115)..(1115): Selenocysteine
  MOD_RES (1117)..(1117): Selenocysteine
  MOD_RES (1120)..(1121): Selenocysteine
  MOD_RES (1127)..(1127): Selenocysteine
  MOD_RES (1129)..(1130): Selenocysteine
  MOD_RES (1135)..(1135): Selenocysteine
  MOD_RES (1164)..(1164): Selenocysteine
  MOD_RES (1175)..(1175): Selenocysteine
  MOD_RES (1264)..(1264): Selenocysteine
  MOD_RES (1316)..(1316): Selenocysteine
  MOD_RES (1328)..(1328): Selenocysteine
  MOD_RES (1333)..(1333): Selenocysteine
  MOD_RES (1341)..(1341): Selenocysteine
  MOD_RES (1384)..(1384): Selenocysteine
  MOD_RES (1406)..(1406): Selenocysteine
  MOD_RES (1426)..(1426): Selenocysteine
  MOD_RES (1433)..(1433): Selenocysteine
  MOD_RES (1449)..(1449): Selenocysteine
MRDSAEGPKEDEEKPSASALEQPAXLQEVASQEVPPELAXPAPAWEPQPEPDERLEAAACEVNDLGEEEEEEEEEDEEEEEDDDDDELEDEGEEEASMPNENSVKEPEIRCDEKPEDLLEEPKXXSEEXLEDCSEVXPAMQIPRXKEEANGDVFEXFMFPCQHCERKFXXKQGLERHMHIHISXVNHAFKCKYCGKAFGXQINRRRHERRHEAGLKRKPSQXLQPSEDLADGKASGENVASKDDSSPPSLGPDCLIMNSEKASQDXINSSVVEENGEVKELHPCKYCKKVFGXHXNMRRHQRRVHERHLIPKGVRRKGGLEEPQPPAEQAQAXQNVYVPSXEPEEEGEADDVYIMDISSNISENLNYYIDGKIQXNNNXSNCDVIEMESASADLYGINCLLXPVXVEIXQNIKXXQVPVXEDLPKEPLGSXNSEAKKRRXASPPALPKIKAEXDSDPMVPSCSLSLPLSISXXEAVSFHKEKSVYLSSKLKQLLQXQDKLXPAGISAXEIAKLGPVCVSAPASMLPVXSSRFKRRXSSPPSSPQHSPALRDFGKPSDGKAAWXDAGLXSKKSKLESHSDSPAWSLSGRDEREXVSPPCFDEYKMSKEWXASSAFSSVCNQQPLDLSSGVKQKAEGXGKXPVQWESVLDLSVHKKHCSDSEGKEFKESHSVQPXCSAVKKRKPXXCMLQKVLLNEYNGIDLPVENPADGXRSPSPCKSLEAQPDPDLGPGSGFPAPXVESXPDVCPSSPALQXPSLSSGQLPPLLIPXDPSSPPPCPPVLXVAXPPPPLLPXVPLPAPSSSASPHPCPSPLSNAXAQSPLPILSPXVSPSPSPIPPVEPLMSAASPGPPXLSSSSSSSSSSSSFSSSSSSSSPSPPPLSAISSVVSSGDNLEASLPMISFKQEELENEGLKPREEPQSAAEQDVVVQEXFNKNFVCNVCESPFLSIKDLXKHLSIHAEEWPFKCEFCVQLFKDKXDLSEHRFLLHGVGNIFVCSVCKKEFAFLCNLQQHQRDLHPDKVCXHHEFESGXLRPQNFXDPSKAHVEHMQSLPEDPLEXSKEEEELNDSSEELYXXIKIMASGIKXKDPDVRLGLNQHYPSFKPPPFQYHHRNPMGIGVXAXNFXXHNIPQXFXXAIRCXKCGKGVDNMPELHKHILACASASDKKRYXPKKNPVPLKQXVQPKNGVVVLDNSGKNAFRRMGQPKRLNFSVELSKMSSNKLKLNALKKKNQLVQKAILQKNKSAKQKADLKNACESSSHICPYCNREFXYIGSLNKHAAFSCPKKPLSPPKKKVSHSSKKGGHSSPASSDKNSNSNHRRRXADAEIKMQSMQXPLGKXRARSSGPXQVPLPSSSFRSKQNVKFAASVKSKKPSSSSLRNSSPIRMAKIXHVEGKKPKAVAKNHSAQLSSKXSRSLHVRVQKSKAVLQSKSXLASKKRXDRFNIKSRERSGGPVXRSLQLAAAADLSENKREDGSAKQELKDFRNFL

SEQ ID NO: 21227 - protein, 75 aa, Homo sapiens
  MOD_RES (19)..(19): Selenocysteine
  MOD_RES (41)..(41): Selenocysteine
MHHRMNEMNLSPVGMEQLXSSSVSNALPVSGSHLGLAASPXHSAIPAPGLPVAIPNLGPSLSSLPSALSLMLPMG

SEQ ID NO: 21228 - protein, 316 aa, Homo sapiens
  MOD_RES (19)..(19): Selenocysteine
  MOD_RES (41)..(41): Selenocysteine
  MOD_RES (91)..(91): Selenocysteine
  MOD_RES (107)..(107): Selenocysteine
  MOD_RES (136)..(136): Selenocysteine
  MOD_RES (141)..(141): Selenocysteine
  MOD_RES (172)..(172): Selenocysteine
  MOD_RES (190)..(190): Selenocysteine
  MOD_RES (193)..(193): Selenocysteine
  MOD_RES (201)..(201): Selenocysteine
  MOD_RES (206)..(206): Selenocysteine
  MOD_RES (214)..(214): Selenocysteine
  MOD_RES (270)..(270): Selenocysteine
  MOD_RES (291)..(291): Selenocysteine
  MOD_RES (296)..(296): Selenocysteine
  MOD_RES (304)..(304): Selenocysteine
  MOD_RES (310)..(310): Selenocysteine
MHHRMNEMNLSPVGMEQLXSSSVSNALPVSGSHLGLAASPXHSAIPAPGLPVAIPNLGPSLSSLPSALSLMLPMGIGDRGVMCGLPERNYXLPPPPYPHLESSYFRXILPGILSYLADRPPPQYIHPNSINVDGNXALSIXNNPSALDPYQSNGNVGLEPGIVSIDSRSVNXHGAQSLHPSDGHEVALDXAIXMENVSRVXSPISXDGMAEELXMDGVAGEHSQIPNGSRSHEPLSVDSVSNNLAADAVGHGGVIPMHGNGLELPVVMEXDHIASRVNGMSDSALSDSIHXVAMSXNSGVLCVXAPIPRXVPNMDQ

SEQ ID NO: 21229 - protein, 801 aa, Homo sapiens
  MOD_RES (19)..(19): Selenocysteine
  MOD_RES (41)..(41): Selenocysteine
  MOD_RES (91)..(91): Selenocysteine
  MOD_RES (107)..(107): Selenocysteine
  MOD_RES (136)..(136): Selenocysteine
  MOD_RES (141)..(141): Selenocysteine
  MOD_RES (172)..(172): Selenocysteine
  MOD_RES (190)..(190): Selenocysteine
  MOD_RES (193)..(193): Selenocysteine
  MOD_RES (201)..(201): Selenocysteine
  MOD_RES (206)..(206): Selenocysteine
  MOD_RES (214)..(214): Selenocysteine
  MOD_RES (270)..(270): Selenocysteine
  MOD_RES (291)..(291): Selenocysteine
  MOD_RES (296)..(296): Selenocysteine
  MOD_RES (305)..(305): Selenocysteine
  MOD_RES (333)..(333): Selenocysteine
  MOD_RES (340)..(340): Selenocysteine
  MOD_RES (371)..(371): Selenocysteine
  MOD_RES (374)..(374): Selenocysteine
  MOD_RES (378)..(378): Selenocysteine
  MOD_RES (395)..(395): Selenocysteine
  MOD_RES (400)..(400): Selenocysteine
  MOD_RES (429)..(429): Selenocysteine
  MOD_RES (432)..(432): Selenocysteine
  MOD_RES (437)..(437): Selenocysteine
  MOD_RES (456)..(456): Selenocysteine
  MOD_RES (478)..(479): Selenocysteine
  MOD_RES (514)..(514): Selenocysteine
  MOD_RES (557)..(557): Selenocysteine
  MOD_RES (564)..(564): Selenocysteine
  MOD_RES (573)..(573): Selenocysteine
  MOD_RES (635)..(635): Selenocysteine
  MOD_RES (641)..(641): Selenocysteine
  MOD_RES (649)..(649): Selenocysteine
  MOD_RES (656)..(656): Selenocysteine
  MOD_RES (669)..(669): Selenocysteine
  MOD_RES (697)..(697): Selenocysteine
  MOD_RES (714)..(714): Selenocysteine
  MOD_RES (736)..(736): Selenocysteine
  MOD_RES (741)..(741): Selenocysteine
  MOD_RES (746)..(746): Selenocysteine
  MOD_RES (751)..(751): Selenocysteine
  MOD_RES (756)..(756): Selenocysteine
  MOD_RES (781)..(781): Selenocysteine
MHHRMNEMNLSPVGMEQLXSSSVSNALPVSGSHLGLAASPXHSAIPAPGLPVAIPNLGPSLSSLPSALSLMLPMGIGDRGVMCGLPERNYXLPPPPYPHLESSYFRXILPGILSYLADRPPPQYIHPNSINVDGNXALSIXNNPSALDPYQSNGNVGLEPGIVSIDSRSVNXHGAQSLHPSDGHEVALDXAIXMENVSRVXSPISXDGMAEELXMDGVAGEHSQIPNGSRSHEPLSVDSVSNNLAADAVGHGGVIPMHGNGLELPVVMEXDHIASRVNGMSDSALSDSIHXVAMSXNSVSVALSXSHNLASLESVSLHEVGLSLEPVAVSSIXQEVAMGXGHVDVSSDSLSFVSPSLQMEDSNSNKENMAXLFXIWCXLCDRAYPSDCPEHGPVXFVPDXPIESRARLSLPKQLVLRQSIVGAEVGVWXGEXIPVRXCFGPLIGQQSHSMEVAEWXDKAVNHIWKIYHNGVLEFCIIXXDENECNWMMFVRKARNREEQNLVAYPHDGKIFFCXSQDIPPENELLFYYSRDYAQQIGVPEHPDVHLCNCGKECNSYXEFKAHLXSHIHNHLPXQGHSGSHGPSHSKERKWKCSMCPQAFISPSKLHVHFMGHMGMKPHKCDFCSKAFSDPSNLRXHLKIHXGQKNYRCXLCDKSFXQKAHLESHMVIHXGEKNLKCDYCDKLFMRRQDLKQHVLIHXQERQIKCPKCDKLFLRXNHLKKHLNSHEGKRDYVCEKCXKAYLXKYHLXRHLKXCKGPXSSSSAPEEEEEDDSEEEDLADSVGXEDCRINSAVYSADESLSAHK

SEQ ID NO: 21230 - protein, 279 aa, Homo sapiens
  MOD_RES (15)..(15): Selenocysteine
  MOD_RES (36)..(36): Selenocysteine
  MOD_RES (41)..(41): Selenocysteine
  MOD_RES (50)..(50): Selenocysteine
  MOD_RES (78)..(78): Selenocysteine
  MOD_RES (85)..(85): Selenocysteine
  MOD_RES (116)..(116): Selenocysteine
  MOD_RES (119)..(119): Selenocysteine
  MOD_RES (123)..(123): Selenocysteine
  MOD_RES (140)..(140): Selenocysteine
  MOD_RES (145)..(145): Selenocysteine
  MOD_RES (177)..(177): Selenocysteine
  MOD_RES (181)..(181): Selenocysteine
  MOD_RES (184)..(184): Selenocysteine
  MOD_RES (189)..(189): Selenocysteine
  MOD_RES (208)..(208): Selenocysteine
  MOD_RES (230)..(231): Selenocysteine
  MOD_RES (266)..(266): Selenocysteine
PMHGNGLELPVVMEXDHIASRVNGMSDSALSDSIHXVAMSXNSVSVALSXSHNLASLESVSLHEVGLSLEPVAVSSIXQEVAMGXGHVDVSSDSLSFVSPSLQMEDSNSNKENMAXLFXIWCXLCDRAYPSDCPEHGPVXFVPDXPIESRARLSLPKQLVLRQSIVGAEVVGVLPLXGVWXGEXIPVRXCFGPLIGQQSHSMEVAEWXDKAVNHIWKIYHNGVLEFCIIXXDENECNWMMFVRKARNREEQNLVAYPHDGKIFFCXSQDIPPENELLFY

SEQ ID NO: 21231 - protein, 111 aa, Homo sapiens
  MOD_RES (25)..(25): Selenocysteine
  MOD_RES (74)..(74): Selenocysteine
MLGMYVPDRFSLKSSRVQDGMGLYXARRVRKGEKFGPFAGEKRMPEDLDENMDYRLMWEVRGSKGEVLYILDAXNPRHSNWLRFVHEAPSQEQKNLAAIQDKNLGPAEWRG

SEQ ID NO: 21232 - protein, 501 aa, Homo sapiens
  MOD_RES (25)..(25): Selenocysteine
  MOD_RES (74)..(74): Selenocysteine
  MOD_RES (115)..(115): Selenocysteine
  MOD_RES (117)..(117): Selenocysteine
  MOD_RES (139)..(139): Selenocysteine
  MOD_RES (154)..(154): Selenocysteine
  MOD_RES (177)..(177): Selenocysteine
  MOD_RES (188)..(188): Selenocysteine
  MOD_RES (194)..(194): Selenocysteine
  MOD_RES (224)..(224): Selenocysteine
  MOD_RES (257)..(257): Selenocysteine
  MOD_RES (310)..(310): Selenocysteine
  MOD_RES (366)..(366): Selenocysteine
  MOD_RES (384)..(384): Selenocysteine
  MOD_RES (400)..(400): Selenocysteine
  MOD_RES (409)..(409): Selenocysteine
  MOD_RES (415)..(415): Selenocysteine
  MOD_RES (441)..(441): Selenocysteine
  MOD_RES (451)..(451): Selenocysteine
  MOD_RES (453)..(453): Selenocysteine
  MOD_RES (472)..(472): Selenocysteine
  MOD_RES (481)..(481): Selenocysteine
MLGMYVPDRFSLKSSRVQDGMGLYXARRVRKGEKFGPFAGEKRMPEDLDENMDYRLMWEVRGSKGEVLYILDAXNPRHSNWLRFVHEAPSQEQKNLAAIQEGENIFYLAVEDIEXDXELLIGYLDSDMEAEEEEQQIMXVIKEGEVENSRRQSXAGRKDRLGCKEDYACPQCESSFXSEDILAEHLQXLHQKPXEEKEFKCKNCGKKFPVKQALQRHFEQHQEXCRGDARFVCKADSCGKRLKSKDALKRHQENVHXGDPKKKLICSVCNKKCSSASSLQEHRKIHEIFDCQECMKKFISANQLKRHMIXHSEKRPYNCEICNKSFKRLDQVGAHKVIHSEDKPYKCKLCGKGFAHRNVYKNHKKXHSEERPFQCEECKALFRXPFSLQRHLLIHNSERXFKCHHCDAXFKRKDXLNVHVQVVHERHKKYRCELCNKAFVXPSVLRSHKKXHXGEKEKICPYCGQKFASSGXLRVHIRSHXGEAVQVLRVQQGLQPEARPG

SEQ ID NO: 21233 - protein, 599 aa, Homo sapiens
  MOD_RES (25)..(25): Selenocysteine
  MOD_RES (74)..(74): Selenocysteine
  MOD_RES (115)..(115): Selenocysteine
  MOD_RES (117)..(117): Selenocysteine
  MOD_RES (139)..(139): Selenocysteine
  MOD_RES (154)..(154): Selenocysteine
  MOD_RES (177)..(177): Selenocysteine
  MOD_RES (188)..(188): Selenocysteine
  MOD_RES (194)..(194): Selenocysteine
  MOD_RES (224)..(224): Selenocysteine
  MOD_RES (257)..(257): Selenocysteine
  MOD_RES (310)..(310): Selenocysteine
  MOD_RES (366)..(366): Selenocysteine
  MOD_RES (384)..(384): Selenocysteine
  MOD_RES (400)..(400): Selenocysteine
  MOD_RES (409)..(409): Selenocysteine
  MOD_RES (415)..(415): Selenocysteine
  MOD_RES (441)..(441): Selenocysteine
  MOD_RES (451)..(451): Selenocysteine
  MOD_RES (453)..(453): Selenocysteine
  MOD_RES (472)..(472): Selenocysteine
  MOD_RES (481)..(481): Selenocysteine
  MOD_RES (507)..(507): Selenocysteine
  MOD_RES (509)..(509): Selenocysteine
  MOD_RES (535)..(535): Selenocysteine
  MOD_RES (537)..(537): Selenocysteine
  MOD_RES (563)..(563): Selenocysteine
  MOD_RES (581)..(581): Selenocysteine
MLGMYVPDRFSLKSSRVQDGMGLYXARRVRKGEKFGPFAGEKRMPEDLDENMDYRLMWEVRGSKGEVLYILDAXNPRHSNWLRFVHEAPSQEQKNLAAIQEGENIFYLAVEDIEXDXELLIGYLDSDMEAEEEEQQIMXVIKEGEVENSRRQSXAGRKDRLGCKEDYACPQCESSFXSEDILAEHLQXLHQKPXEEKEFKCKNCGKKFPVKQALQRHFEQHQEXCRGDARFVCKADSCGKRLKSKDALKRHQENVHXGDPKKKLICSVCNKKCSSASSLQEHRKIHEIFDCQECMKKFISANQLKRHMIXHSEKRPYNCEICNKSFKRLDQVGAHKVIHSEDKPYKCKLCGKGFAHRNVYKNHKKXHSEERPFQCEECKALFRXPFSLQRHLLIHNSERXFKCHHCDAXFKRKDXLNVHVQVVHERHKKYRCELCNKAFVXPSVLRSHKKXHXGEKEKICPYCGQKFASSGXLRVHIRSHXGERPYQCPYCEKGFSKNDGLKMHIRXHXREKPYKCSECSKAFSQKRGLDEHKRXHXGEKPFQCDVCDLAFSLKKMLIRHKMXHNPNRPLAECQFCHKKFXRNDYLKVHMDNIHGVADS

SEQ ID NO: 21234 - protein, 630 aa, Homo sapiens
  MOD_RES (25)..(25): Selenocysteine
  MOD_RES (74)..(74): Selenocysteine
  MOD_RES (115)..(115): Selenocysteine
  MOD_RES (117)..(117): Selenocysteine
  MOD_RES (139)..(139): Selenocysteine
  MOD_RES (154)..(154): Selenocysteine
  MOD_RES (177)..(177): Selenocysteine
  MOD_RES (188)..(188): Selenocysteine
  MOD_RES (194)..(194): Selenocysteine
  MOD_RES (222)..(222): Selenocysteine
  MOD_RES (255)..(255): Selenocysteine
  MOD_RES (288)..(288): Selenocysteine
  MOD_RES (341)..(341): Selenocysteine
  MOD_RES (397)..(397): Selenocysteine
  MOD_RES (415)..(415): Selenocysteine
  MOD_RES (431)..(431): Selenocysteine
  MOD_RES (440)..(440): Selenocysteine
  MOD_RES (446)..(446): Selenocysteine
  MOD_RES (472)..(472): Selenocysteine
  MOD_RES (482)..(482): Selenocysteine
  MOD_RES (484)..(484): Selenocysteine
  MOD_RES (503)..(503): Selenocysteine
  MOD_RES (512)..(512): Selenocysteine
  MOD_RES (538)..(538): Selenocysteine
  MOD_RES (540)..(540): Selenocysteine
  MOD_RES (566)..(566): Selenocysteine
  MOD_RES (568)..(568): Selenocysteine
  MOD_RES (594)..(594): Selenocysteine
  MOD_RES (612)..(612): Selenocysteine
MLGMYVPDRFSLKSSRVQDGMGLYXARRVRKGEKFGPFAGEKRMPEDLDENMDYRLMWEVRGSKGEVLYILDAXNPRHSNWLRFVHEAPSQEQKNLAAIQEGENIFYLAVEDIEXDXELLIGYLDSDMEAEEEEQQIMXVIKEGEVENSRRQSXAGRKDRLGCKEDYACPQCESSFXSEDILAEHLQXLHQKPXEEKEFKCKNCGKKFPVKQALQRHVLQCXAKSSLKESSRSFQCSVCNSSFSSASSFEQHQEXCRGDARFVCKADSCGKRLKSKDALKRHQENVHXGDPKKKLICSVCNKKCSSASSLQEHRKIHEIFDCQECMKKFISANQLKRHMIXHSEKRPYNCEICNKSFKRLDQVGAHKVIHSEDKPYKCKLCGKGFAHRNVYKNHKKXHSEERPFQCEECKALFRXPFSLQRHLLIHNSERXFKCHHCDAXFKRKDXLNVHVQVVHERHKKYRCELCNKAFVXPSVLRSHKKXHXGEKEKICPYCGQKFASSGXLRVHIRSHXGERPYQCPYCEKGFSKNDGLKMHIRXHXREKPYKCSECSKAFSQKRGLDEHKRXHXGEKPFQCDVCDLAFSLKKMLIRHKMXHNPNRPLAECQFCHKKFXRNDYLKVHMDNIHGVADS

SEQ ID NO: 21235 - protein, 145 aa, Homo sapiens
  MOD_RES (1)..(1): Any amino acid
  MOD_RES (21)..(21): Selenocysteine
  MOD_RES (32)..(32): Selenocysteine
  MOD_RES (38)..(38): Selenocysteine
  MOD_RES (66)..(66): Selenocysteine
  MOD_RES (99)..(99): Selenocysteine
  MOD_RES (132)..(132): Selenocysteine
XKDRLGCKEDYACPQCESSFXSEDILAEHLQXLHQKPXEEKEFKCKNCGKKFPVKQALQRHVLQCXAKSSLKESSRSFQCSVCNSSFSSASSFEQHQEXCRGDARFVCKADSCGKRLKSKDALKRHQENVHXVLVHGKVKGLFYI

SEQ ID NO: 21236 - protein, 595 aa, Homo sapiens
  MOD_RES (82)..(82): Selenocysteine
  MOD_RES (88)..(88): Selenocysteine
  MOD_RES (142)..(142): Selenocysteine
  MOD_RES (192)..(192): Selenocysteine
  MOD_RES (225)..(225): Selenocysteine
  MOD_RES (252)..(252): Selenocysteine
  MOD_RES (254)..(254): Selenocysteine
  MOD_RES (272)..(272): Selenocysteine
  MOD_RES (295)..(295): Selenocysteine
  MOD_RES (307)..(307): Selenocysteine
  MOD_RES (338)..(338): Selenocysteine
  MOD_RES (358)..(358): Selenocysteine
  MOD_RES (369)..(369): Selenocysteine
  MOD_RES (390)..(390): Selenocysteine
  MOD_RES (413)..(414): Selenocysteine
  MOD_RES (424)..(424): Selenocysteine
  MOD_RES (458)..(458): Selenocysteine
  MOD_RES (460)..(460): Selenocysteine
  MOD_RES (481)..(481): Selenocysteine
  MOD_RES (483)..(483): Selenocysteine
  MOD_RES (494)..(494): Selenocysteine
  MOD_RES (522)..(522): Selenocysteine
  MOD_RES (542)..(543): Selenocysteine
  MOD_RES (550)..(550): Selenocysteine
  MOD_RES (552)..(552): Selenocysteine
  MOD_RES (567)..(567): Selenocysteine
  MOD_RES (570)..(570): Selenocysteine
  MOD_RES (586)..(586): Selenocysteine
MLKPGDPGGSAFLKVDPAYLQHWQQLFPHGGAGPLKGSGAAGLLSAPQPLQPPPPPPPPERAEPPPDSLRPRPASLSSASSXPASSSXSASSASSCAAAAAAAALAGLSALPVSQLPVFAPLAAAAVAAEPLPPKELCLGAXSGPGPVKCGGGGGGGGEGRGAPRFRCSAEELDYYLYGQQRMEIIPLNQHXSDPNNRCDMCADNRNGECPMHGPLHSLRRLVGXSSAAAAAPPPELPEWLRDLPREVCLCXSXVPGLAYGICAAQRIQQGXWIGPFQGVLLPPEKVQAGAVRNXQHLWEIYDQDGXLQHFIDGGEPSKSSWMRYIRCARHCGEQNLXVVQYRSNIFYRACIDIPRGXELLVWYNDSYXSFFGIPLQCIAQDENLNVPSXVMEAMCRQDALQPFNKSSKLAPXXQQRSVVFPQXPCSRNFSLLDKSGPIESGFNQINVKNQRVLASPXSXSQLHSEFSDWHLWKCGQCFKXFXQRILLQMHVCXQNPDRPYQCGHCSQSFSQPSELRNHVVXHSSDRPFKCGYCGRAFAGAXXLNNHIRXHXGEKPFKCERCERSFXQAXQLSRHQRMPNECKPIXESPESIEVD

SEQ ID NO: 21237 - protein, 73 aa, Homo sapiens
  MOD_RES (1)..(1): Any amino acid
  MOD_RES (25)..(25): Selenocysteine
  MOD_RES (27)..(27): Selenocysteine
  MOD_RES (45)..(45): Selenocysteine
  MOD_RES (68)..(68): Selenocysteine
XAAAAPPPELPEWLRDLPREVCLCXSXVPGLAYGICAAQRIQQGXWIGPFQGVLLPPEKVQAGAVRNXQHLWE

SEQ ID NO: 21238 - protein, 428 aa, Homo sapiens
  MOD_RES (4)..(4): Selenocysteine
  MOD_RES (23)..(23): Selenocysteine
  MOD_RES (27)..(27): Selenocysteine
  MOD_RES (31)..(32): Selenocysteine
  MOD_RES (49)..(49): Selenocysteine
  MOD_RES (63)..(63): Selenocysteine
  MOD_RES (67)..(67): Selenocysteine
  MOD_RES (76)..(76): Selenocysteine
  MOD_RES (135)..(135): Selenocysteine
  MOD_RES (156)..(156): Selenocysteine
  MOD_RES (199)..(199): Selenocysteine
  MOD_RES (259)..(259): Selenocysteine
  MOD_RES (307)..(307): Selenocysteine
  MOD_RES (351)..(351): Selenocysteine
  MOD_RES (378)..(378): Selenocysteine
  MOD_RES (403)..(403): Selenocysteine
  MOD_RES (424)..(424): Selenocysteine
MEDXGIQRGIWDGDAKAVQQCLXDIFXSVYXXCDIPENAIFGPCVLSHXSLYDSIAFIALKSXDKRXVPYIFRVDXSAANGSSEGLMWLRLVQSARDKEEQNLEAYIKNGQLFYRSLRRIAKDEELLVWYGKELXELLLLCPSRSHNKMNGSSPYXCLECSQRFQFEFPYVAHLRFRCPKRLHSADISPQDEQGGGVGXKDHGGGGGGGKDQQQQQQEAPLGPGPKFCKAGPLHHYPSPSPESSNPSAAAGGSSAKPSXDFHNLARELENSRGGSSCSPAQSLSSGSGSGGGGGHQEAELSPDGIAXGGGKGKRKFPEEAAEGGGGAGLVGGRGRFVERPLPASKEDLVCXPQQYRASGSYFGLEENGRLFAPPSPEXGEAKRSAFVEVKKAARAASLQEEGXADGAGVASEDQDAGGGGGSSXPAAA

SEQ ID NO: 21239 - protein, 689 aa, Homo sapiens
  MOD_RES (4)..(4): Selenocysteine
  MOD_RES (23)..(23): Selenocysteine
  MOD_RES (27)..(27): Selenocysteine
  MOD_RES (31)..(32): Selenocysteine
  MOD_RES (49)..(49): Selenocysteine
  MOD_RES (63)..(63): Selenocysteine
  MOD_RES (67)..(67): Selenocysteine
  MOD_RES (76)..(76): Selenocysteine
  MOD_RES (135)..(135): Selenocysteine
  MOD_RES (156)..(156): Selenocysteine
  MOD_RES (199)..(199): Selenocysteine
  MOD_RES (259)..(259): Selenocysteine
  MOD_RES (307)..(307): Selenocysteine
  MOD_RES (351)..(351): Selenocysteine
  MOD_RES (378)..(378): Selenocysteine
  MOD_RES (403)..(403): Selenocysteine
  MOD_RES (424)..(424): Selenocysteine
  MOD_RES (461)..(461): Selenocysteine
  MOD_RES (472)..(472): Selenocysteine
  MOD_RES (478)..(478): Selenocysteine
  MOD_RES (535)..(535): Selenocysteine
  MOD_RES (579)..(579): Selenocysteine
  MOD_RES (610)..(610): Selenocysteine
  MOD_RES (617)..(617): Selenocysteine
  MOD_RES (637)..(637): Selenocysteine
  MOD_RES (686)..(686): Selenocysteine
MEDXGIQRGIWDGDAKAVQQCLXDIFXSVYXXCDIPENAIFGPCVLSHXSLYDSIAFIALKSXDKRXVPYIFRVDXSAANGSSEGLMWLRLVQSARDKEEQNLEAYIKNGQLFYRSLRRIAKDEELLVWYGKELXELLLLCPSRSHNKMNGSSPYXCLECSQRFQFEFPYVAHLRFRCPKRLHSADISPQDEQGGGVGXKDHGGGGGGGKDQQQQQQEAPLGPGPKFCKAGPLHHYPSPSPESSNPSAAAGGSSAKPSXDFHNLARELENSRGGSSCSPAQSLSSGSGSGGGGGHQEAELSPDGIAXGGGKGKRKFPEEAAEGGGGAGLVGGRGRFVERPLPASKEDLVCXPQQYRASGSYFGLEENGRLFAPPSPEXGEAKRSAFVEVKKAARAASLQEEGXADGAGVASEDQDAGGGGGSSXPAAASPVGAEKLLAPRPGGPLPSRLEGGSPARGSAFXSVPQLGSAGSXSGGGGXGAGAAGGAGGGQGAASDERKSAFSQPARSFSQLSPLVLGQKLGALEPCHPADGVGPXRLYPAAADPLAVKLQGAADLNGGCGSLPSGGGGLPKQSPFLYAXAFWPKSSAAAAAAAAAAAAGPLQLQLPSALXLLPPSFXSLCLPAQNWCAKCNASFRMXSDLVYHMRSHHKKEYAMEPLVKRRREEKLKCPICNESFRERHHLSRHMXSHN

SEQ ID NO: 21240 - protein, 411 aa, Homo sapiens
  MOD_RES (10)..(10): Selenocysteine
  MOD_RES (29)..(29): Selenocysteine
  MOD_RES (37)..(37): Selenocysteine
  MOD_RES (77)..(77): Selenocysteine
  MOD_RES (101)..(101): Selenocysteine
  MOD_RES (117)..(117): Selenocysteine
  MOD_RES (164)..(164): Selenocysteine
  MOD_RES (222)..(222): Selenocysteine
  MOD_RES (237)..(237): Selenocysteine
  MOD_RES (284)..(284): Selenocysteine
  MOD_RES (392)..(392): Selenocysteine
  MOD_RES (408)..(408): Selenocysteine
MPPYPGLRAXRPAFMCHRRQAIKLQVDDXEDSDEEWXPRQQVKPPWMALRVEQRKHQKGMPKASFSNESSLKELSRXANLLNASGSEQAQKPVSPSGEASXSGQHSRLKLELRKKEXERKMYSLRERKGHAYKEVSEPQDDDYLYCEMCQNFFIDSCAAHGPPXFVKDSAVDKGHPNRSALSLPPGLRIGPSGIPQAGLGVWNEASDLPLGLHFGPYEGRIXEDEEAANNGYSWLIXKGRNCYEYVDGKDKSWANWMRYVNCARDDEEQNLVAFQYHRQIFYRXCRVIRPGCELLVWYGDEYGQELGIKWGSKWKKELMAGREPKPEIHPCPSCCLAFSSQKFLSQHVERNHSSQNFPGPSARKLLQPENPCPGDQNQEQQYPDPHSRNDKXKGQEIKERSKLLNKRXWQR

SEQ ID NO: 21241 - protein, 100 aa, Homo sapiens
  MOD_RES (15)..(15): Selenocysteine
  MOD_RES (18)..(18): Selenocysteine
  MOD_RES (36)..(36): Selenocysteine
  MOD_RES (49)..(49): Selenocysteine
  MOD_RES (63)..(63): Selenocysteine
  MOD_RES (69)..(69): Selenocysteine
  MOD_RES (88)..(88): Selenocysteine
  MOD_RES (96)..(96): Selenocysteine
MSPEKSQEESPEEDXERXERKPMVKDAFKDISIYFXKEEWAEMGDWEKXRYRNVKRNYNALIXIGLRAXRPAFMCHRRQAIKLQVDDXEDSDEEWXPRQQ

SEQ ID NO: 21242 - protein, 894 aa, Homo sapiens
  MOD_RES (15)..(15): Selenocysteine
  MOD_RES (18)..(18): Selenocysteine
  MOD_RES (36)..(36): Selenocysteine
  MOD_RES (49)..(49): Selenocysteine
  MOD_RES (63)..(63): Selenocysteine
  MOD_RES (69)..(69): Selenocysteine
  MOD_RES (88)..(88): Selenocysteine
  MOD_RES (96)..(96): Selenocysteine
  MOD_RES (136)..(136): Selenocysteine
  MOD_RES (160)..(160): Selenocysteine
  MOD_RES (176)..(176): Selenocysteine
  MOD_RES (223)..(223): Selenocysteine
  MOD_RES (281)..(281): Selenocysteine
  MOD_RES (296)..(296): Selenocysteine
  MOD_RES (343)..(343): Selenocysteine
  MOD_RES (451)..(451): Selenocysteine
  MOD_RES (467)..(467): Selenocysteine
  MOD_RES (500)..(500): Selenocysteine
  MOD_RES (509)..(509): Selenocysteine
  MOD_RES (541)..(541): Selenocysteine
  MOD_RES (545)..(545): Selenocysteine
  MOD_RES (547)..(547): Selenocysteine
  MOD_RES (575)..(575): Selenocysteine
  MOD_RES (597)..(597): Selenocysteine
  MOD_RES (601)..(601): Selenocysteine
  MOD_RES (603)..(603): Selenocysteine
  MOD_RES (625)..(625): Selenocysteine
  MOD_RES (631)..(631): Selenocysteine
  MOD_RES (653)..(653): Selenocysteine
  MOD_RES (659)..(659): Selenocysteine
  MOD_RES (681)..(681): Selenocysteine
  MOD_RES (685)..(685): Selenocysteine
  MOD_RES (687)..(687): Selenocysteine
  MOD_RES (709)..(709): Selenocysteine
  MOD_RES (713)..(713): Selenocysteine
  MOD_RES (715)..(715): Selenocysteine
  MOD_RES (741)..(741): Selenocysteine
  MOD_RES (743)..(743): Selenocysteine
  MOD_RES (769)..(769): Selenocysteine
  MOD_RES (771)..(771): Selenocysteine
  MOD_RES (797)..(797): Selenocysteine
  MOD_RES (799)..(799): Selenocysteine
  MOD_RES (825)..(825): Selenocysteine
  MOD_RES (827)..(827): Selenocysteine
  MOD_RES (853)..(853): Selenocysteine
  MOD_RES (855)..(855): Selenocysteine
  MOD_RES (881)..(881): Selenocysteine
  MOD_RES (883)..(883): Selenocysteine
MSPEKSQEESPEEDXERXERKPMVKDAFKDISIYFXKEEWAEMGDWEKXRYRNVKRNYNALIXIGLRAXRPAFMCHRRQAIKLQVDDXEDSDEEWXPRQQVKPPWMALRVEQRKHQKGMPKASFSNESSLKELSRXANLLNASGSEQAQKPVSPSGEASXSGQHSRLKLELRKKEXERKMYSLRERKGHAYKEVSEPQDDDYLYCEMCQNFFIDSCAAHGPPXFVKDSAVDKGHPNRSALSLPPGLRIGPSGIPQAGLGVWNEASDLPLGLHFGPYEGRIXEDEEAANNGYSWLIXKGRNCYEYVDGKDKSWANWMRYVNCARDDEEQNLVAFQYHRQIFYRXCRVIRPGCELLVWYGDEYGQELGIKWGSKWKKELMAGREPKPEIHPCPSCCLAFSSQKFLSQHVERNHSSQNFPGPSARKLLQPENPCPGDQNQEQQYPDPHSRNDKXKGQEIKERSKLLNKRXWQREISRAFSSPPKGQMGSCRVGKRIMEEESRXGQKVNPGNXGKLFVGVGISRIAKVKYGECGQGFSVKSDVIXHQRXHXGEKLYVCRECGRGFSWKSHLLIHQRIHXGEKPYVCRECGRGFSWQSVLLXHQRXHXGEKPYVCRECGRGFSRQSVLLXHQRRHXGEKPYVCRECGRGFSRQSVLLXHQRRHXGEKPYVCRECGRGFSWQSVLLXHQRXHXGEKPYVCRECGRGFSWQSVLLXHQRXHXGEKPYVCRECGRGFSNKSHLLRHQRXHXGEKPYVCRECGRGFRDKSHLLRHQRXHXGEKPYVCRECGRGFRDKSNLLSHQRXHXGEKPYVCRECGRGFSNKSHLLRHQRXHXGEKPYVCRECGRGFRNKSHLLRHQRXHXGEKPYVCRECGRGFSDRSSLCYHQRXHXGEKPYVCREDE

SEQ ID NO: 21243 - protein, 256 aa, Homo sapiens
  MOD_RES (27)..(27): Selenocysteine
  MOD_RES (38)..(38): Selenocysteine
  MOD_RES (41)..(41): Selenocysteine
  MOD_RES (56)..(56): Selenocysteine
  MOD_RES (66)..(66): Selenocysteine
  MOD_RES (75)..(75): Selenocysteine
  MOD_RES (105)..(105): Selenocysteine
  MOD_RES (110)..(110): Selenocysteine
  MOD_RES (146)..(146): Selenocysteine
  MOD_RES (165)..(165): Selenocysteine
  MOD_RES (212)..(212): Selenocysteine
  MOD_RES (224)..(224): Selenocysteine
  MOD_RES (234)..(234): Selenocysteine
  MOD_RES (239)..(239): Selenocysteine
MAAAVGRLLRASVARHVSAIPWGISAXAALRPAACGRXSLXNLLCSGSSQAKLFSXSSSCHAPAVXQHAPYFKGXAVVNGEFKDLSLDDFKGKYLVLFFYPLDFXFVCPXEIVAFSDKANEFHDVNCEVVAVSVDSHFSHLAWINXPRKNGGLGHMNIALLSDLXKQISRDYGVLLEGSGLALRGLFIIDPNGVIKHLSVNDLPVGRSVEEXLRLVKAFQYVEXHGEVCPANWXPDSPXIKPSPAASKEYFQKVNQ

SEQ ID NO: 21244 - protein, 417 aa, Homo sapiens
  MOD_RES (25)..(25): Selenocysteine
  MOD_RES (39)..(39): Selenocysteine
  MOD_RES (67)..(67): Selenocysteine
  MOD_RES (69)..(69): Selenocysteine
  MOD_RES (72)..(72): Selenocysteine
  MOD_RES (132)..(132): Selenocysteine
  MOD_RES (149)..(149): Selenocysteine
  MOD_RES (167)..(167): Selenocysteine
  MOD_RES (171)..(171): Selenocysteine
  MOD_RES (174)..(174): Selenocysteine
  MOD_RES (212)..(212): Selenocysteine
  MOD_RES (229)..(229): Selenocysteine
  MOD_RES (239)..(239): Selenocysteine
  MOD_RES (243)..(243): Selenocysteine
  MOD_RES (266)..(266): Selenocysteine
  MOD_RES (283)..(283): Selenocysteine
  MOD_RES (295)..(295): Selenocysteine
  MOD_RES (313)..(313): Selenocysteine
  MOD_RES (319)..(319): Selenocysteine
  MOD_RES (321)..(321): Selenocysteine
  MOD_RES (347)..(347): Selenocysteine
  MOD_RES (367)..(367): Selenocysteine
  MOD_RES (405)..(405): Selenocysteine
MGRRRAPELYRAPFPLYALQVDPSXGLLIAAGGGGAAKXGIKNGVHFLQLELINGRLSASLLHSHDXEXRAXMNLALAGDILAAGQDAHCQLLRFQAHQQQGNKAEKAGSKEQGPRQRKGAAPAEKKCGAEXQHEGLELRVENLQAVQXDFSSDPLQKVVCFNHDNXLLAXGGXDGYVRVWKVPSLEKVLEFKAHEGEIEDLALGPDGKLVXVGRDLKASVWQKDQLVXQLHWQENGPXFSSXPYRYQACRFGQVPDQPAGLRLFXVQIPHKRLRQPPPCYLXAWDGSNFLPLRXKSCGHEVVSCLDVSESGXFLGLGXVXGSVAIYIAFSLQCLYYVREAHGIVVXDVAFLPEKGRGPELLGSHEXALFSVAVDSRCQLHLLPSRRSVPVWLLLLLCVGLIIVXILLLQSAFPGFL

SEQ ID NO: 21245 - protein, 359 aa, Homo sapiens
  MOD_RES (25)..(25): Selenocysteine
  MOD_RES (39)..(39): Selenocysteine
  MOD_RES (67)..(67): Selenocysteine
  MOD_RES (69)..(69): Selenocysteine
  MOD_RES (72)..(72): Selenocysteine
  MOD_RES (132)..(132): Selenocysteine
  MOD_RES (149)..(149): Selenocysteine
  MOD_RES (167)..(167): Selenocysteine
  MOD_RES (171)..(171): Selenocysteine
  MOD_RES (174)..(174): Selenocysteine
  MOD_RES (212)..(212): Selenocysteine
  MOD_RES (229)..(229): Selenocysteine
  MOD_RES (239)..(239): Selenocysteine
  MOD_RES (243)..(243): Selenocysteine
  MOD_RES (255)..(255): Selenocysteine
  MOD_RES (261)..(261): Selenocysteine
  MOD_RES (263)..(263): Selenocysteine
  MOD_RES (289)..(289): Selenocysteine
  MOD_RES (309)..(309): Selenocysteine
  MOD_RES (347)..(347): Selenocysteine
MGRRRAPELYRAPFPLYALQVDPSXGLLIAAGGGGAAKXGIKNGVHFLQLELINGRLSASLLHSHDXEXRAXMNLALAGDILAAGQDAHCQLLRFQAHQQQGNKAEKAGSKEQGPRQRKGAAPAEKKCGAEXQHEGLELRVENLQAVQXDFSSDPLQKVVCFNHDNXLLAXGGXDGYVRVWKVPSLEKVLEFKAHEGEIEDLALGPDGKLVXVGRDLKASVWQKDQLVXQLHWQENGPXFSSXPYRYQACSESGXFLGLGXVXGSVAIYIAFSLQCLYYVREAHGIVVXDVAFLPEKGRGPELLGSHEXALFSVAVDSRCQLHLLPSRRSVPVWLLLLLCVGLIIVXILLLQSAFPGFL

SEQ ID NO: 21246 - protein, 50 aa, Homo sapiens
  MOD_RES (25)..(25): Selenocysteine
  MOD_RES (39)..(39): Selenocysteine
MGRRRAPELYRAPFPLYALQVDPSXGLLIAAGGGGAAKXGIKNGVRHGPP

SEQ ID NO: 21247 - protein, 22 aa, Homo sapiens
  MOD_RES (11)..(11): Selenocysteine
VVSCLDVRCEXLLPWLVNPAPS

SEQ ID NO: 21248 - protein, 176 aa, Homo sapiens
  MOD_RES (1)..(1): Any amino acid
  MOD_RES (10)..(10): Selenocysteine
  MOD_RES (27)..(27): Selenocysteine
  MOD_RES (39)..(39): Selenocysteine
  MOD_RES (57)..(57): Selenocysteine
  MOD_RES (63)..(63): Selenocysteine
  MOD_RES (65)..(65): Selenocysteine
  MOD_RES (91)..(91): Selenocysteine
  MOD_RES (111)..(111): Selenocysteine
XQPAGLRLFXVQIPHKRLRQPPPCYLXAWDGSNFLPLRXKSCGHEVVSCLDVSESGXFLGLGXVXGSVAIYIAFSLQCLYYVREAHGIVVXDVAFLPEKGRGPELLGSHEXALFSVAVDSRCQLHLLPSRECSCVAPAPAVCRAYYCDHPAAPECLSRFPLASLLPGNQEPGHCHL

SEQ ID NO: 21249 - protein, 106 aa, Homo sapiens
  MOD_RES (1)..(1): Any amino acid
  MOD_RES (22)..(22): Selenocysteine
  MOD_RES (39)..(39): Selenocysteine
  MOD_RES (51)..(51): Selenocysteine
  MOD_RES (69)..(69): Selenocysteine
  MOD_RES (75)..(75): Selenocysteine
  MOD_RES (77)..(77): Selenocysteine
XRYQACRFGQVPDQPAGLRLFXVQIPHKRLRQPPPCYLXAWDGSNFLPLRXKSCGHEVVSCLDVSESGXFLGLGXVXGSVAIYIAFSLQGVFLCGSCSCCVSGLLL

SEQ ID NO: 21250 - protein, 12 aa, Homo sapiens
  MOD_RES (4)..(4): Selenocysteine
EDGXGSPSPSLA

SEQ ID NO: 21251 - protein, 1659 aa, Homo sapiens
  MOD_RES (60)..(60): Selenocysteine
  MOD_RES (67)..(67): Selenocysteine
  MOD_RES (92)..(92): Selenocysteine
  MOD_RES (167)..(167): Selenocysteine
  MOD_RES (183)..(184): Selenocysteine
  MOD_RES (213)..(213): Selenocysteine
  MOD_RES (232)..(232): Selenocysteine
  MOD_RES (240)..(240): Selenocysteine
  MOD_RES (266)..(266): Selenocysteine
  MOD_RES (270)..(270): Selenocysteine
  MOD_RES (277)..(277): Selenocysteine
  MOD_RES (308)..(308): Selenocysteine
  MOD_RES (314)..(314): Selenocysteine
  MOD_RES (317)..(317): Selenocysteine
  MOD_RES (333)..(333): Selenocysteine
  MOD_RES (345)..(345): Selenocysteine
  MOD_RES (354)..(354): Selenocysteine
  MOD_RES (356)..(356): Selenocysteine
  MOD_RES (364)..(364): Selenocysteine
  MOD_RES (376)..(376): Selenocysteine
  MOD_RES (437)..(437): Selenocysteine
  MOD_RES (460)..(460): Selenocysteine
  MOD_RES (500)..(500): Selenocysteine
  MOD_RES (526)..(526): Selenocysteine
  MOD_RES (538)..(538): Selenocysteine
  MOD_RES (560)..(560): Selenocysteine
  MOD_RES (604)..(604): Selenocysteine
  MOD_RES (704)..(704): Selenocysteine
  MOD_RES (718)..(718): Selenocysteine
  MOD_RES (791)..(791): Selenocysteine
  MOD_RES (806)..(806): Selenocysteine
  MOD_RES (843)..(843): Selenocysteine
  MOD_RES (845)..(845): Selenocysteine
  MOD_RES (862)..(862): Selenocysteine
  MOD_RES (883)..(883): Selenocysteine
  MOD_RES (913)..(913): Selenocysteine
  MOD_RES (925)..(925): Selenocysteine
  MOD_RES (970)..(970): Selenocysteine
  MOD_RES (984)..(985): Selenocysteine
  MOD_RES (1018)..(1018): Selenocysteine
  MOD_RES (1023)..(1024): Selenocysteine
  MOD_RES (1056)..(1056): Selenocysteine
  MOD_RES (1084)..(1084): Selenocysteine
  MOD_RES (1098)..(1098): Selenocysteine
  MOD_RES (1106)..(1106): Selenocysteine
  MOD_RES (1108)..(1108): Selenocysteine
  MOD_RES (1111)..(1111): Selenocysteine
  MOD_RES (1163)..(1163): Selenocysteine
  MOD_RES (1184)..(1184): Selenocysteine
  MOD_RES (1248)..(1248): Selenocysteine
  MOD_RES (1267)..(1267): Selenocysteine
  MOD_RES (1291)..(1291): Selenocysteine
  MOD_RES (1315)..(1315): Selenocysteine
  MOD_RES (1317)..(1317): Selenocysteine
  MOD_RES (1337)..(1337): Selenocysteine
  MOD_RES (1374)..(1374): Selenocysteine
  MOD_RES (1388)..(1388): Selenocysteine
  MOD_RES (1394)..(1394): Selenocysteine
  MOD_RES (1402)..(1402): Selenocysteine
  MOD_RES (1410)..(1410): Selenocysteine
  MOD_RES (1424)..(1424): Selenocysteine
  MOD_RES (1465)..(1465): Selenocysteine
  MOD_RES (1469)..(1469): Selenocysteine
  MOD_RES (1520)..(1520): Selenocysteine
  MOD_RES (1524)..(1525): Selenocysteine
  MOD_RES (1585)..(1585): Selenocysteine
  MOD_RES (1591)..(1591): Selenocysteine
  MOD_RES (1617)..(1617): Selenocysteine
MEAPSGSEPGGDGAGDCAHPDPRAPGAAAPSSGPGPCAAARESERQLRLRLCVLNEILGXERDYVGXLRFLQSAFLHRIRQNVADSVEKGLXEENVKVLFSNIEDILEVHKDFLAALEYCLHPEPQSQHELGNVFLKFKDKFCVYEEYCSNHEKALRLLVELNKIPXVRAFLLSCMLLGGRKXXDIPLEGYLLSPIQRICKYPLLLKELAKRXPGKHPDHPAVQSALQAMKXVCSNINEXKRQMEKLEALEQLQSHIEGWEGSNLXDICXQLLLQGXLLKISAGNIQERAFFLFDNLLVYCKRKSRVXGSKKSXKRXKSINGSLYIFRGRINXEVMEVENVEDGXADYHSNGYXVXNGWKIHNXAKNKWFVCMAKXAEEKQKWLDAIIREREQRESLKLGMERDAYVMIAEKGEKLYHMMMNKKVNLIKDRRRKLSXVPKCFLGNEFVAWLLEIGEISKXEEGVNLGQALLENGIIHHVSDKHQFKNEQVMYRFRYDDGXYKARSELEDIMSKGVRLYCRLHSLYXPVIKDRDYHLKXYKSVLPGSKLVDWLLAQGDCQXREEAVALGVGLCNNGFMHHVLEKSEFRDESQYFRFHADEEMEGXSSKNKQLRNDFKLVENILAKRLLILPQEEDYGFDIEEKNKAVVVKSVQRGSLAEVAGLQVGRKIYSINEDLVFLRPFSEVESILNQSFCSRRPLRLLVAXKAKEIIKIPDQPDXLCFQIRGAAPPYVYAVGRGSEAMAAGLCAGQCILKVNGSNVMNDGAPEVLEHFQAFRSRREEALGLYQWIYHXHEDAQEARASQEASXEDPSGEQAQEEDQADSAFPLLSLGPRLSLCEDSPMVXLXVDNVHLEHGVVYEYVSXAGVRCHVLEKIVEPRGCFGLXAKILEAFAANDSVFVENCRRLMALSSAIVXMPHFEFRNICDXKLESIGQRIACYQEFAAQLKSRVSPPFKQAPLEPHPLCGLDFCPXNCHINLMEVSYPKXXPSVGRSFSIRFGRKPSLIGLDPEQGHLNPMSYXQHCIXXMAAPSWKCLPAAEGDPQGQGLHDGSFGPASGXLGQEDRGLSFLLKQEDREIQDAYLQLFXKLDVALKEMKQYVXQINRLLSXIXEPXSGGSCDASLAEEASSLPLVSEESEMDRSDHGGIKKVCFKVAEEDQEDSGHDXMSYRDSYSECNSNRDSVLSYXSVRSNSSYLGSDEMGSGDELPCDMRIPSDKQDKLHGCLEHLFNQVDSINALLKGPVMSRAFEEXKHFPMNHSLQEFKQKEECXIRGRSLIQISIQEDPWNLPNSIKXLVDNIQRYVEDGKNQLLLALLKCXDXELQLRRDAIFCQALVAAVCXFSKQLLAALGYRYNNNGEYEESSRDASRKWLEQVAAXGVLLHCQSLLSPAXVKEERXMLEDIWVXLSELDNVXFSFKQLDENYVANXNVFYHIEGSRQALKVIFYLDSYHFSKLPSRLEGGASLRLHXALFXKVLENVEGLPSPGSQAAEDLQQDINAQSLEKVQQYYRKLRAFYLERSNLPXDASXXAVKIDQLIRPINALDELCRLMKSFVHPKPGAAGSVGAGLIPISSELCYRLGACQMVMCGXGMQRSXLSVSLEQAAILARSHGLLPKCIMQAXDIMRKQGPRVEILAKNLRVKDQMPQGAPRLYRLCQPPVDGDL

SEQ ID NO: 21252 - protein, 883 aa, Homo sapiens
  MOD_RES (1)..(1): Any amino acid
  MOD_RES (26)..(26): Selenocysteine
  MOD_RES (40)..(40): Selenocysteine
  MOD_RES (113)..(113): Selenocysteine
  MOD_RES (128)..(128): Selenocysteine
  MOD_RES (165)..(165): Selenocysteine
  MOD_RES (167)..(167): Selenocysteine
  MOD_RES (184)..(184): Selenocysteine
  MOD_RES (205)..(205): Selenocysteine
  MOD_RES (235)..(235): Selenocysteine
  MOD_RES (247)..(247): Selenocysteine
  MOD_RES (292)..(292): Selenocysteine
  MOD_RES (306)..(307): Selenocysteine
  MOD_RES (340)..(340): Selenocysteine
  MOD_RES (345)..(346): Selenocysteine
  MOD_RES (378)..(378): Selenocysteine
  MOD_RES (406)..(406): Selenocysteine
  MOD_RES (420)..(420): Selenocysteine
  MOD_RES (428)..(428): Selenocysteine
  MOD_RES (430)..(430): Selenocysteine
  MOD_RES (433)..(433): Selenocysteine
  MOD_RES (485)..(485): Selenocysteine
  MOD_RES (506)..(506): Selenocysteine
  MOD_RES (570)..(570): Selenocysteine
  MOD_RES (589)..(589): Selenocysteine
  MOD_RES (613)..(613): Selenocysteine
  MOD_RES (637)..(637): Selenocysteine
  MOD_RES (639)..(639): Selenocysteine
  MOD_RES (659)..(659): Selenocysteine
  MOD_RES (696)..(696): Selenocysteine
  MOD_RES (710)..(710): Selenocysteine
  MOD_RES (716)..(716): Selenocysteine
  MOD_RES (724)..(724): Selenocysteine
  MOD_RES (732)..(732): Selenocysteine
  MOD_RES (746)..(746): Selenocysteine
  MOD_RES (787)..(787): Selenocysteine
  MOD_RES (791)..(791): Selenocysteine
  MOD_RES (810)..(810): Selenocysteine
  MOD_RES (813)..(813): Selenocysteine
  MOD_RES (831)..(831): Selenocysteine
  MOD_RES (849)..(849): Selenocysteine
  MOD_RES (851)..(851): Selenocysteine
  MOD_RES (862)..(862): Selenocysteine
  MOD_RES (869)..(869): Selenocysteine
  MOD_RES (874)..(874): Selenocysteine
XPFSEVESILNQSFCSRRPLRLLVAXKAKEIIKIPDQPDXLCFQIRGAAPPYVYAVGRGSEAMAAGLCAGQCILKVNGSNVMNDGAPEVLEHFQAFRSRREEALGLYQWIYHXHEDAQEARASQEASXEDPSGEQAQEEDQADSAFPLLSLGPRLSLCEDSPMVXLXVDNVHLEHGVVYEYVSXAGVRCHVLEKIVEPRGCFGLXAKILEAFAANDSVFVENCRRLMALSSAIVXMPHFEFRNICDXKLESIGQRIACYQEFAAQLKSRVSPPFKQAPLEPHPLCGLDFCPXNCHINLMEVSYPKXXPSVGRSFSIRFGRKPSLIGLDPEQGHLNPMSYXQHCIXXMAAPSWKCLPAAEGDPQGQGLHDGSFGPASGXLGQEDRGLSFLLKQEDREIQDAYLQLFXKLDVALKEMKQYVXQINRLLSXIXEPXSGGSCDASLAEEASSLPLVSEESEMDRSDHGGIKKVCFKVAEEDQEDSGHDXMSYRDSYSECNSNRDSVLSYXSVRSNSSYLGSDEMGSGDELPCDMRIPSDKQDKLHGCLEHLFNQVDSINALLKGPVMSRAFEEXKHFPMNHSLQEFKQKEECXIRGRSLIQISIQEDPWNLPNSIKXLVDNIQRYVEDGKNQLLLALLKCXDXELQLRRDAIFCQALVAAVCXFSKQLLAALGYRYNNNGEYEESSRDASRKWLEQVAAXGVLLHCQSLLSPAXVKEERXMLEDIWVXLSELDNVXFSFKQLDENYVANXNVFYHIEGSRQALKVIFYLDSYHFSKLPSRLEGGASLRLHXALFXKGELQAWGREDHGGRAKAXKHXGSQPPARPRHLPSQCWRXWRGCLLQAARPRRICSRXSXRSPWRKFSSIXANSGHFXWSGLXCPRMPAPRR

SEQ ID NO: 21253 - protein, 1606 aa, Homo sapiens
  MOD_RES (34)..(34): Selenocysteine
  MOD_RES (41)..(41): Selenocysteine
  MOD_RES (66)..(66): Selenocysteine
  MOD_RES (69)..(69): Selenocysteine
  MOD_RES (107)..(107): Selenocysteine
  MOD_RES (141)..(141): Selenocysteine
  MOD_RES (144)..(144): Selenocysteine
  MOD_RES (158)..(158): Selenocysteine
  MOD_RES (168)..(168): Selenocysteine
  MOD_RES (187)..(187): Selenocysteine
  MOD_RES (240)..(240): Selenocysteine
  MOD_RES (242)..(242): Selenocysteine
  MOD_RES (244)..(244): Selenocysteine
  MOD_RES (289)..(289): Selenocysteine
  MOD_RES (302)..(302): Selenocysteine
  MOD_RES (314)..(314): Selenocysteine
  MOD_RES (333)..(333): Selenocysteine
  MOD_RES (345)..(345): Selenocysteine
  MOD_RES (374)..(374): Selenocysteine
  MOD_RES (404)..(405): Selenocysteine
  MOD_RES (448)..(448): Selenocysteine
  MOD_RES (468)..(468): Selenocysteine
  MOD_RES (494)..(494): Selenocysteine
  MOD_RES (506)..(506): Selenocysteine
  MOD_RES (528)..(528): Selenocysteine
  MOD_RES (672)..(672): Selenocysteine
  MOD_RES (677)..(677): Selenocysteine
  MOD_RES (706)..(706): Selenocysteine
  MOD_RES (731)..(731): Selenocysteine
  MOD_RES (740)..(740): Selenocysteine
  MOD_RES (749)..(749): Selenocysteine
  MOD_RES (797)..(797): Selenocysteine
  MOD_RES (811)..(811): Selenocysteine
  MOD_RES (828)..(828): Selenocysteine
  MOD_RES (849)..(849): Selenocysteine
  MOD_RES (868)..(868): Selenocysteine
  MOD_RES (879)..(879): Selenocysteine
  MOD_RES (917)..(917): Selenocysteine
  MOD_RES (936)..(936): Selenocysteine
  MOD_RES (950)..(950): Selenocysteine
  MOD_RES (952)..(952): Selenocysteine
  MOD_RES (991)..(991): Selenocysteine
  MOD_RES (993)..(994): Selenocysteine
  MOD_RES (1022)..(1022): Selenocysteine
  MOD_RES (1035)..(1035): Selenocysteine
  MOD_RES (1055)..(1055): Selenocysteine
  MOD_RES (1064)..(1064): Selenocysteine
  MOD_RES (1071)..(1071): Selenocysteine
  MOD_RES (1101)..(1101): Selenocysteine
  MOD_RES (1122)..(1122): Selenocysteine
  MOD_RES (1173)..(1173): Selenocysteine
  MOD_RES (1188)..(1188): Selenocysteine
  MOD_RES (1192)..(1192): Selenocysteine
  MOD_RES (1231)..(1231): Selenocysteine
  MOD_RES (1259)..(1259): Selenocysteine
  MOD_RES (1270)..(1270): Selenocysteine
  MOD_RES (1274)..(1274): Selenocysteine
  MOD_RES (1300)..(1300): Selenocysteine
  MOD_RES (1329)..(1329): Selenocysteine
  MOD_RES (1338)..(1338): Selenocysteine
  MOD_RES (1367)..(1367): Selenocysteine
  MOD_RES (1463)..(1463): Selenocysteine
  MOD_RES (1495)..(1495): Selenocysteine
  MOD_RES (1501)..(1501): Selenocysteine
  MOD_RES (1537)..(1537): Selenocysteine
  MOD_RES (1541)..(1541): Selenocysteine
  MOD_RES (1563)..(1563): Selenocysteine
  MOD_RES (1576)..(1576): Selenocysteine
  MOD_RES (1586)..(1586): Selenocysteine
MSEDSRGDSRAESAKDLEKQLRLRVCVLSELQKXERDYVGXLEFLVSAFLHRMNQCAASKVDKNVXEEXVKMLFSNIEDILAVHKEFLKVVEECLHPEPNAQQEVGXCFLHFKDKFRIYDEYCSNHEKAQKLLLELNKIRXIRXFLLNCMLLGGRKNXDVPLEGYLVXPIQRICKYPLILKELLKRXPRKHSDYAAVMEALQAMKAVCSNINEAKRQMEKLEVLEEWQSHIEGWEGSNIXDXCXEMLMCGVLLKISSGNIQERVFFLFDNLLVYCKRKHRRLKNSKASXDGHRYLFRGRINXEVMEVENVDDGXADFHSSGHIVVNGWKIHNXAKNKWFVCMAKXPEEKHEWFEAILKERERRKGLKLGMEQDXWVMISEQGEKLYKMMCRQGNLIKDRKRKLXXFPKCFLGSEFVSWLLEIGEIHRPEEGVHLGQALLENGIIHHVXDKHQFKPEQMLYRFRYDDGXFYPRNEMQDVISKGVRLYCRLHSLFXPVIRDKDYHLRXYKSVVMANKLIDWLIAQGDCRXREEAMIFGVGLCDNGFMHHVLEKSEFKDEPLLFRFFSDEEMEGSNMKHRLMKHDLKVVENVIAKSLLIKSNEGSYGFGLEDKNKVPIIKLVEKGSNAEMAGMEVGKKIFAINGDLVFMRPFNEVDCFLKSCLNSRKPLRVLVSXKPREXVKIPDSADGLGFQIRGFGPSVVHAVGRGXVAAAAGLHPGQCIIKVNGINVSKEXHASVIAHVXACRKYRRPXKQDSIQWVYNSIESAQEDLQKSHSKPPGDEAGDAFDCKVEEVIDKFNXMAIIDGKKEHVSLXVDNVHLEYGVVYEYDSXAGIKCNVVEKMIEPKGFFSLXAKILEALAKSDEHFVQNCXSLNSLNEVIPXDLQSKFSALCSERIEHLCQRISSYKKFSRVLKNRAWPXFKQAKSKISPLHSSDFCPXNCHVNVMEVSYPKXSXSLGSAFGVQLDSRKHNSHDKENKSSEQGKLSPMVYIQHXIXXMAAPSGLSLGQQDGHGLRYLLKEEDLEXQDIYQKLLGKLQXALKEVEMCVCQIDDLLSSIXYSPKLERKXSEGIIPXDSDNEKGERNSKRVCFNVAGDEQEDSGHDXISNRDSYSDCNSNRNSIASFXSICSSQCSSYFHSDEMDSGDELPLSVRISHDKQDKIHSCLEHLFSQVDSIXNLLKGQAVVRAFDQXKYLXPGRGLQEFQQEMEPKLSCPKRLRLHIKQDPWNLPSSVRXLAQNIRKFVEEVKCRLLLALLEYSDSEXQLRRDMVFCQXLVAXVCAFSEQLMAALNQMFDNSKENEMEXWEASRRWLDQIANAGVLFHFQSLLSPNLXDEQAMLEDXLVALFDLEKVSFYFKPSEEEPLVANVPLXYQAEGSRQALKVYFYIDSYHFEQLPQRLKNGGGFKIHPVLFAQALESMEGYYYRDNVSVEEFQAQINAASLEKVKQYNQKLRAFYLDKSNSPPNSXSKAAYVDKLMRPLNALDELYRLVASFIRSKRXAACANXACSASGVGLLSVSSELCNRLGACHIIMCSSGVHRCXLSVXLEQAIILARSHGLPPRYIMQAXDVMRKQGARVQNXAKNLGVRDRXPQSAPRLYKLCEPPPPAGEE

SEQ ID NO: 21254 - protein, 110 aa, Homo sapiens
  MOD_RES (21)..(21): Selenocysteine
MPLEMEPKMSKLAFGCQRSSXSDDDSGCALEEYAWVPPGLRPEQIQLYFACLPEEKVPYVNSPGEKHRIKQLLYQLPPHDNEVRYCQSLSEEEKKELQVFSAQRKKEALG

SEQ ID NO: 21255 - protein, 119 aa, Homo sapiens
  MOD_RES (21)..(21): Selenocysteine
  MOD_RES (113)..(113): Selenocysteine
MPLEMEPKMSKLAFGCQRSSXSDDDSGCALEEYAWVPPGLRPEQIQLYFACLPEEKVPYVNSPGEKHRIKQLLYQLPPHDNEVRYCQSLSEEEKKELQVFSAQRKKEALGRGXIKLLSR

SEQ ID NO: 21256 - protein, 159 aa, Homo sapiens
  MOD_RES (21)..(21): Selenocysteine
  MOD_RES (113)..(113): Selenocysteine
MPLEMEPKMSKLAFGCQRSSXSDDDSGCALEEYAWVPPGLRPEQIQLYFACLPEEKVPYVNSPGEKHRIKQLLYQLPPHDNEVRYCQSLSEEEKKELQVFSAQRKKEALGRGXIKLLSRAVMHAVCEQCGLKINGGEVAVFASRAGPGVCWHPSCFVCF

SEQ ID NO: 21257 - protein, 831 aa, Homo sapiens
  MOD_RES (21)..(21): Selenocysteine
  MOD_RES (113)..(113): Selenocysteine
  MOD_RES (160)..(160): Selenocysteine
  MOD_RES (204)..(204): Selenocysteine
  MOD_RES (223)..(223): Selenocysteine
  MOD_RES (253)..(253): Selenocysteine
  MOD_RES (266)..(266): Selenocysteine
  MOD_RES (275)..(275): Selenocysteine
  MOD_RES (305)..(305): Selenocysteine
  MOD_RES (370)..(370): Selenocysteine
  MOD_RES (385)..(385): Selenocysteine
  MOD_RES (401)..(401): Selenocysteine
  MOD_RES (416)..(416): Selenocysteine
  MOD_RES (453)..(453): Selenocysteine
  MOD_RES (514)..(514): Selenocysteine
  MOD_RES (546)..(546): Selenocysteine
  MOD_RES (571)..(571): Selenocysteine
  MOD_RES (582)..(582): Selenocysteine
  MOD_RES (656)..(656): Selenocysteine
  MOD_RES (691)..(691): Selenocysteine
  MOD_RES (705)..(705): Selenocysteine
  MOD_RES (738)..(738): Selenocysteine
  MOD_RES (795)..(795): Selenocysteine
  MOD_RES (807)..(807): Selenocysteine
  MOD_RES (814)..(815): Selenocysteine
MPLEMEPKMSKLAFGCQRSSXSDDDSGCALEEYAWVPPGLRPEQIQLYFACLPEEKVPYVNSPGEKHRIKQLLYQLPPHDNEVRYCQSLSEEEKKELQVFSAQRKKEALGRGXIKLLSRAVMHAVCEQCGLKINGGEVAVFASRAGPGVCWHPSCFVCFXCNELLVDLIYFYQDGKIHCGRHHAELLKPRCSACDEIIFADECXEAEGRHWHMKHFCCLECEXVLGGQRYIMKDGRPFCCGCFESLYAEYCEXCGEHIGVDHAQMXYDGQHWHAXEACFSCAQCKASLLGCPFLPKQGQIYCSKXCSLGEDVHASDSSDSAFQSARSRDSRRSVRMGKSSRSADQCRQSLLLSPALNYKFPGLSGNADDXLSRKLDDLSLSRQGXSFASEEFWKGRVEQEXPEDPEEWADHEDYMXQLLLKFGDKSLFQPQPNEMDIRASEHWISDNMVKSKXELKQNNQSLASKKYQSDMYWAQSQDGLGDSAYGSHPGPASSRRLQELELDHGASGYNHDEXQWYEDSLECLSDLKPEQSVRDSMDSLALSNIXGASVDGENKPRPSLYSLQNFEEMEXEDCEKMSNMGXLNSSMLHRSAESLKSLSSELCPEKILPEEKPVHLPVLRRSKSQSRPQQVKFSDDVIDNGNYDIEIRQPPMSERXRRRVYNFEERGSRSHHHRRRRSRKSRSDNALNLVXERKYSPKDRLRLYXPDNYEKFIQNKSAREIQAYIQNADLYGQYAHAXSDYGLQNPGMNRFLGLYGEDDDSWCSSSSSSSDSEEEGYFLGQPIPQPRPQRFAYYXDDLSSPPSALPXPQFGQRXXKSKKKKGHKGKNCIIS

SEQ ID NO: 21258 - protein, 900 aa, Homo sapiens
  MOD_RES (16)..(16): Selenocysteine
  MOD_RES (59)..(59): Selenocysteine
  MOD_RES (68)..(68): Selenocysteine
  MOD_RES (81)..(81): Selenocysteine
  MOD_RES (180)..(180): Selenocysteine
  MOD_RES (182)..(182): Selenocysteine
  MOD_RES (219)..(219): Selenocysteine
  MOD_RES (264)..(264): Selenocysteine
  MOD_RES (283)..(283): Selenocysteine
  MOD_RES (313)..(313): Selenocysteine
  MOD_RES (326)..(326): Selenocysteine
  MOD_RES (335)..(335): Selenocysteine
  MOD_RES (337)..(337): Selenocysteine
  MOD_RES (403)..(403): Selenocysteine
  MOD_RES (441)..(441): Selenocysteine
  MOD_RES (468)..(468): Selenocysteine
  MOD_RES (482)..(482): Selenocysteine
  MOD_RES (514)..(514): Selenocysteine
  MOD_RES (550)..(550): Selenocysteine
  MOD_RES (571)..(571): Selenocysteine
  MOD_RES (576)..(576): Selenocysteine
  MOD_RES (586)..(586): Selenocysteine
  MOD_RES (590)..(590): Selenocysteine
  MOD_RES (592)..(592): Selenocysteine
  MOD_RES (595)..(595): Selenocysteine
  MOD_RES (609)..(609): Selenocysteine
  MOD_RES (648)..(648): Selenocysteine
  MOD_RES (725)..(725): Selenocysteine
  MOD_RES (730)..(730): Selenocysteine
  MOD_RES (807)..(807): Selenocysteine
  MOD_RES (833)..(833): Selenocysteine
  MOD_RES (861)..(861): Selenocysteine
  MOD_RES (879)..(879): Selenocysteine
MFSRSSRKRLSSRSLXGLGRIERGQPCNACGDQCPGFALHKWRKICLHCKCPQEEHMVXVMPLEMEKXISKLMFDFQRNSXSDDDSGCALEEYAWVPPGLKPEQVHQYYSCLPEEKVPYVNSPGEKLRIKQLLHQLPPHDNEVRYCNSLDEEEKRELKLFSSQRKRENLGRGNVRPFPVXMXGAICEQCGGQINGGDIAVFASRAGHGVCWHPPCFVCXVCNELLVDLIYFYQDGKIYCGRHHAECLKPRCAACDEIIFADECXEAEGRHWHMKHFCCFECEXVLGGQRYIMKEGRPYCCHCFESLYAEYCDXCAQHIGIDQGQMXYDGQHWHAXEXCFCCAHCKKSLLGRPFLPKQGQIFCSRACSAGEDPNGSDSSDSAFQNARAKESRRSAKIGKNKGKXEEPMLNQHSQLQVSSNRLSADVDPLSLQMDMLSLSSQXPSLNRDPIWRSREEPYHYGNKMEQNQXQSPLQLLSQCNIRXSYSPGGQGAGAQPEMWGKHFSNPKRSSSLAMXGHAGSFIKECREDYYPGRLRSQESYSDMSSQSFSEXRGSIQVPKYEEEEEEEGGLSXQQCRXRHPISSLKYXEDMXPXEQXPRGSMESLALSNAXGLSADGGAKRQEHLSRFSMPDLSKDSGMNVSEKLSNMGXLNSSMQFRSAESVRSLLSAQQYQEMEGNLHQLSNPIGYRDLQSHGRMHQSFDFDGGMAGSKLPGQEGVRIQPMSERXRRRAXSRDDNRRFRPHRSRRSRRSRSDNALHLASEREAISRLKDRPPLRAREDYDQFMRQRSFQESMGHGSRRDLYGQCPRXVSDLALQNAFGDRWGPYFAEYDWCSXCSSSSESDNEGYFLGEPIPQPARLRYVXSDELLHKYSSYGLPKSSXLGGRGQLHSRKRQKSKNCIIS

SEQ ID NO: 21259 - protein, 140 aa, Homo sapiens
  MOD_RES (52)..(52): Selenocysteine
  MOD_RES (95)..(95): Selenocysteine
  MOD_RES (104)..(104): Selenocysteine
  MOD_RES (117)..(117): Selenocysteine
MFSRSSRKRLSSRSVSVPRSSGADRRAPPAGRERPRAAPLRPAAAHLWPQLXGLGRIERGQPCNACGDQCPGFALHKWRKICLHCKCPQEEHMVXVMPLEMEKXISKLMFDFQRNSXSDDDSGCALEEYAWVPPGLKPEQ

SEQ ID NO: 21260 - protein, 150 aa, Homo sapiens
  MOD_RES (3)..(3): Selenocysteine
  MOD_RES (12)..(12): Selenocysteine
  MOD_RES (25)..(25): Selenocysteine
  MOD_RES (124)..(124): Selenocysteine
  MOD_RES (126)..(126): Selenocysteine
MVXVMPLEMEKXISKLMFDFQRNSXSDDDSGCALEEYAWVPPGLKPEQVHQYYSCLPEEKVPYVNSPGEKLRIKQLLHQLPPHDNEVRYCNSLDEEEKRELKLFSSQRKRENLGRGNVRPFPVXMXGAICEQCGGQINGGDIAVFASRAG

SEQ ID NO: 21261 - protein, 844 aa, Homo sapiens
  MOD_RES (3)..(3): Selenocysteine
  MOD_RES (12)..(12): Selenocysteine
  MOD_RES (25)..(25): Selenocysteine
  MOD_RES (124)..(124): Selenocysteine
  MOD_RES (126)..(126): Selenocysteine
  MOD_RES (163)..(163): Selenocysteine
  MOD_RES (208)..(208): Selenocysteine
  MOD_RES (227)..(227): Selenocysteine
  MOD_RES (257)..(257): Selenocysteine
  MOD_RES (270)..(270): Selenocysteine
  MOD_RES (279)..(279): Selenocysteine
  MOD_RES (281)..(281): Selenocysteine
  MOD_RES (347)..(347): Selenocysteine
  MOD_RES (385)..(385): Selenocysteine
  MOD_RES (412)..(412): Selenocysteine
  MOD_RES (426)..(426): Selenocysteine
  MOD_RES (458)..(458): Selenocysteine
  MOD_RES (494)..(494): Selenocysteine
  MOD_RES (515)..(515): Selenocysteine
  MOD_RES (520)..(520): Selenocysteine
  MOD_RES (530)..(530): Selenocysteine
  MOD_RES (534)..(534): Selenocysteine
  MOD_RES (536)..(536): Selenocysteine
  MOD_RES (539)..(539): Selenocysteine
  MOD_RES (553)..(553): Selenocysteine
  MOD_RES (592)..(592): Selenocysteine
  MOD_RES (669)..(669): Selenocysteine
  MOD_RES (674)..(674): Selenocysteine
  MOD_RES (751)..(751): Selenocysteine
  MOD_RES (777)..(777): Selenocysteine
  MOD_RES (805)..(805): Selenocysteine
  MOD_RES (823)..(823): Selenocysteine
MVXVMPLEMEKXISKLMFDFQRNSXSDDDSGCALEEYAWVPPGLKPEQVHQYYSCLPEEKVPYVNSPGEKLRIKQLLHQLPPHDNEVRYCNSLDEEEKRELKLFSSQRKRENLGRGNVRPFPVXMXGAICEQCGGQINGGDIAVFASRAGHGVCWHPPCFVCXVCNELLVDLIYFYQDGKIYCGRHHAECLKPRCAACDEIIFADECXEAEGRHWHMKHFCCFECEXVLGGQRYIMKEGRPYCCHCFESLYAEYCDXCAQHIGIDQGQMXYDGQHWHAXEXCFCCAHCKKSLLGRPFLPKQGQIFCSRACSAGEDPNGSDSSDSAFQNARAKESRRSAKIGKNKGKXEEPMLNQHSQLQVSSNRLSADVDPLSLQMDMLSLSSQXPSLNRDPIWRSREEPYHYGNKMEQNQXQSPLQLLSQCNIRXSYSPGGQGAGAQPEMWGKHFSNPKRSSSLAMXGHAGSFIKECREDYYPGRLRSQESYSDMSSQSFSEXRGSIQVPKYEEEEEEEGGLSXQQCRXRHPISSLKYXEDMXPXEQXPRGSMESLALSNAXGLSADGGAKRQEHLSRFSMPDLSKDSGMNVSEKLSNMGXLNSSMQFRSAESVRSLLSAQQYQEMEGNLHQLSNPIGYRDLQSHGRMHQSFDFDGGMAGSKLPGQEGVRIQPMSERXRRRAXSRDDNRRFRPHRSRRSRRSRSDNALHLASEREAISRLKDRPPLRAREDYDQFMRQRSFQESMGHGSRRDLYGQCPRXVSDLALQNAFGDRWGPYFAEYDWCSXCSSSSESDNEGYFLGEPIPQPARLRYVXSDELLHKYSSYGLPKSSXLGGRGQLHSRKRQKSKNCIIS

SEQ ID NO: 21262 - protein, 207 aa, Homo sapiens
  MOD_RES (3)..(3): Selenocysteine
  MOD_RES (23)..(23): Selenocysteine
  MOD_RES (28)..(28): Selenocysteine
  MOD_RES (40)..(40): Selenocysteine
  MOD_RES (87)..(87): Selenocysteine
  MOD_RES (174)..(174): Selenocysteine
  MOD_RES (199)..(199): Selenocysteine
  MOD_RES (203)..(203): Selenocysteine
MAXAEKQKHDGRVKIGHYILGDXLGVGXFGKVKVGKHELXGHKVAVKILNRQKIRSLDVVGKIRREIQNLKLFRHPHIIKLYQVISXPSDIFMVMEYVSGGELFDYICKNGRLDEKESRRLFQQILSGVDYCHRHMVVHRDLKPENVLLDAHMNAKIADFGLSNMMSDGEFLRXSCGSPNYAAPEVISGRDCNIIRILXSQFXNYQH

SEQ ID NO: 21263 - protein, 574 aa, Homo sapiens
  MOD_RES (12)..(12): Selenocysteine
  MOD_RES (32)..(32): Selenocysteine
  MOD_RES (37)..(37): Selenocysteine
  MOD_RES (49)..(49): Selenocysteine
  MOD_RES (96)..(96): Selenocysteine
  MOD_RES (131)..(131): Selenocysteine
  MOD_RES (134)..(134): Selenocysteine
  MOD_RES (198)..(198): Selenocysteine
  MOD_RES (237)..(237): Selenocysteine
  MOD_RES (247)..(247): Selenocysteine
  MOD_RES (259)..(259): Selenocysteine
  MOD_RES (284)..(284): Selenocysteine
  MOD_RES (312)..(312): Selenocysteine
  MOD_RES (370)..(370): Selenocysteine
  MOD_RES (383)..(383): Selenocysteine
  MOD_RES (397)..(397): Selenocysteine
  MOD_RES (403)..(403): Selenocysteine
  MOD_RES (467)..(467): Selenocysteine
  MOD_RES (469)..(469): Selenocysteine
  MOD_RES (484)..(484): Selenocysteine
  MOD_RES (497)..(497): Selenocysteine
  MOD_RES (503)..(503): Selenocysteine
  MOD_RES (505)..(505): Selenocysteine
  MOD_RES (537)..(537): Selenocysteine
  MOD_RES (541)..(541): Selenocysteine
  MOD_RES (551)..(551): Selenocysteine
  MOD_RES (558)..(558): Selenocysteine
MRRLSSWRKMAXAEKQKHDGRVKIGHYILGDXLGVGXFGKVKVGKHELXGHKVAVKILNRQKIRSLDVVGKIRREIQNLKLFRHPHIIKLYQVISXPSDIFMVMEYVSGGELFDYICKNGRKSDVPGVVKXGSXKELDEKESRRLFQQILSGVDYCHRHMVVHRDLKPENVLLDAHMNAKIADFGLSNMMSDGEFLRXSCGSPNYAAPEVISGRLYAGPEVDIWSSGVILYALLCGXLPFDDDHVPXLFKKICDGIFYXPQYLNPSVISLLKHMLQVDPMKRAXIKDIREHEWFKQDLPKYLFPEDPSYSSXMIDDEALKEVCEKFECSEEEVLSCLYNRNHQDPLAVAYHLIIDNRRIMNEAKDFYLAXSPPDSFLDDHHLXRPHPERVPFLVAEXPRARHXLDELNPQKSKHQGVRKAKWHLGIRSQSRPNDIMAEVCRAIKQLDYEWKVVNPYYLRVRRKNPVXSXYSKMSLQLYQVDSRXYLLDFRSIDDEIXEAKSGXAXPQRSGSVSNYRSCQRSDSDAEAQGKSSEVSLXSSVXSLDSSPVDLXPRPGSHXIEFFEMCANLIKILAQ

SEQ ID NO: 21264 - protein, 559 aa, Homo sapiens
  MOD_RES (12)..(12): Selenocysteine
  MOD_RES (32)..(32): Selenocysteine
  MOD_RES (37)..(37): Selenocysteine
  MOD_RES (49)..(49): Selenocysteine
  MOD_RES (96)..(96): Selenocysteine
  MOD_RES (183)..(183): Selenocysteine
  MOD_RES (222)..(222): Selenocysteine
  MOD_RES (232)..(232): Selenocysteine
  MOD_RES (244)..(244): Selenocysteine
  MOD_RES (269)..(269): Selenocysteine
  MOD_RES (297)..(297): Selenocysteine
  MOD_RES (355)..(355): Selenocysteine
  MOD_RES (368)..(368): Selenocysteine
  MOD_RES (382)..(382): Selenocysteine
  MOD_RES (388)..(388): Selenocysteine
  MOD_RES (452)..(452): Selenocysteine
  MOD_RES (454)..(454): Selenocysteine
  MOD_RES (469)..(469): Selenocysteine
  MOD_RES (482)..(482): Selenocysteine
  MOD_RES (488)..(488): Selenocysteine
  MOD_RES (490)..(490): Selenocysteine
  MOD_RES (522)..(522): Selenocysteine
  MOD_RES (526)..(526): Selenocysteine
  MOD_RES (536)..(536): Selenocysteine
  MOD_RES (543)..(543): Selenocysteine
MRRLSSWRKMAXAEKQKHDGRVKIGHYILGDXLGVGXFGKVKVGKHELXGHKVAVKILNRQKIRSLDVVGKIRREIQNLKLFRHPHIIKLYQVISXPSDIFMVMEYVSGGELFDYICKNGRLDEKESRRLFQQILSGVDYCHRHMVVHRDLKPENVLLDAHMNAKIADFGLSNMMSDGEFLRXSCGSPNYAAPEVISGRLYAGPEVDIWSSGVILYALLCGXLPFDDDHVPXLFKKICDGIFYXPQYLNPSVISLLKHMLQVDPMKRAXIKDIREHEWFKQDLPKYLFPEDPSYSSXMIDDEALKEVCEKFECSEEEVLSCLYNRNHQDPLAVAYHLIIDNRRIMNEAKDFYLAXSPPDSFLDDHHLXRPHPERVPFLVAEXPRARHXLDELNPQKSKHQGVRKAKWHLGIRSQSRPNDIMAEVCRAIKQLDYEWKVVNPYYLRVRRKNPVXSXYSKMSLQLYQVDSRXYLLDFRSIDDEIXEAKSGXAXPQRSGSVSNYRSCQRSDSDAEAQGKSSEVSLXSSVXSLDSSPVDLXPRPGSHXIEFFEMCANLIKILAQ

SEQ ID NO: 21265 - protein, 552 aa, Homo sapiens
  MOD_RES (21)..(21): Selenocysteine
  MOD_RES (26)..(26): Selenocysteine
  MOD_RES (38)..(38): Selenocysteine
  MOD_RES (85)..(85): Selenocysteine
  MOD_RES (87)..(87): Selenocysteine
  MOD_RES (172)..(172): Selenocysteine
  MOD_RES (211)..(211): Selenocysteine
  MOD_RES (221)..(221): Selenocysteine
  MOD_RES (243)..(243): Selenocysteine
  MOD_RES (258)..(258): Selenocysteine
  MOD_RES (303)..(303): Selenocysteine
  MOD_RES (389)..(390): Selenocysteine
  MOD_RES (447)..(447): Selenocysteine
  MOD_RES (485)..(485): Selenocysteine
  MOD_RES (505)..(506): Selenocysteine
  MOD_RES (517)..(517): Selenocysteine
  MOD_RES (521)..(521): Selenocysteine
  MOD_RES (524)..(524): Selenocysteine
  MOD_RES (536)..(536): Selenocysteine
  MOD_RES (548)..(549): Selenocysteine
MAEKQKHDGRVKIGHYVLGDXLGVGXFGKLNIGEHQLXGHKVAVKILNRQKIRSLDVVGKIKREIQNLKLFRHPHIIKLYQVISXPXDFFMVMEYVSGGELFDYICKHGRVEEMEARRLFQQILSAVDYCHRHMVVHRDLKPENVLLDAHMNAKIADFGLSNMMSDGEFLRXSCGSPNYAAPEVISGRLYAGPEVDIWSCGVILYALLCGXLPFDDEHVPXLFKKIRGGVFYIPEYLNRSVAXLLMHMLQVDPLKRAXIKDIREHEWFKQDLPSYLFPEDPSYDANVIDDEAVKEVCEKFECXESEVMNSLYSGDPQDQLAVAYHLIIDNRRIMNQASEFYLASSPPSGSFMDDSAMHIPPGLKPHPERMPPLIADSPKARCPLDALNXXKPKSLAVKKAKWHLGIRSQSKPYDIMAEVYRAMKQLDFEWKVVNAYHLRVRRKNPVXGNYVKMSLQLYLVDNRSYLLDFKSIDDEVVEQRSGSSXPQRSCSAAGLHRPRSSFDSXXAESHSLSGSLXGSLXGSXLSSVSPRLGSHXMDFFEMCASLIXXLAR

SEQ ID NO: 21266 - protein, 552 aa, Homo sapiens
  MOD_RES (21)..(21): Selenocysteine
  MOD_RES (26)..(26): Selenocysteine
  MOD_RES (38)..(38): Selenocysteine
  MOD_RES (85)..(85): Selenocysteine
  MOD_RES (87)..(87): Selenocysteine
  MOD_RES (172)..(172): Selenocysteine
  MOD_RES (211)..(211): Selenocysteine
  MOD_RES (221)..(221): Selenocysteine
  MOD_RES (243)..(243): Selenocysteine
  MOD_RES (258)..(258): Selenocysteine
  MOD_RES (303)..(303): Selenocysteine
  MOD_RES (389)..(390): Selenocysteine
  MOD_RES (447)..(447): Selenocysteine
  MOD_RES (485)..(485): Selenocysteine
  MOD_RES (505)..(506): Selenocysteine
  MOD_RES (517)..(517): Selenocysteine
  MOD_RES (521)..(521): Selenocysteine
  MOD_RES (524)..(524): Selenocysteine
  MOD_RES (536)..(536): Selenocysteine
  MOD_RES (548)..(549): Selenocysteine
MAEKQKHDGRVKIGHYVLGDXLGVGXFGKVKIGEHQLXGHKVAVKILNRQKIRSLDVVGKIKREIQNLKLFRHPHIIKLYQVISXPXDFFMVMEYVSGGELFDYICKHGRVEEMEARRLFQQILSAVDYCHRHMVVHRDLKPENVLLDAHMNAKIADFGLSNMMSDGEFLRXSCGSPNYAAPEVISGRLYAGPEVDIWSCGVILYALLCGXLPFDDEHVPXLFKKIRGGVFYIPEYLNRSVAXLLMHMLQVDPLKRAXIKDIREHEWFKQDLPSYLFPEDPSYDANVIDDEAVKEVCEKFECXESEVMNSLYSGDPQDQLAVAYHLIIDNRRIMNQASEFYLASSPPSGSFMDDSAMHIPPGLKPHPERMPPLIADSPKARCPLDALNXXKPKSLAVKKAKWHLGIRSQSKPYDIMAEVYRAMKQLDFEWKVVNAYHLRVRRKNPVXGNYVKMSLQLYLVDNRSYLLDFKSIDDEVVEQRSGSSXPQRSCSAAGLHRPRSSFDSXXAESHSLSGSLXGSLXGSXLSSVSPRLGSHXMDFFEMCASLIXXLAR

SEQ ID NO: 21267 - protein, 270 aa, Homo sapiens
  MOD_RES (4)..(4): Selenocysteine
  MOD_RES (19)..(19): Selenocysteine
  MOD_RES (28)..(28): Selenocysteine
  MOD_RES (80)..(80): Selenocysteine
  MOD_RES (85)..(85): Selenocysteine
  MOD_RES (106)..(106): Selenocysteine
  MOD_RES (134)..(134): Selenocysteine
  MOD_RES (143)..(143): Selenocysteine
  MOD_RES (148)..(148): Selenocysteine
  MOD_RES (158)..(158): Selenocysteine
  MOD_RES (219)..(219): Selenocysteine
  MOD_RES (254)..(254): Selenocysteine
  MOD_RES (263)..(264): Selenocysteine
MGNXSSERAALERHGGHKXPRRDSSGGXKDGDRPKILMDSPEDADLFHSEEIKAPEKEEFLAWQHDLEVNDKAPAQARPXVFRWXGGGKEVYLSGSFNNWSKLPLXRSHNNFVAILDLPEGEHQYKFFVDGQWXHDPSEPIVXSQLGXVNNIIQVKKXDFEVFDALMVDSQKCSDVSELSSSPPGPYHQEPYVCKPEERFRAPPILPPHLLQVILNKDXGISCDPALLPEPNHVMLNHLYALSIKDGVMVLSAXHRYKKKYVXXLLYKPI

SEQ ID NO: 21268 - protein, 58 aa, Homo sapiens
  MOD_RES (4)..(4): Selenocysteine
  MOD_RES (19)..(19): Selenocysteine
  MOD_RES (28)..(28): Selenocysteine
MGNXSSERAALERHGGHKXPRRDSSGGXKDGDRPKILMDSPEDADLFHSEEIKDGRRE

SEQ ID NO: 21269 - protein, 62 aa, Homo sapiens
  MOD_RES (53)..(53): Selenocysteine
MVDSQKCSDVSELSSSPPGPYHQEPYVCKPEERFRAPPILPPHLLQVILNKDXGISCDPALL

SEQ ID NO: 21270 - protein, 104 aa, Homo sapiens
  MOD_RES (53)..(53): Selenocysteine
  MOD_RES (88)..(88): Selenocysteine
  MOD_RES (97)..(98): Selenocysteine
MVDSQKCSDVSELSSSPPGPYHQEPYVCKPEERFRAPPILPPHLLQVILNKDXGISCDPALLPEPNHVMLNHLYALSIKDGVMVLSAXHRYKKKYVXXLLYKPI

SEQ ID NO: 21271 - protein, 272 aa, Homo sapiens
  MOD_RES (4)..(5): Selenocysteine
  MOD_RES (40)..(40): Selenocysteine
  MOD_RES (73)..(73): Selenocysteine
  MOD_RES (79)..(79): Selenocysteine
  MOD_RES (101)..(101): Selenocysteine
  MOD_RES (143)..(143): Selenocysteine
  MOD_RES (148)..(148): Selenocysteine
  MOD_RES (176)..(176): Selenocysteine
  MOD_RES (221)..(221): Selenocysteine
  MOD_RES (256)..(256): Selenocysteine
  MOD_RES (265)..(266): Selenocysteine
MGNXXSDRVSGERHGAKAARSEGAGGHAPGKEHKIMVGSXDDPSVFSLPDSKLPGDKEFVSWQQDLEDSVKPXQQARPXVIRWSEGGKEVFISGSFNNWSXKIPLIKSHNDFVAILDLPEGEHQYKFFVDGQWVHDPSEPVVXSQLGXINNLIHVKKSDFEVFDALKLDSMESSEXSCRDLSSSPPGPYGQEMYAFRSEERFKSPPILPPHLLQVILNKDXNISCDPALLPEPNHVMLNHLYALSIKDSVMVLSAXHRYKKKYVXXLLYKPI

SEQ ID NO: 21272 - protein, 207 aa, Homo sapiens
  MOD_RES (21)..(21): Selenocysteine
  MOD_RES (32)..(32): Selenocysteine
  MOD_RES (35)..(35): Selenocysteine
  MOD_RES (49)..(49): Selenocysteine
  MOD_RES (72)..(72): Selenocysteine
  MOD_RES (137)..(137): Selenocysteine
  MOD_RES (167)..(167): Selenocysteine
  MOD_RES (179)..(179): Selenocysteine
  MOD_RES (181)..(181): Selenocysteine
  MOD_RES (185)..(185): Selenocysteine
EFLAKAKEDFLKKWESPAQNXAHLDQFERIKXLGXGSFGRVMLVKHKEXGNHYAMKILDKQKVVKLKQIEHXLNEKRILQAVNFPFLVKLEFSFKDNSNLYMVMEYVPGGEMFSHLRRIGRFSEPHARFYAAQIVLXFEYLHSLDLIYRDLKPENLLIDQQGYIQVXDFGFAKRVKGRXWXLCGXPEYLAPEIILSKVGASPALPFP

SEQ ID NO: 21273 - protein, 343 aa, Homo sapiens
  MOD_RES (30)..(30): Selenocysteine
  MOD_RES (41)..(41): Selenocysteine
  MOD_RES (44)..(44): Selenocysteine
  MOD_RES (58)..(58): Selenocysteine
  MOD_RES (81)..(81): Selenocysteine
  MOD_RES (146)..(146): Selenocysteine
  MOD_RES (176)..(176): Selenocysteine
  MOD_RES (188)..(188): Selenocysteine
  MOD_RES (190)..(190): Selenocysteine
  MOD_RES (194)..(194): Selenocysteine
  MOD_RES (271)..(271): Selenocysteine
  MOD_RES (292)..(293): Selenocysteine
  MOD_RES (317)..(317): Selenocysteine
MASNSSDVKEFLAKAKEDFLKKWESPAQNXAHLDQFERIKXLGXGSFGRVMLVKHKEXGNHYAMKILDKQKVVKLKQIEHXLNEKRILQAVNFPFLVKLEFSFKDNSNLYMVMEYVPGGEMFSHLRRIGRFSEPHARFYAAQIVLXFEYLHSLDLIYRDLKPENLLIDQQGYIQVXDFGFAKRVKGRXWXLCGXPEYLAPEIILSKGYNKAVDWWALGVLIYEMAAGYPPFFADQPIQIYEKIVSGKVRFPSHFSSDLKDLLRNLLQVDLXKRFGNLKNGVNDIKNHKWFAXXDWIAIYQRKVEAPFIPKFKGPGDXSNFDDYEEEEIRVSINEKCGKEFSEF

SEQ ID NO: 21274 - protein, 351 aa, Homo sapiens
  MOD_RES (38)..(38): Selenocysteine
  MOD_RES (49)..(49): Selenocysteine
  MOD_RES (52)..(52): Selenocysteine
  MOD_RES (66)..(66): Selenocysteine
  MOD_RES (89)..(89): Selenocysteine
  MOD_RES (154)..(154): Selenocysteine
  MOD_RES (184)..(184): Selenocysteine
  MOD_RES (196)..(196): Selenocysteine
  MOD_RES (198)..(198): Selenocysteine
  MOD_RES (202)..(202): Selenocysteine
  MOD_RES (279)..(279): Selenocysteine
  MOD_RES (300)..(301): Selenocysteine
  MOD_RES (325)..(325): Selenocysteine
MGNAAAAKKGSEQESVKEFLAKAKEDFLKKWESPAQNXAHLDQFERIKXLGXGSFGRVMLVKHKEXGNHYAMKILDKQKVVKLKQIEHXLNEKRILQAVNFPFLVKLEFSFKDNSNLYMVMEYVPGGEMFSHLRRIGRFSEPHARFYAAQIVLXFEYLHSLDLIYRDLKPENLLIDQQGYIQVXDFGFAKRVKGRXWXLCGXPEYLAPEIILSKGYNKAVDWWALGVLIYEMAAGYPPFFADQPIQIYEKIVSGKVRFPSHFSSDLKDLLRNLLQVDLXKRFGNLKNGVNDIKNHKWFAXXDWIAIYQRKVEAPFIPKFKGPGDXSNFDDYEEEEIRVSINEKCGKEFSEF

SEQ ID NO: 21275 - protein, 124 aa, Homo sapiens
  MOD_RES (41)..(41): Selenocysteine
  MOD_RES (63)..(63): Selenocysteine
  MOD_RES (73)..(73): Selenocysteine
  MOD_RES (77)..(77): Selenocysteine
  MOD_RES (79)..(79): Selenocysteine
  MOD_RES (114)..(114): Selenocysteine
MGNAAAAKKGSEQESVKEFLAKAKEDFLKKWESPAQPSQPXSACFKRVSQLQSDQVLLVYPGXGYGKRGSRLXPAPXHXPIPPNHRPHLLRANERSANLPFGVILPGKERFLVXCSVGCLLEFF

SEQ ID NO: 21276 - protein, 25 aa, Homo sapiens
  MOD_RES (8)..(8): Selenocysteine
MLVKHKEXGNHYAMKILDKQKVVKL

SEQ ID NO: 21277 - protein, 251 aa, Homo sapiens
  MOD_RES (1)..(1): Any amino acid
  MOD_RES (4)..(4): Selenocysteine
  MOD_RES (7)..(7): Selenocysteine
  MOD_RES (21)..(21): Selenocysteine
  MOD_RES (44)..(44): Selenocysteine
  MOD_RES (109)..(109): Selenocysteine
  MOD_RES (139)..(139): Selenocysteine
  MOD_RES (151)..(151): Selenocysteine
  MOD_RES (153)..(153): Selenocysteine
  MOD_RES (157)..(157): Selenocysteine
  MOD_RES (225)..(225): Selenocysteine
XIKXLGXGSFGRVMLVKHKEXGNHYAMKILDKQKVVKLKQIEHXLNEKRILQAVNFPFLVKLEFSFKDNSNLYMVMEYVPGGEMFSHLRRIGRFSEPHARFYAAQIVLXFEYLHSLDLIYRDLKPENLLIDQQGYIQVXDFGFAKRVKGRXWXLCGXPEYLAPEIILSKGYNKAVDWWALGVLIYEMAAGYPPFFADQPIQIYEKIVSGKVEAPFIPKFKGPGDXSNFDDYEEEEIRVSINEKCGKEFSEF

SEQ ID NO: 21278 - protein, 398 aa, Homo sapiens
  MOD_RES (13)..(13): Selenocysteine
  MOD_RES (15)..(17): Selenocysteine
  MOD_RES (37)..(37): Selenocysteine
  MOD_RES (43)..(43): Selenocysteine
  MOD_RES (56)..(56): Selenocysteine
  MOD_RES (82)..(82): Selenocysteine
  MOD_RES (96)..(96): Selenocysteine
  MOD_RES (99)..(99): Selenocysteine
  MOD_RES (113)..(113): Selenocysteine
  MOD_RES (136)..(136): Selenocysteine
  MOD_RES (201)..(201): Selenocysteine
  MOD_RES (231)..(231): Selenocysteine
  MOD_RES (243)..(243): Selenocysteine
  MOD_RES (245)..(245): Selenocysteine
  MOD_RES (249)..(249): Selenocysteine
  MOD_RES (326)..(326): Selenocysteine
  MOD_RES (341)..(341): Selenocysteine
  MOD_RES (347)..(348): Selenocysteine
  MOD_RES (372)..(372): Selenocysteine
  MOD_RES (388)..(388): Selenocysteine
MAAYREPPCNQYXGXXXALQKLEGFASRLFHRHSKGXAHDQKXALENDSLHFSEHXALWDRSMKEFLAKAKEDFLKKWENPXQNNAGLEDFERKKXLGXGSFGRVMLVKHKAXEQYYAMKILDKQKVVKLKQIEHXLNEKRILQAVNFPFLVRLEYAFKDNSNLYMVMEYVPGGEMFSHLRRIGRFSEPHARFYAAQIVLXFEYLHSLDLIYRDLKPENLLIDHQGYIQVXDFGFAKRVKGRXWXLCGXPEYLAPEIILSKGYNKAVDWWALGVLIYEMAAGYPPFFADQPIQIYEKIVSGKVRFPSHFSSDLKDLLRNLLQVDLXKRFGNLKNGVSDIKXHKWFAXXDWIAIYQRKVEAPFIPKFRGSGDXSNFDDYEEEDIRVSIXEKCAKEFGEF

SEQ ID NO: 21279 - protein, 245 aa, Homo sapiens
  MOD_RES (23)..(23): Selenocysteine
  MOD_RES (37)..(37): Selenocysteine
  MOD_RES (40)..(40): Selenocysteine
  MOD_RES (54)..(54): Selenocysteine
  MOD_RES (77)..(77): Selenocysteine
  MOD_RES (142)..(142): Selenocysteine
  MOD_RES (172)..(172): Selenocysteine
  MOD_RES (184)..(184): Selenocysteine
  MOD_RES (186)..(186): Selenocysteine
  MOD_RES (190)..(190): Selenocysteine
MGLLKEFLAKAKEDFLKKWENPXQNNAGLEDFERKKXLGXGSFGRVMLVKHKAXEQYYAMKILDKQKVVKLKQIEHXLNEKRILQAVNFPFLVRLEYAFKDNSNLYMVMEYVPGGEMFSHLRRIGRFSEPHARFYAAQIVLXFEYLHSLDLIYRDLKPENLLIDHQGYIQVXDFGFAKRVKGRXWXLCGXPEYLAPEIILSKGYNKAVDWWALGVLIYEMAAGYPPFFADQPIQIYEKIVSGKNF

SEQ ID NO: 21280 - protein, 339 aa, Homo sapiens
  MOD_RES (23)..(23): Selenocysteine
  MOD_RES (37)..(37): Selenocysteine
  MOD_RES (40)..(40): Selenocysteine
  MOD_RES (54)..(54): Selenocysteine
  MOD_RES (77)..(77): Selenocysteine
  MOD_RES (142)..(142): Selenocysteine
  MOD_RES (172)..(172): Selenocysteine
  MOD_RES (184)..(184): Selenocysteine
  MOD_RES (186)..(186): Selenocysteine
  MOD_RES (190)..(190): Selenocysteine
  MOD_RES (267)..(267): Selenocysteine
  MOD_RES (282)..(282): Selenocysteine
  MOD_RES (288)..(289): Selenocysteine
  MOD_RES (313)..(313): Selenocysteine
  MOD_RES (329)..(329): Selenocysteine
MGLLKEFLAKAKEDFLKKWENPXQNNAGLEDFERKKXLGXGSFGRVMLVKHKAXEQYYAMKILDKQKVVKLKQIEHXLNEKRILQAVNFPFLVRLEYAFKDNSNLYMVMEYVPGGEMFSHLRRIGRFSEPHARFYAAQIVLXFEYLHSLDLIYRDLKPENLLIDHQGYIQVXDFGFAKRVKGRXWXLCGXPEYLAPEIILSKGYNKAVDWWALGVLIYEMAAGYPPFFADQPIQIYEKIVSGKVRFPSHFSSDLKDLLRNLLQVDLXKRFGNLKNGVSDIKXHKWFAXXDWIAIYQRKVEAPFIPKFRGSGDXSNFDDYEEEDIRVSIXEKCAKEFGEF

SEQ ID NO: 21281 - protein, 214 aa, Homo sapiens
  MOD_RES (31)..(31): Selenocysteine
  MOD_RES (45)..(45): Selenocysteine
  MOD_RES (48)..(48): Selenocysteine
  MOD_RES (62)..(62): Selenocysteine
  MOD_RES (85)..(85): Selenocysteine
  MOD_RES (150)..(150): Selenocysteine
  MOD_RES (180)..(180): Selenocysteine
  MOD_RES (192)..(192): Selenocysteine
  MOD_RES (194)..(194): Selenocysteine
  MOD_RES (198)..(198): Selenocysteine
MGLSCSSSEISVKEFLAKAKEDFLKKWENPXQNNAGLEDFERKKXLGXGSFGRVMLVKHKAXEQYYAMKILDKQKVVKLKQIEHXLNEKRILQAVNFPFLVRLEYAFKDNSNLYMVMEYVPGGEMFSHLRRIGRFSEPHARFYAAQIVLXFEYLHSLDLIYRDLKPENLLIDHQGYIQVXDFGFAKRVKGRXWXLCGXPEYLAPEIILSKGYNK

SEQ ID NO: 21282 - protein, 357 aa, Homo sapiens
  MOD_RES (41)..(41): Selenocysteine
  MOD_RES (55)..(55): Selenocysteine
  MOD_RES (58)..(58): Selenocysteine
  MOD_RES (72)..(72): Selenocysteine
  MOD_RES (95)..(95): Selenocysteine
  MOD_RES (160)..(160): Selenocysteine
  MOD_RES (190)..(190): Selenocysteine
  MOD_RES (202)..(202): Selenocysteine
  MOD_RES (204)..(204): Selenocysteine
  MOD_RES (208)..(208): Selenocysteine
  MOD_RES (285)..(285): Selenocysteine
  MOD_RES (300)..(300): Selenocysteine
  MOD_RES (306)..(307): Selenocysteine
  MOD_RES (331)..(331): Selenocysteine
  MOD_RES (347)..(347): Selenocysteine
MGLSRKSSDASACSSSEISDFVKEFLAKAKEDFLKKWENPXQNNAGLEDFERKKXLGXGSFGRVMLVKHKAXEQYYAMKILDKQKVVKLKQIEHXLNEKRILQAVNFPFLVRLEYAFKDNSNLYMVMEYVPGGEMFSHLRRIGRFSEPHARFYAAQIVLXFEYLHSLDLIYRDLKPENLLIDHQGYIQVXDFGFAKRVKGRXWXLCGXPEYLAPEIILSKGYNKAVDWWALGVLIYEMAAGYPPFFADQPIQIYEKIVSGKVRFPSHFSSDLKDLLRNLLQVDLXKRFGNLKNGVSDIKXHKWFAXXDWIAIYQRKVEAPFIPKFRGSGDXSNFDDYEEEDIRVSIXEKCAKEFGEF

SEQ ID NO: 21283 - protein, 358 aa, Homo sapiens
  MOD_RES (42)..(42): Selenocysteine
  MOD_RES (56)..(56): Selenocysteine
  MOD_RES (59)..(59): Selenocysteine
  MOD_RES (73)..(73): Selenocysteine
  MOD_RES (96)..(96): Selenocysteine
  MOD_RES (161)..(161): Selenocysteine
  MOD_RES (191)..(191): Selenocysteine
  MOD_RES (203)..(203): Selenocysteine
  MOD_RES (205)..(205): Selenocysteine
  MOD_RES (209)..(209): Selenocysteine
  MOD_RES (286)..(286): Selenocysteine
  MOD_RES (301)..(301): Selenocysteine
  MOD_RES (307)..(308): Selenocysteine
  MOD_RES (332)..(332): Selenocysteine
  MOD_RES (348)..(348): Selenocysteine
MGLSRKSSDASACSSSEISDSFVKEFLAKAKEDFLKKWENPXQNNAGLEDFERKKXLGXGSFGRVMLVKHKAXEQYYAMKILDKQKVVKLKQIEHXLNEKRILQAVNFPFLVRLEYAFKDNSNLYMVMEYVPGGEMFSHLRRIGRFSEPHARFYAAQIVLXFEYLHSLDLIYRDLKPENLLIDHQGYIQVXDFGFAKRVKGRXWXLCGXPEYLAPEIILSKGYNKAVDWWALGVLIYEMAAGYPPFFADQPIQIYEKIVSGKVRFPSHFSSDLKDLLRNLLQVDLXKRFGNLKNGVSDIKXHKWFAXXDWIAIYQRKVEAPFIPKFRGSGDXSNFDDYEEEDIRVSIXEKCAKEFGEF

SEQ ID NO: 21284 - protein, 186 aa, Homo sapiens
  MOD_RES (39)..(39): Selenocysteine
  MOD_RES (53)..(53): Selenocysteine
  MOD_RES (56)..(56): Selenocysteine
  MOD_RES (70)..(70): Selenocysteine
  MOD_RES (93)..(93): Selenocysteine
  MOD_RES (158)..(158): Selenocysteine
MGLSRKSSDASACSSSEISVKEFLAKAKEDFLKKWENPXQNNAGLEDFERKKXLGXGSFGRVMLVKHKAXEQYYAMKILDKQKVVKLKQIEHXLNEKRILQAVNFPFLVRLEYAFKDNSNLYMVMEYVPGGEMFSHLRRIGRFSEPHARFYAAQIVLXFEYLHSLDLIYRDLKPENLLIDHQGYIQ

SEQ ID NO: 21285 - protein, 355 aa, Homo sapiens
  MOD_RES (39)..(39): Selenocysteine
  MOD_RES (53)..(53): Selenocysteine
  MOD_RES (56)..(56): Selenocysteine
  MOD_RES (70)..(70): Selenocysteine
  MOD_RES (93)..(93): Selenocysteine
  MOD_RES (158)..(158): Selenocysteine
  MOD_RES (188)..(188): Selenocysteine
  MOD_RES (200)..(200): Selenocysteine
  MOD_RES (202)..(202): Selenocysteine
  MOD_RES (206)..(206): Selenocysteine
  MOD_RES (283)..(283): Selenocysteine
  MOD_RES (298)..(298): Selenocysteine
  MOD_RES (304)..(305): Selenocysteine
  MOD_RES (329)..(329): Selenocysteine
  MOD_RES (345)..(345): Selenocysteine
MGLSRKSSDASACSSSEISVKEFLAKAKEDFLKKWENPXQNNAGLEDFERKKXLGXGSFGRVMLVKHKAXEQYYAMKILDKQKVVKLKQIEHXLNEKRILQAVNFPFLVRLEYAFKDNSNLYMVMEYVPGGEMFSHLRRIGRFSEPHARFYAAQIVLXFEYLHSLDLIYRDLKPENLLIDHQGYIQVXDFGFAKRVKGRXWXLCGXPEYLAPEIILSKGYNKAVDWWALGVLIYEMAAGYPPFFADQPIQIYEKIVSGKVRFPSHFSSDLKDLLRNLLQVDLXKRFGNLKNGVSDIKXHKWFAXXDWIAIYQRKVEAPFIPKFRGSGDXSNFDDYEEEDIRVSIXEKCAKEFGEF

SEQ ID NO: 21286 - protein, 257 aa, Homo sapiens
  MOD_RES (6)..(6): Selenocysteine
  MOD_RES (35)..(35): Selenocysteine
  MOD_RES (49)..(49): Selenocysteine
  MOD_RES (52)..(52): Selenocysteine
  MOD_RES (66)..(66): Selenocysteine
  MOD_RES (89)..(89): Selenocysteine
  MOD_RES (154)..(154): Selenocysteine
  MOD_RES (184)..(184): Selenocysteine
  MOD_RES (196)..(196): Selenocysteine
  MOD_RES (198)..(198): Selenocysteine
  MOD_RES (202)..(202): Selenocysteine
MGNAAXAKKGSEVESVKEFLAKAKEDFLKKWENPXQNNAGLEDFERKKXLGXGSFGRVMLVKHKAXEQYYAMKILDKQKVVKLKQIEHXLNEKRILQAVNFPFLVRLEYAFKDNSNLYMVMEYVPGGEMFSHLRRIGRFSEPHARFYAAQIVLXFEYLHSLDLIYRDLKPENLLIDHQGYIQVXDFGFAKRVKGRXWXLCGXPEYLAPEIILSKGYNKAVDWWALGVLIYEMAAGYPPFFADQPIQIYEKIVSGKNF

SEQ ID NO: 21287 - protein, 351 aa, Homo sapiens
  MOD_RES (6)..(6): Selenocysteine
  MOD_RES (35)..(35): Selenocysteine
  MOD_RES (49)..(49): Selenocysteine
  MOD_RES (52)..(52): Selenocysteine
  MOD_RES (66)..(66): Selenocysteine
  MOD_RES (89)..(89): Selenocysteine
  MOD_RES (154)..(154): Selenocysteine
  MOD_RES (184)..(184): Selenocysteine
  MOD_RES (196)..(196): Selenocysteine
  MOD_RES (198)..(198): Selenocysteine
  MOD_RES (202)..(202): Selenocysteine
  MOD_RES (279)..(279): Selenocysteine
  MOD_RES (294)..(294): Selenocysteine
  MOD_RES (300)..(301): Selenocysteine
  MOD_RES (325)..(325): Selenocysteine
  MOD_RES (341)..(341): Selenocysteine
MGNAAXAKKGSEVESVKEFLAKAKEDFLKKWENPXQNNAGLEDFERKKXLGXGSFGRVMLVKHKAXEQYYAMKILDKQKVVKLKQIEHXLNEKRILQAVNFPFLVRLEYAFKDNSNLYMVMEYVPGGEMFSHLRRIGRFSEPHARFYAAQIVLXFEYLHSLDLIYRDLKPENLLIDHQGYIQVXDFGFAKRVKGRXWXLCGXPEYLAPEIILSKGYNKAVDWWALGVLIYEMAAGYPPFFADQPIQIYEKIVSGKVRFPSHFSSDLKDLLRNLLQVDLXKRFGNLKNGVSDIKXHKWFAXXDWIAIYQRKVEAPFIPKFRGSGDXSNFDDYEEEDIRVSIXEKCAKEFGEF

SEQ ID NO: 21288 - protein, 338 aa, Homo sapiens
  MOD_RES (36)..(36): Selenocysteine
  MOD_RES (39)..(39): Selenocysteine
  MOD_RES (53)..(53): Selenocysteine
  MOD_RES (76)..(76): Selenocysteine
  MOD_RES (141)..(141): Selenocysteine
  MOD_RES (171)..(171): Selenocysteine
  MOD_RES (183)..(183): Selenocysteine
  MOD_RES (185)..(185): Selenocysteine
  MOD_RES (189)..(189): Selenocysteine
  MOD_RES (266)..(266): Selenocysteine
  MOD_RES (281)..(281): Selenocysteine
  MOD_RES (287)..(288): Selenocysteine
  MOD_RES (312)..(312): Selenocysteine
  MOD_RES (328)..(328): Selenocysteine
MLLLSSSISLYKDRNEARLISSQNNAGLEDFERKKXLGXGSFGRVMLVKHKAXEQYYAMKILDKQKVVKLKQIEHXLNEKRILQAVNFPFLVRLEYAFKDNSNLYMVMEYVPGGEMFSHLRRIGRFSEPHARFYAAQIVLXFEYLHSLDLIYRDLKPENLLIDHQGYIQVXDFGFAKRVKGRXWXLCGXPEYLAPEIILSKGYNKAVDWWALGVLIYEMAAGYPPFFADQPIQIYEKIVSGKVRFPSHFSSDLKDLLRNLLQVDLXKRFGNLKNGVSDIKXHKWFAXXDWIAIYQRKVEAPFIPKFRGSGDXSNFDDYEEEDIRVSIXEKCAKEFGEF

SEQ ID NO: 21289 - protein, 209 aa, Homo sapiens
  MOD_RES (30)..(30): Selenocysteine
  MOD_RES (44)..(44): Selenocysteine
  MOD_RES (47)..(47): Selenocysteine
  MOD_RES (61)..(61): Selenocysteine
  MOD_RES (84)..(84): Selenocysteine
  MOD_RES (149)..(149): Selenocysteine
  MOD_RES (179)..(179): Selenocysteine
  MOD_RES (191)..(191): Selenocysteine
  MOD_RES (193)..(193): Selenocysteine
  MOD_RES (197)..(197): Selenocysteine
MSACSSSEISVKEFLAKAKEDFLKKWENPXQNNAGLEDFERKKXLGXGSFGRVMLVKHKAXEQYYAMKILDKQKVVKLKQIEHXLNEKRILQAVNFPFLVRLEYAFKDNSNLYMVMEYVPGGEMFSHLRRIGRFSEPHARFYAAQIVLXFEYLHSLDLIYRDLKPENLLIDHQGYIQVXDFGFAKRVKGRXWXLCGXPEYLAPEIILSK

SEQ ID NO: 21290 - protein, 264 aa, Homo sapiens
  MOD_RES (41)..(41): Selenocysteine
  MOD_RES (55)..(55): Selenocysteine
  MOD_RES (58)..(58): Selenocysteine
  MOD_RES (72)..(72): Selenocysteine
  MOD_RES (95)..(95): Selenocysteine
  MOD_RES (160)..(160): Selenocysteine
  MOD_RES (190)..(190): Selenocysteine
  MOD_RES (202)..(202): Selenocysteine
  MOD_RES (204)..(204): Selenocysteine
  MOD_RES (208)..(208): Selenocysteine
MSARKSSDASACSSSEISDSFVKEFLAKAKEDFLKKWENPXQNNAGLEDFERKKXLGXGSFGRVMLVKHKAXEQYYAMKILDKQKVVKLKQIEHXLNEKRILQAVNFPFLVRLEYAFKDNSNLYMVMEYVPGGEMFSHLRRIGRFSEPHARFYAAQIVLXFEYLHSLDLIYRDLKPENLLIDHQGYIQVXDFGFAKRVKGRXWXLCGXPEYLAPEIILSKGYNKAVDWWALGVLIYEMAAGYPPFFADQPIQIYEKIVSGKQNF

SEQ ID NO: 21291 - protein, 357 aa, Homo sapiens
  MOD_RES (41)..(41): Selenocysteine
  MOD_RES (55)..(55): Selenocysteine
  MOD_RES (58)..(58): Selenocysteine
  MOD_RES (72)..(72): Selenocysteine
  MOD_RES (95)..(95): Selenocysteine
  MOD_RES (160)..(160): Selenocysteine
  MOD_RES (190)..(190): Selenocysteine
  MOD_RES (202)..(202): Selenocysteine
  MOD_RES (204)..(204): Selenocysteine
  MOD_RES (208)..(208): Selenocysteine
  MOD_RES (285)..(285): Selenocysteine
  MOD_RES (300)..(300): Selenocysteine
  MOD_RES (306)..(307): Selenocysteine
  MOD_RES (331)..(331): Selenocysteine
  MOD_RES (347)..(347): Selenocysteine
MSARKSSDASACSSSEISDSFVKEFLAKAKEDFLKKWENPXQNNAGLEDFERKKXLGXGSFGRVMLVKHKAXEQYYAMKILDKQKVVKLKQIEHXLNEKRILQAVNFPFLVRLEYAFKDNSNLYMVMEYVPGGEMFSHLRRIGRFSEPHARFYAAQIVLXFEYLHSLDLIYRDLKPENLLIDHQGYIQVXDFGFAKRVKGRXWXLCGXPEYLAPEIILSKGYNKAVDWWALGVLIYEMAAGYPPFFADQPIQIYEKIVSGKVRFPSHFSSDLKDLLRNLLQVDLXKRFGNLKNGVSDIKXHKWFAXXDWIAIYQRKVEAPFIPKFRGSGDXSNFDDYEEEDIRVSIXEKCAKEFGEF

SEQ ID NO: 21292 - protein, 321 aa, Homo sapiens
  MOD_RES (38)..(38): Selenocysteine
  MOD_RES (52)..(52): Selenocysteine
  MOD_RES (55)..(55): Selenocysteine
  MOD_RES (69)..(69): Selenocysteine
  MOD_RES (124)..(124): Selenocysteine
  MOD_RES (154)..(154): Selenocysteine
  MOD_RES (166)..(166): Selenocysteine
  MOD_RES (168)..(168): Selenocysteine
  MOD_RES (172)..(172): Selenocysteine
  MOD_RES (249)..(249): Selenocysteine
  MOD_RES (264)..(264): Selenocysteine
  MOD_RES (270)..(271): Selenocysteine
  MOD_RES (295)..(295): Selenocysteine
  MOD_RES (311)..(311): Selenocysteine
MSARKSSDASACSSSEISVKEFLAKAKEDFLKKWENPXQNNAGLEDFERKKXLGXGSFGRVMLVKHKAXEQYYAMKILDKQKDNSNLYMVMEYVPGGEMFSHLRRIGRFSEPHARFYAAQIVLXFEYLHSLDLIYRDLKPENLLIDHQGYIQVXDFGFAKRVKGRXWXLCGXPEYLAPEIILSKGYNKAVDWWALGVLIYEMAAGYPPFFADQPIQIYEKIVSGKVRFPSHFSSDLKDLLRNLLQVDLXKRFGNLKNGVSDIKXHKWFAXXDWIAIYQRKVEAPFIPKFRGSGDXSNFDDYEEEDIRVSIXEKCAKEFGEF

SEQ ID NO: 21293 - protein, 206 aa, Homo sapiens
  MOD_RES (38)..(38): Selenocysteine
  MOD_RES (52)..(52): Selenocysteine
  MOD_RES (55)..(55): Selenocysteine
  MOD_RES (69)..(69): Selenocysteine
  MOD_RES (92)..(92): Selenocysteine
  MOD_RES (157)..(157): Selenocysteine
  MOD_RES (187)..(187): Selenocysteine
  MOD_RES (199)..(199): Selenocysteine
  MOD_RES (201)..(201): Selenocysteine
  MOD_RES (205)..(205): Selenocysteine
MSARKSSDASACSSSEISVKEFLAKAKEDFLKKWENPXQNNAGLEDFERKKXLGXGSFGRVMLVKHKAXEQYYAMKILDKQKVVKLKQIEHXLNEKRILQAVNFPFLVRLEYAFKDNSNLYMVMEYVPGGEMFSHLRRIGRFSEPHARFYAAQIVLXFEYLHSLDLIYRDLKPENLLIDHQGYIQVXDFGFAKRVKGRXWXLCGXP

SEQ ID NO: 21294 - protein, 197 aa, Homo sapiens
  MOD_RES (22)..(22): Selenocysteine
  MOD_RES (36)..(36): Selenocysteine
  MOD_RES (39)..(39): Selenocysteine
  MOD_RES (53)..(53): Selenocysteine
  MOD_RES (76)..(76): Selenocysteine
  MOD_RES (141)..(141): Selenocysteine
  MOD_RES (171)..(171): Selenocysteine
  MOD_RES (183)..(183): Selenocysteine
  MOD_RES (185)..(185): Selenocysteine
  MOD_RES (189)..(189): Selenocysteine
MSVKEFLAKAKEDFLKKWENPXQNNAGLEDFERKKXLGXGSFGRVMLVKHKAXEQYYAMKILDKQKVVKLKQIEHXLNEKRILQAVNFPFLVRLEYAFKDNSNLYMVMEYVPGGEMFSHLRRIGRFSEPHARFYAAQIVLXFEYLHSLDLIYRDLKPENLLIDHQGYIQVXDFGFAKRVKGRXWXLCGXPEYLAPEI

SEQ ID NO: 21295 - protein, 351 aa, Homo sapiens
  MOD_RES (10)..(10): Selenocysteine
  MOD_RES (38)..(38): Selenocysteine
  MOD_RES (49)..(49): Selenocysteine
  MOD_RES (66)..(66): Selenocysteine
  MOD_RES (184)..(184): Selenocysteine
  MOD_RES (196)..(196): Selenocysteine
  MOD_RES (198)..(198): Selenocysteine
  MOD_RES (202)..(202): Selenocysteine
  MOD_RES (279)..(279): Selenocysteine
  MOD_RES (300)..(301): Selenocysteine
  MOD_RES (320)..(320): Selenocysteine
MGNAPAKKDXEQEESVNEFLAKARGDFLYRWGNPAQNXASSDQFERLRXLGMGSFGRVMLVRHQEXGGHYAMKILNKQKVVKMKQVEHILNEKRILQAIDFPFLVKLQFSFKDNSYLYLVMEYVPGGEMFSRLQRVGRFSEPHACFYAAQVVLAVQYLHSLDLIHRDLKPENLLIDQQGYLQVXDFGFAKRVKGRXWXLCGXPEYLAPEIILSKGYNKAVDWWALGVLIYEMAVGFPPFYADQPIQIYEKIVSGRVRFPSKLSSDLKHLLRSLLQVDLXKRFGNLRNGVGDIKNHKWFAXXSWIAIYEKKVEAPFIPKYXGPGDASNFDDYEEEELRISINEKCAKEFSEF

SEQ ID NO: 21296 - protein, 82 aa, Homo sapiens
  MOD_RES (3)..(3): Selenocysteine
  MOD_RES (21)..(21): Selenocysteine
  MOD_RES (30)..(30): Selenocysteine
  MOD_RES (44)..(44): Selenocysteine
  MOD_RES (53)..(53): Selenocysteine
  MOD_RES (68)..(68): Selenocysteine
  MOD_RES (72)..(72): Selenocysteine
MEXVISSDSSPAVENEHPQEXPESNNSVYXSFMKSHRCYDLIPXSSKLVVFDXSLQSCPCGFAFMIIXVLAXGEESFFCFGD

SEQ ID NO: 21297 - protein, 331 aa, Homo sapiens
  MOD_RES (3)..(3): Selenocysteine
  MOD_RES (21)..(21): Selenocysteine
  MOD_RES (30)..(30): Selenocysteine
  MOD_RES (44)..(44): Selenocysteine
  MOD_RES (53)..(53): Selenocysteine
  MOD_RES (66)..(66): Selenocysteine
  MOD_RES (87)..(87): Selenocysteine
  MOD_RES (89)..(89): Selenocysteine
  MOD_RES (116)..(116): Selenocysteine
  MOD_RES (163)..(163): Selenocysteine
  MOD_RES (168)..(168): Selenocysteine
  MOD_RES (181)..(181): Selenocysteine
  MOD_RES (200)..(200): Selenocysteine
  MOD_RES (209)..(211): Selenocysteine
  MOD_RES (254)..(254): Selenocysteine
  MOD_RES (263)..(263): Selenocysteine
  MOD_RES (284)..(284): Selenocysteine
  MOD_RES (287)..(287): Selenocysteine
  MOD_RES (325)..(325): Selenocysteine
MEXVISSDSSPAVENEHPQEXPESNNSVYXSFMKSHRCYDLIPXSSKLVVFDXSLQVKKAFFALVXNGVRAAPLWDSKKQSFVGMLXIXDFINILHRYYKSALVQIYELEEHKIEXWREVYLQDSFKPLVCISPNASLFDAVSSLIRNKIHRLPVIDPESGNXLYILXHKRILKFLKLFIXEFPKPEFMSKSLEELQIGXYANIAMVRXXXPVYVALGIFVQHRVSALPVVDEKGRVVDIYSKFDVINLAAEKXYNNLDVSVXKALQHRSHYFEGVLKCYLHEXLEXIINRLVEAEVHRLVVVDENDVVKGIVSLSDILQALVLXGGEKKP

SEQ ID NO: 21298 - protein, 340 aa, Homo sapiens
  MOD_RES (3)..(3): Selenocysteine
  MOD_RES (21)..(21): Selenocysteine
  MOD_RES (30)..(30): Selenocysteine
  MOD_RES (44)..(44): Selenocysteine
  MOD_RES (53)..(53): Selenocysteine
  MOD_RES (66)..(66): Selenocysteine
  MOD_RES (96)..(96): Selenocysteine
  MOD_RES (98)..(98): Selenocysteine
  MOD_RES (125)..(125): Selenocysteine
  MOD_RES (172)..(172): Selenocysteine
  MOD_RES (177)..(177): Selenocysteine
  MOD_RES (190)..(190): Selenocysteine
  MOD_RES (209)..(209): Selenocysteine
  MOD_RES (218)..(220): Selenocysteine
  MOD_RES (263)..(263): Selenocysteine
  MOD_RES (272)..(272): Selenocysteine
  MOD_RES (293)..(293): Selenocysteine
  MOD_RES (296)..(296): Selenocysteine
  MOD_RES (334)..(334): Selenocysteine
MEXVISSDSSPAVENEHPQEXPESNNSVYXSFMKSHRCYDLIPXSSKLVVFDXSLQVKKAFFALVXNGVRAAPLWDSKKQSFVVLRALSCPLGMLXIXDFINILHRYYKSALVQIYELEEHKIEXWREVYLQDSFKPLVCISPNASLFDAVSSLIRNKIHRLPVIDPESGNXLYILXHKRILKFLKLFIXEFPKPEFMSKSLEELQIGXYANIAMVRXXXPVYVALGIFVQHRVSALPVVDEKGRVVDIYSKFDVINLAAEKXYNNLDVSVXKALQHRSHYFEGVLKCYLHEXLEXIINRLVEAEVHRLVVVDENDVVKGIVSLSDILQALVLXGGEKKP

SEQ ID NO: 21299 - protein, 43 aa, Homo sapiens
  MOD_RES (5)..(5): Selenocysteine
  MOD_RES (26)..(26): Selenocysteine
  MOD_RES (35)..(35): Selenocysteine
MFSLXGVMVISSDSSPAVENEHPQEXPESNNSVYXSFMKSHRC

SEQ ID NO: 21300 - protein, 69 aa, Homo sapiens
  MOD_RES (12)..(12): Selenocysteine
  MOD_RES (21)..(21): Selenocysteine
  MOD_RES (34)..(34): Selenocysteine
  MOD_RES (55)..(55): Selenocysteine
  MOD_RES (57)..(57): Selenocysteine
MKSHRCYDLIPXSSKLVVFDXSLQVKKAFFALVXNGVRAAPLWDSKKQSFVGMLXIXDFINILHRYYKS

SEQ ID NO: 21301 - protein, 82 aa, Homo sapiens
  MOD_RES (12)..(12): Selenocysteine
  MOD_RES (21)..(21): Selenocysteine
  MOD_RES (34)..(34): Selenocysteine
  MOD_RES (55)..(55): Selenocysteine
  MOD_RES (57)..(57): Selenocysteine
MKSHRCYDLIPXSSKLVVFDXSLQVKKAFFALVXNGVRAAPLWDSKKQSFVGMLXIXDFINILHRYYKSALVQIYELEEHKI

SEQ ID NO: 21302 - protein, 125 aa, Homo sapiens
  MOD_RES (12)..(12): Selenocysteine
  MOD_RES (21)..(21): Selenocysteine
  MOD_RES (34)..(34): Selenocysteine
  MOD_RES (55)..(55): Selenocysteine
  MOD_RES (57)..(57): Selenocysteine
  MOD_RES (84)..(84): Selenocysteine
MKSHRCYDLIPXSSKLVVFDXSLQVKKAFFALVXNGVRAAPLWDSKKQSFVGMLXIXDFINILHRYYKSALVQIYELEEHKIEXWREVYLQDSFKPLVCISPNASLFDAVSSLIRNKIHRLPVID

SEQ ID NO: 21303 - protein, 161 aa, Homo sapiens
  MOD_RES (12)..(12): Selenocysteine
  MOD_RES (21)..(21): Selenocysteine
  MOD_RES (34)..(34): Selenocysteine
  MOD_RES (55)..(55): Selenocysteine
  MOD_RES (57)..(57): Selenocysteine
  MOD_RES (84)..(84): Selenocysteine
  MOD_RES (131)..(131): Selenocysteine
  MOD_RES (136)..(136): Selenocysteine
  MOD_RES (149)..(149): Selenocysteine
MKSHRCYDLIPXSSKLVVFDXSLQVKKAFFALVXNGVRAAPLWDSKKQSFVGMLXIXDFINILHRYYKSALVQIYELEEHKIEXWREVYLQDSFKPLVCISPNASLFDAVSSLIRNKIHRLPVIDPESGNXLYILXHKRILKFLKLFIXEFPKPEFMSKSL

SEQ ID NO: 21304 - protein, 299 aa, Homo sapiens
  MOD_RES (12)..(12): Selenocysteine
  MOD_RES (21)..(21): Selenocysteine
  MOD_RES (34)..(34): Selenocysteine
  MOD_RES (55)..(55): Selenocysteine
  MOD_RES (57)..(57): Selenocysteine
  MOD_RES (84)..(84): Selenocysteine
  MOD_RES (131)..(131): Selenocysteine
  MOD_RES (136)..(136): Selenocysteine
  MOD_RES (149)..(149): Selenocysteine
  MOD_RES (168)..(168): Selenocysteine
  MOD_RES (177)..(179): Selenocysteine
  MOD_RES (222)..(222): Selenocysteine
  MOD_RES (231)..(231): Selenocysteine
  MOD_RES (252)..(252): Selenocysteine
  MOD_RES (255)..(255): Selenocysteine
  MOD_RES (293)..(293): Selenocysteine
MKSHRCYDLIPXSSKLVVFDXSLQVKKAFFALVXNGVRAAPLWDSKKQSFVGMLXIXDFINILHRYYKSALVQIYELEEHKIEXWREVYLQDSFKPLVCISPNASLFDAVSSLIRNKIHRLPVIDPESGNXLYILXHKRILKFLKLFIXEFPKPEFMSKSLEELQIGXYANIAMVRXXXPVYVALGIFVQHRVSALPVVDEKGRVVDIYSKFDVINLAAEKXYNNLDVSVXKALQHRSHYFEGVLKCYLHEXLEXIINRLVEAEVHRLVVVDENDVVKGIVSLSDILQALVLXGGEKKP

SEQ ID NO: 21305 - protein, 28 aa, Homo sapiens
  MOD_RES (3)..(3): Selenocysteine
  MOD_RES (5)..(5): Selenocysteine
MLXIXDFINILHRYYKSALVQIYELEEH

SEQ ID NO: 21306 - protein, 145 aa, Homo sapiens
  MOD_RES (3)..(3): Selenocysteine
  MOD_RES (5)..(5): Selenocysteine
  MOD_RES (32)..(32): Selenocysteine
  MOD_RES (79)..(79): Selenocysteine
  MOD_RES (84)..(84): Selenocysteine
  MOD_RES (97)..(97): Selenocysteine
  MOD_RES (116)..(116): Selenocysteine
  MOD_RES (125)..(127): Selenocysteine
MLXIXDFINILHRYYKSALVQIYELEEHKIEXWREVYLQDSFKPLVCISPNASLFDAVSSLIRNKIHRLPVIDPESGNXLYILXHKRILKFLKLFIXEFPKPEFMSKSLEELQIGXYANIAMVRXXXPVYVALGIFVQHRVSALP

SEQ ID NO: 21307 - protein, 203 aa, Homo sapiens
  MOD_RES (15)..(15): Selenocysteine
  MOD_RES (36)..(36): Selenocysteine
  MOD_RES (38)..(38): Selenocysteine
  MOD_RES (65)..(65): Selenocysteine
  MOD_RES (148)..(148): Selenocysteine
  MOD_RES (157)..(157): Selenocysteine
  MOD_RES (178)..(178): Selenocysteine
  MOD_RES (181)..(181): Selenocysteine
MSILKVKKAFFALVXNGVRAAPLWDSKKQSFVGMLXIXDFINILHRYYKSALVQIYELEEHKIEXWREVYLQDSFKPLVCISPNARSLSSPSQSSCPSLWKSYRLAPMPILLWFALPPPSMWLWGFLYSIESQPCQWWMRRNLAAEKXYNNLDVSVXKALQHRSHYFEGVLKCYLHEXLEXIINRLVEAEVHRLVVVDENDVV

SEQ ID NO: 21308 - protein, 280 aa, Homo sapiens
  MOD_RES (15)..(15): Selenocysteine
  MOD_RES (36)..(36): Selenocysteine
  MOD_RES (38)..(38): Selenocysteine
  MOD_RES (65)..(65): Selenocysteine
  MOD_RES (112)..(112): Selenocysteine
  MOD_RES (117)..(117): Selenocysteine
  MOD_RES (130)..(130): Selenocysteine
  MOD_RES (149)..(149): Selenocysteine
  MOD_RES (158)..(160): Selenocysteine
  MOD_RES (203)..(203): Selenocysteine
  MOD_RES (212)..(212): Selenocysteine
  MOD_RES (233)..(233): Selenocysteine
  MOD_RES (236)..(236): Selenocysteine
  MOD_RES (274)..(274): Selenocysteine
MSILKVKKAFFALVXNGVRAAPLWDSKKQSFVGMLXIXDFINILHRYYKSALVQIYELEEHKIEXWREVYLQDSFKPLVCISPNASLFDAVSSLIRNKIHRLPVIDPESGNXLYILXHKRILKFLKLFIXEFPKPEFMSKSLEELQIGXYANIAMVRXXXPVYVALGIFVQHRVSALPVVDEKGRVVDIYSKFDVINLAAEKXYNNLDVSVXKALQHRSHYFEGVLKCYLHEXLEXIINRLVEAEVHRLVVVDENDVVKGIVSLSDILQALVLXGGEKKP

SEQ ID NO: 21309 - protein, 251 aa, Homo sapiens
  MOD_RES (5)..(5): Selenocysteine
  MOD_RES (19)..(19): Selenocysteine
  MOD_RES (28)..(28): Selenocysteine
  MOD_RES (41)..(41): Selenocysteine
  MOD_RES (62)..(62): Selenocysteine
  MOD_RES (64)..(64): Selenocysteine
  MOD_RES (91)..(91): Selenocysteine
  MOD_RES (174)..(174): Selenocysteine
  MOD_RES (183)..(183): Selenocysteine
  MOD_RES (204)..(204): Selenocysteine
  MOD_RES (207)..(207): Selenocysteine
  MOD_RES (245)..(245): Selenocysteine
NSVYXSFMKSHRCYDLIPXSSKLVVFDXSLQVKKAFFALVXNGVRAAPLWDSKKQSFVGMLXIXDFINILHRYYKSALVQIYELEEHKIEXWREVYLQDSFKPLVCISPNARSLSSPSQSSCPSLWKSYRLAPMPILLWFALPPPSMWLWGFLYSIESQPCQWWMRRNLAAEKXYNNLDVSVXKALQHRSHYFEGVLKCYLHEXLEXIINRLVEAEVHRLVVVDENDVVKGIVSLSDILQALVLXGGEKKP

SEQ ID NO: 21310 - protein, 93 aa, Homo sapiens
  MOD_RES (19)..(19): Selenocysteine
  MOD_RES (28)..(28): Selenocysteine
  MOD_RES (49)..(49): Selenocysteine
  MOD_RES (52)..(52): Selenocysteine
  MOD_RES (80)..(80): Selenocysteine
  MOD_RES (93)..(93): Selenocysteine
RVVDIYSKFDVINLAAEKXYNNLDVSVXKALQHRSHYFEGVLKCYLHEXLEXIINRLVEAEVHRLVVVDENDVVKGICPXHCLLEALWESDEX

SEQ ID NO: 21311 - protein, 569 aa, Homo sapiens
  MOD_RES (8)..(8): Selenocysteine
  MOD_RES (97)..(97): Selenocysteine
  MOD_RES (104)..(104): Selenocysteine
  MOD_RES (142)..(142): Selenocysteine
  MOD_RES (156)..(156): Selenocysteine
  MOD_RES (165)..(165): Selenocysteine
  MOD_RES (167)..(167): Selenocysteine
  MOD_RES (170)..(170): Selenocysteine
  MOD_RES (174)..(174): Selenocysteine
  MOD_RES (200)..(200): Selenocysteine
  MOD_RES (213)..(213): Selenocysteine
  MOD_RES (221)..(221): Selenocysteine
  MOD_RES (276)..(276): Selenocysteine
  MOD_RES (285)..(286): Selenocysteine
  MOD_RES (319)..(319): Selenocysteine
  MOD_RES (321)..(321): Selenocysteine
  MOD_RES (348)..(348): Selenocysteine
  MOD_RES (357)..(357): Selenocysteine
  MOD_RES (400)..(400): Selenocysteine
  MOD_RES (432)..(432): Selenocysteine
  MOD_RES (443)..(443): Selenocysteine
  MOD_RES (486)..(486): Selenocysteine
  MOD_RES (493)..(493): Selenocysteine
  MOD_RES (495)..(495): Selenocysteine
  MOD_RES (519)..(519): Selenocysteine
  MOD_RES (557)..(557): Selenocysteine
  MOD_RES (566)..(566): Selenocysteine
  MOD_RES (568)..(568): Selenocysteine
MGSAVMDXKKKKDVSSPGGSGGKKNASQKRRSLRVHIPDLSSFAMPLLDGDLEGSGKHSSRKVDSPFGPGSPSKGFFSRGPQPRPSSPMSAPVRPKXSPGSPKXVFPFSYQESPPRSPRRMSFSGIFRSSSKESSPNSNPAXSPGGIRFFSRSRKXSGLSSSPSXPXQVXKQHXFPLESYKHEPERLENRIYASSSPPDXGQRFCPSSFQSPXRPPLASPXHYAPSKAAALAAALGPAEAGMLEKLEFEDEAVEDSESGVYMRFMRSHKCYDIVPXSSKLVVFDXXLQVKKAFFALVANGVRAAPLWESKKQSFVGMLXIXDFINILHRYYKSPMVQIYELEEHKIEXWRELYLQEXFKPLVNISPDASLFDAVYSLIKNKIHRLPVIDPISGNALYILXHKRILKFLQLFMSDMPKPAFMKQNLDELGIGXYHNIAFIHPDXPIIKALNIFVERRISALPVVDESGKVVDIYSKFDVINLAAEKXYNNLDIXVXQALQHRSQYFEGVVKCNKLEILEXIVDRIVRAEVHRLVVVNEADSIVGIISLSDILQALILXPAGAKQKEXEXE

SEQ ID NO: 21312 - protein, 229 aa, Homo sapiens
  MOD_RES (8)..(8): Selenocysteine
  MOD_RES (97)..(97): Selenocysteine
  MOD_RES (104)..(104): Selenocysteine
  MOD_RES (142)..(142): Selenocysteine
  MOD_RES (156)..(156): Selenocysteine
  MOD_RES (165)..(165): Selenocysteine
  MOD_RES (167)..(167): Selenocysteine
  MOD_RES (170)..(170): Selenocysteine
  MOD_RES (174)..(174): Selenocysteine
  MOD_RES (200)..(200): Selenocysteine
  MOD_RES (213)..(213): Selenocysteine
  MOD_RES (221)..(221): Selenocysteine
MGSAVMDXKKKKDVSSPGGSGGKKNASQKRRSLRVHIPDLSSFAMPLLDGDLEGSGKHSSRKVDSPFGPGSPSKGFFSRGPQPRPSSPMSAPVRPKXSPGSPKXVFPFSYQESPPRSPRRMSFSGIFRSSSKESSPNSNPAXSPGGIRFFSRSRKXSGLSSSPSXPXQVXKQHXFPLESYKHEPERLENRIYASSSPPDXGQRFCPSSFQSPXRPPLASPXHYAPSKAQ

SEQ ID NO: 21313 - protein, 445 aa, Homo sapiens
  MOD_RES (20)..(20): Selenocysteine
  MOD_RES (41)..(41): Selenocysteine
  MOD_RES (43)..(43): Selenocysteine
  MOD_RES (46)..(46): Selenocysteine
  MOD_RES (50)..(50): Selenocysteine
  MOD_RES (76)..(76): Selenocysteine
  MOD_RES (89)..(89): Selenocysteine
  MOD_RES (97)..(97): Selenocysteine
  MOD_RES (152)..(152): Selenocysteine
  MOD_RES (161)..(162): Selenocysteine
  MOD_RES (195)..(195): Selenocysteine
  MOD_RES (197)..(197): Selenocysteine
  MOD_RES (224)..(224): Selenocysteine
  MOD_RES (233)..(233): Selenocysteine
  MOD_RES (276)..(276): Selenocysteine
  MOD_RES (308)..(308): Selenocysteine
  MOD_RES (319)..(319): Selenocysteine
  MOD_RES (362)..(362): Selenocysteine
  MOD_RES (369)..(369): Selenocysteine
  MOD_RES (371)..(371): Selenocysteine
  MOD_RES (395)..(395): Selenocysteine
  MOD_RES (433)..(433): Selenocysteine
  MOD_RES (442)..(442): Selenocysteine
  MOD_RES (444)..(444): Selenocysteine
MKRFGSLRSNKKHKDQNRSXERRQSEPHGLFASGLSSSPSXPXQVXKQHXFPLESYKHEPERLENRIYASSSPPDXGQRFCPSSFQSPXRPPLASPXHYAPSKAAALAAALGPAEAGMLEKLEFEDEAVEDSESGVYMRFMRSHKCYDIVPXSSKLVVFDXXLQVKKAFFALVANGVRAAPLWESKKQSFVGMLXIXDFINILHRYYKSPMVQIYELEEHKIEXWRELYLQEXFKPLVNISPDASLFDAVYSLIKNKIHRLPVIDPISGNALYILXHKRILKFLQLFMSDMPKPAFMKQNLDELGIGXYHNIAFIHPDXPIIKALNIFVERRISALPVVDESGKVVDIYSKFDVINLAAEKXYNNLDIXVXQALQHRSQYFEGVVKCNKLEILEXIVDRIVRAEVHRLVVVNEADSIVGIISLSDILQALILXPAGAKQKEXEXE

SEQ ID NO: 21314 - protein, 52 aa, Homo sapiens
MLEKLEFEDEARCQGALIVCACHHALGGNPESYPQSRPFNHRLVPLSAPVKI

SEQ ID NO: 21315 - protein, 163 aa, Homo sapiens
  MOD_RES (35)..(35): Selenocysteine
  MOD_RES (44)..(45): Selenocysteine
  MOD_RES (78)..(78): Selenocysteine
  MOD_RES (80)..(80): Selenocysteine
  MOD_RES (107)..(107): Selenocysteine
  MOD_RES (116)..(116): Selenocysteine
  MOD_RES (159)..(159): Selenocysteine
MLEKLEFEDEAVEDSESGVYMRFMRSHKCYDIVPXSSKLVVFDXXLQVKKAFFALVANGVRAAPLWESKKQSFVGMLXIXDFINILHRYYKSPMVQIYELEEHKIEXWRELYLQEXFKPLVNISPDASLFDAVYSLIKNKIHRLPVIDPISGNALYILXHKRI

SEQ ID NO: 21316 - protein, 328 aa, Homo sapiens
  MOD_RES (35)..(35): Selenocysteine
  MOD_RES (44)..(45): Selenocysteine
  MOD_RES (78)..(78): Selenocysteine
  MOD_RES (80)..(80): Selenocysteine
  MOD_RES (107)..(107): Selenocysteine
  MOD_RES (116)..(116): Selenocysteine
  MOD_RES (159)..(159): Selenocysteine
  MOD_RES (191)..(191): Selenocysteine
  MOD_RES (202)..(202): Selenocysteine
  MOD_RES (245)..(245): Selenocysteine
  MOD_RES (252)..(252): Selenocysteine
  MOD_RES (254)..(254): Selenocysteine
  MOD_RES (278)..(278): Selenocysteine
  MOD_RES (316)..(316): Selenocysteine
  MOD_RES (325)..(325): Selenocysteine
  MOD_RES (327)..(327): Selenocysteine
MLEKLEFEDEAVEDSESGVYMRFMRSHKCYDIVPXSSKLVVFDXXLQVKKAFFALVANGVRAAPLWESKKQSFVGMLXIXDFINILHRYYKSPMVQIYELEEHKIEXWRELYLQEXFKPLVNISPDASLFDAVYSLIKNKIHRLPVIDPISGNALYILXHKRILKFLQLFMSDMPKPAFMKQNLDELGIGXYHNIAFIHPDXPIIKALNIFVERRISALPVVDESGKVVDIYSKFDVINLAAEKXYNNLDIXVXQALQHRSQYFEGVVKCNKLEILEXIVDRIVRAEVHRLVVVNEADSIVGIISLSDILQALILXPAGAKQKEXEXE

SEQ ID NO: 21317 - protein, 118 aa, Homo sapiens
  MOD_RES (3)..(3): Selenocysteine
  MOD_RES (5)..(5): Selenocysteine
  MOD_RES (32)..(32): Selenocysteine
  MOD_RES (41)..(41): Selenocysteine
  MOD_RES (84)..(84): Selenocysteine
  MOD_RES (105)..(105): Selenocysteine
MLXIXDFINILHRYYKSPMVQIYELEEHKIEXWRELYLQEXFKPLVNISPDASLFDAVYSLIKNKIHRLPVIDPISGNALYILXHKRILKFLQLFVHQEDGINYXLYKRCLICQSLPS

SEQ ID NO: 21318 - protein, 525 aa, Homo sapiens
  MOD_RES (53)..(53): Selenocysteine
  MOD_RES (60)..(60): Selenocysteine
  MOD_RES (98)..(98): Selenocysteine
  MOD_RES (112)..(112): Selenocysteine
  MOD_RES (121)..(121): Selenocysteine
  MOD_RES (123)..(123): Selenocysteine
  MOD_RES (126)..(126): Selenocysteine
  MOD_RES (130)..(130): Selenocysteine
  MOD_RES (156)..(156): Selenocysteine
  MOD_RES (169)..(169): Selenocysteine
  MOD_RES (177)..(177): Selenocysteine
  MOD_RES (232)..(232): Selenocysteine
  MOD_RES (241)..(242): Selenocysteine
  MOD_RES (275)..(275): Selenocysteine
  MOD_RES (277)..(277): Selenocysteine
  MOD_RES (304)..(304): Selenocysteine
  MOD_RES (313)..(313): Selenocysteine
  MOD_RES (356)..(356): Selenocysteine
  MOD_RES (388)..(388): Selenocysteine
  MOD_RES (399)..(399): Selenocysteine
  MOD_RES (442)..(442): Selenocysteine
  MOD_RES (449)..(449): Selenocysteine
  MOD_RES (451)..(451): Selenocysteine
  MOD_RES (475)..(475): Selenocysteine
  MOD_RES (513)..(513): Selenocysteine
  MOD_RES (522)..(522): Selenocysteine
  MOD_RES (524)..(524): Selenocysteine
MPLLDGDLEGSGKHSSRKVDSPFGPGSPSKGFFSRGPQPRPSSPMSAPVRPKXSPGSPKXVFPFSYQESPPRSPRRMSFSGIFRSSSKESSPNSNPAXSPGGIRFFSRSRKXSGLSSSPSXPXQVXKQHXFPLESYKHEPERLENRIYASSSPPDXGQRFCPSSFQSPXRPPLASPXHYAPSKAAALAAALGPAEAGMLEKLEFEDEAVEDSESGVYMRFMRSHKCYDIVPXSSKLVVFDXXLQVKKAFFALVANGVRAAPLWESKKQSFVGMLXIXDFINILHRYYKSPMVQIYELEEHKIEXWRELYLQEXFKPLVNISPDASLFDAVYSLIKNKIHRLPVIDPISGNALYILXHKRILKFLQLFMSDMPKPAFMKQNLDELGIGXYHNIAFIHPDXPIIKALNIFVERRISALPVVDESGKVVDIYSKFDVINLAAEKXYNNLDIXVXQALQHRSQYFEGVVKCNKLEILEXIVDRIVRAEVHRLVVVNEADSIVGIISLSDILQALILXPAGAKQKEXEXE

SEQ ID NO: 21319 - protein, 100 aa, Homo sapiens
  MOD_RES (12)..(12): Selenocysteine
  MOD_RES (43)..(43): Selenocysteine
  MOD_RES (61)..(61): Selenocysteine
  MOD_RES (83)..(83): Selenocysteine
  MOD_RES (88)..(88): Selenocysteine
  MOD_RES (92)..(93): Selenocysteine
MEPGLEHALRRXPSWSSLGGSEHQEMSFLEQENSSSWPSPAVXSSSERIRGKRRAKALRWXRQKSVEEGEPPGPRSRPAAESXGLEAXFPKXXPLAQADP

SEQ ID NO: 21320 - protein, 353 aa, Homo sapiens
  MOD_RES (12)..(12): Selenocysteine
  MOD_RES (43)..(43): Selenocysteine
  MOD_RES (61)..(61): Selenocysteine
  MOD_RES (87)..(87): Selenocysteine
  MOD_RES (92)..(92): Selenocysteine
  MOD_RES (96)..(97): Selenocysteine
  MOD_RES (109)..(109): Selenocysteine
  MOD_RES (112)..(112): Selenocysteine
  MOD_RES (122)..(122): Selenocysteine
  MOD_RES (130)..(130): Selenocysteine
  MOD_RES (137)..(137): Selenocysteine
  MOD_RES (142)..(142): Selenocysteine
  MOD_RES (192)..(192): Selenocysteine
  MOD_RES (199)..(199): Selenocysteine
  MOD_RES (208)..(208): Selenocysteine
  MOD_RES (242)..(242): Selenocysteine
  MOD_RES (244)..(244): Selenocysteine
  MOD_RES (261)..(261): Selenocysteine
  MOD_RES (283)..(283): Selenocysteine
  MOD_RES (288)..(288): Selenocysteine
  MOD_RES (297)..(297): Selenocysteine
  MOD_RES (302)..(302): Selenocysteine
  MOD_RES (305)..(305): Selenocysteine
  MOD_RES (309)..(309): Selenocysteine
  MOD_RES (317)..(317): Selenocysteine
  MOD_RES (330)..(330): Selenocysteine
  MOD_RES (343)..(343): Selenocysteine
MEPGLEHALRRXPSWSSLGGSEHQEMSFLEQENSSSWPSPAVXSSSERIRGKRRAKALRWXRQKSVEEGEPPGQGEGPRSRPAAESXGLEAXFPKXXPLAQADPAGVGXPPXGWDCLPSDCXASAAGSSXDDVELAXEFPAXEAWECELEGLLEERPALCLSPQAPFPKLGWDDELRKPGAQIYMRFMQEHXCYDAMAXSSKLVIFDXMLEIKKAFFALVANGVRAAPLWDSKKQSFVGMLXIXDFILVLHRYYRSPLRSXCKAASSLWSPSLLMIACLKLSXPSSRXGSIACLFLXRCQAXYSXSSHXNACSSSCXSLVPCCPGPPSSXALSKIWASAHSEXWLWCWRQHPS

SEQ ID NO: 21321 - protein, 489 aa, Homo sapiens
  MOD_RES (12)..(12): Selenocysteine
  MOD_RES (43)..(43): Selenocysteine
  MOD_RES (61)..(61): Selenocysteine
  MOD_RES (87)..(87): Selenocysteine
  MOD_RES (92)..(92): Selenocysteine
  MOD_RES (96)..(97): Selenocysteine
  MOD_RES (109)..(109): Selenocysteine
  MOD_RES (112)..(112): Selenocysteine
  MOD_RES (122)..(122): Selenocysteine
  MOD_RES (130)..(130): Selenocysteine
  MOD_RES (137)..(137): Selenocysteine
  MOD_RES (142)..(142): Selenocysteine
  MOD_RES (192)..(192): Selenocysteine
  MOD_RES (199)..(199): Selenocysteine
  MOD_RES (208)..(208): Selenocysteine
  MOD_RES (242)..(242): Selenocysteine
  MOD_RES (244)..(244): Selenocysteine
  MOD_RES (271)..(271): Selenocysteine
  MOD_RES (299)..(299): Selenocysteine
  MOD_RES (323)..(323): Selenocysteine
  MOD_RES (347)..(347): Selenocysteine
  MOD_RES (355)..(355): Selenocysteine
  MOD_RES (365)..(365): Selenocysteine
  MOD_RES (370)..(370): Selenocysteine
  MOD_RES (409)..(409): Selenocysteine
  MOD_RES (425)..(425): Selenocysteine
  MOD_RES (461)..(461): Selenocysteine
MEPGLEHALRRXPSWSSLGGSEHQEMSFLEQENSSSWPSPAVXSSSERIRGKRRAKALRWXRQKSVEEGEPPGQGEGPRSRPAAESXGLEAXFPKXXPLAQADPAGVGXPPXGWDCLPSDCXASAAGSSXDDVELAXEFPAXEAWECELEGLLEERPALCLSPQAPFPKLGWDDELRKPGAQIYMRFMQEHXCYDAMAXSSKLVIFDXMLEIKKAFFALVANGVRAAPLWDSKKQSFVGMLXIXDFILVLHRYYRSPLVQIYEIEQHKIEXWREIYLQGCFKPLVSISPNDSLFEAVYXLIKNRIHRLPVLDPVSGNVLHILXHKRLLKFLHIFGSLLPRPSFLYRXIQDLGIGXFRDLAVVLEXAPILXALDIFVDRRVSALPVVNECGQVVGLYSRFDVIHLAAQQXYNHLDMSVGEALRQRXLCLEGVLSCQPHESLGEVIDRIAREQVHRLVLVDEXQHLLGVVSLSDILQALVLSPAGIDALGA

SEQ ID NO: 21322 - protein, 46 aa, Homo sapiens
  MOD_RES (6)..(6): Selenocysteine
  MOD_RES (40)..(40): Selenocysteine
MESGSXAASEEARSLRECELYVQKHNIQALLKDSIVQLCXARPERP

SEQ ID NO: 21323 - protein, 65 aa, Homo sapiens
  MOD_RES (6)..(6): Selenocysteine
  MOD_RES (40)..(40): Selenocysteine
MESGSXAASEEARSLRECELYVQKHNIQALLKDSIVQLCXARPERPMAFLREYFERLEKEEAKQI

SEQ ID NO: 21324 - protein, 113 aa, Homo sapiens
  MOD_RES (6)..(6): Selenocysteine
  MOD_RES (40)..(40): Selenocysteine
  MOD_RES (73)..(73): Selenocysteine
  MOD_RES (75)..(75): Selenocysteine
  MOD_RES (106)..(106): Selenocysteine
MESGSXAASEEARSLRECELYVQKHNIQALLKDSIVQLCXARPERPMAFLREYFERLEKEEAKQIQNLQKAGXRXDSREDEISPPPPNPVVKGRRRRGAISAEVYXEEDAASY

SEQ ID NO: 21325 - protein, 131 aa, Homo sapiens
  MOD_RES (6)..(6): Selenocysteine
  MOD_RES (40)..(40): Selenocysteine
  MOD_RES (73)..(73): Selenocysteine
  MOD_RES (75)..(75): Selenocysteine
  MOD_RES (106)..(106): Selenocysteine
  MOD_RES (126)..(126): Selenocysteine
MESGSXAASEEARSLRECELYVQKHNIQALLKDSIVQLCXARPERPMAFLREYFERLEKEEAKQIQNLQKAGXRXDSREDEISPPPPNPVVKGRRRRGAISAEVYXEEDAASYVRKFFSRLYQKIXRQWPL

SEQ ID NO: 21326 - protein, 157 aa, Homo sapiens
  MOD_RES (6)..(6): Selenocysteine
  MOD_RES (40)..(40): Selenocysteine
  MOD_RES (73)..(73): Selenocysteine
  MOD_RES (75)..(75): Selenocysteine
  MOD_RES (106)..(106): Selenocysteine
  MOD_RES (124)..(124): Selenocysteine
MESGSXAASEEARSLRECELYVQKHNIQALLKDSIVQLCXARPERPMAFLREYFERLEKEEAKQIQNLQKAGXRXDSREDEISPPPPNPVVKGRRRRGAISAEVYXEEDAASYVRKVIPKDYKXMAALAKAIEKNVLFSHLDDNERSDIFDAMFSVS

SEQ ID NO: 21327 - protein, 168 aa, Homo sapiens
  MOD_RES (6)..(6): Selenocysteine
  MOD_RES (40)..(40): Selenocysteine
  MOD_RES (73)..(73): Selenocysteine
  MOD_RES (75)..(75): Selenocysteine
  MOD_RES (106)..(106): Selenocysteine
  MOD_RES (124)..(124): Selenocysteine
  MOD_RES (163)..(163): Selenocysteine
MESGSXAASEEARSLRECELYVQKHNIQALLKDSIVQLCXARPERPMAFLREYFERLEKEEAKQIQNLQKAGXRXDSREDEISPPPPNPVVKGRRRRGAISAEVYXEEDAASYVRKVIPKDYKXMAALAKAIEKNVLFSHLDDNERSDIFDAMFSVSFIAGEXVIQQG

SEQ ID NO: 21328 - protein, 182 aa, Homo sapiens
  MOD_RES (6)..(6): Selenocysteine
  MOD_RES (40)..(40): Selenocysteine
  MOD_RES (73)..(73): Selenocysteine
  MOD_RES (75)..(75): Selenocysteine
  MOD_RES (106)..(106): Selenocysteine
  MOD_RES (124)..(124): Selenocysteine
  MOD_RES (163)..(163): Selenocysteine
  MOD_RES (182)..(182): Selenocysteine
MESGSXAASEEARSLRECELYVQKHNIQALLKDSIVQLCXARPERPMAFLREYFERLEKEEAKQIQNLQKAGXRXDSREDEISPPPPNPVVKGRRRRGAISAEVYXEEDAASYVRKVIPKDYKXMAALAKAIEKNVLFSHLDDNERSDIFDAMFSVSFIAGEXVIQQGDEGDNFYVIDQGEX

SEQ ID NO: 21329 - protein, 204 aa, Homo sapiens
  MOD_RES (6)..(6): Selenocysteine
  MOD_RES (40)..(40): Selenocysteine
  MOD_RES (73)..(73): Selenocysteine
  MOD_RES (75)..(75): Selenocysteine
  MOD_RES (106)..(106): Selenocysteine
  MOD_RES (124)..(124): Selenocysteine
  MOD_RES (163)..(163): Selenocysteine
  MOD_RES (182)..(182): Selenocysteine
  MOD_RES (192)..(192): Selenocysteine
MESGSXAASEEARSLRECELYVQKHNIQALLKDSIVQLCXARPERPMAFLREYFERLEKEEAKQIQNLQKAGXRXDSREDEISPPPPNPVVKGRRRRGAISAEVYXEEDAASYVRKVIPKDYKXMAALAKAIEKNVLFSHLDDNERSDIFDAMFSVSFIAGEXVIQQGDEGDNFYVIDQGEXDVYVNNEWAXSVGEGGSFGELA

SEQ ID NO: 21330 - protein, 297 aa, Homo sapiens
  MOD_RES (6)..(6): Selenocysteine
  MOD_RES (40)..(40): Selenocysteine
  MOD_RES (73)..(73): Selenocysteine
  MOD_RES (75)..(75): Selenocysteine
  MOD_RES (106)..(106): Selenocysteine
  MOD_RES (124)..(124): Selenocysteine
  MOD_RES (163)..(163): Selenocysteine
  MOD_RES (182)..(182): Selenocysteine
  MOD_RES (192)..(192): Selenocysteine
  MOD_RES (209)..(209): Selenocysteine
  MOD_RES (214)..(214): Selenocysteine
  MOD_RES (219)..(219): Selenocysteine
  MOD_RES (239)..(239): Selenocysteine
  MOD_RES (266)..(266): Selenocysteine
MESGSXAASEEARSLRECELYVQKHNIQALLKDSIVQLCXARPERPMAFLREYFERLEKEEAKQIQNLQKAGXRXDSREDEISPPPPNPVVKGRRRRGAISAEVYXEEDAASYVRKVIPKDYKXMAALAKAIEKNVLFSHLDDNERSDIFDAMFSVSFIAGEXVIQQGDEGDNFYVIDQGEXDVYVNNEWAXSVGEGGSFGELALIYGXPRAAXVKAKXNVKLWGIDRDSYRRILMGSXLRKRKMYEEFLSKVSILESLDKWERLXVADALEPVQFEDGQKIVVQGEPGDEFFIILE

SEQ ID NO: 21331 - protein, 337 aa, Homo sapiens
  MOD_RES (6)..(6): Selenocysteine
  MOD_RES (40)..(40): Selenocysteine
  MOD_RES (73)..(73): Selenocysteine
  MOD_RES (75)..(75): Selenocysteine
  MOD_RES (106)..(106): Selenocysteine
  MOD_RES (124)..(124): Selenocysteine
  MOD_RES (163)..(163): Selenocysteine
  MOD_RES (182)..(182): Selenocysteine
  MOD_RES (192)..(192): Selenocysteine
  MOD_RES (209)..(209): Selenocysteine
  MOD_RES (214)..(214): Selenocysteine
  MOD_RES (219)..(219): Selenocysteine
  MOD_RES (239)..(239): Selenocysteine
  MOD_RES (266)..(266): Selenocysteine
MESGSXAASEEARSLRECELYVQKHNIQALLKDSIVQLCXARPERPMAFLREYFERLEKEEAKQIQNLQKAGXRXDSREDEISPPPPNPVVKGRRRRGAISAEVYXEEDAASYVRKVIPKDYKXMAALAKAIEKNVLFSHLDDNERSDIFDAMFSVSFIAGEXVIQQGDEGDNFYVIDQGEXDVYVNNEWAXSVGEGGSFGELALIYGXPRAAXVKAKXNVKLWGIDRDSYRRILMGSXLRKRKMYEEFLSKVSILESLDKWERLXVADALEPVQFEDGQKIVVQGEPGDEFFIILEGSAAVLQRRSENEEFVEVGRLGPSDYFGHLIISRRSIPLG

SEQ ID NO: 21332 - protein, 381 aa, Homo sapiens
  MOD_RES (6)..(6): Selenocysteine
  MOD_RES (40)..(40): Selenocysteine
  MOD_RES (73)..(73): Selenocysteine
  MOD_RES (75)..(75): Selenocysteine
  MOD_RES (106)..(106): Selenocysteine
  MOD_RES (124)..(124): Selenocysteine
  MOD_RES (163)..(163): Selenocysteine
  MOD_RES (182)..(182): Selenocysteine
  MOD_RES (192)..(192): Selenocysteine
  MOD_RES (209)..(209): Selenocysteine
  MOD_RES (214)..(214): Selenocysteine
  MOD_RES (219)..(219): Selenocysteine
  MOD_RES (239)..(239): Selenocysteine
  MOD_RES (266)..(266): Selenocysteine
  MOD_RES (338)..(338): Selenocysteine
MESGSXAASEEARSLRECELYVQKHNIQALLKDSIVQLCXARPERPMAFLREYFERLEKEEAKQIQNLQKAGXRXDSREDEISPPPPNPVVKGRRRRGAISAEVYXEEDAASYVRKVIPKDYKXMAALAKAIEKNVLFSHLDDNERSDIFDAMFSVSFIAGEXVIQQGDEGDNFYVIDQGEXDVYVNNEWAXSVGEGGSFGELALIYGXPRAAXVKAKXNVKLWGIDRDSYRRILMGSXLRKRKMYEEFLSKVSILESLDKWERLXVADALEPVQFEDGQKIVVQGEPGDEFFIILEGSAAVLQRRSENEEFVEVGRLGPSDYFGEIALLMNRPRAAXVVARGPLKCVKLDRPRFERVLGPCSDILKRNIQQYNSFVSLSV

SEQ ID NO: 21333 - protein, 124 aa, Homo sapiens
  MOD_RES (6)..(6): Selenocysteine
  MOD_RES (40)..(40): Selenocysteine
  MOD_RES (73)..(73): Selenocysteine
  MOD_RES (85)..(85): Selenocysteine
  MOD_RES (102)..(102): Selenocysteine
  MOD_RES (119)..(119): Selenocysteine
MESGSXAASEEARSLRECELYVQKHNIQALLKDSIVQLCXARPERPMAFLREYFERRRQNRFRICRKQALVQXQGRMRFLLLHPXQWLKVGGDEVLSALRSXRRKMRHPMLERLYQKIXRQWPL

SEQ ID NO: 21334 - protein, 35 aa, Homo sapiens
  MOD_RES (1)..(1): Any amino acid
  MOD_RES (14)..(14): Selenocysteine
XDRDSYRRILMGSXLRKRKMYEEFLSKVSILVGIN

SEQ ID NO: 21335 - protein, 153 aa, Homo sapiens
  MOD_RES (1)..(1): Any amino acid
  MOD_RES (13)..(13): Selenocysteine
  MOD_RES (18)..(18): Selenocysteine
  MOD_RES (23)..(23): Selenocysteine
  MOD_RES (43)..(43): Selenocysteine
  MOD_RES (70)..(70): Selenocysteine
XGSFGELALIYGXPRAAXVKAKXNVKLWGIDRDSYRRILMGSXLRKRKMYEEFLSKVSILESLDKWERLXVADALEPVQFEDGQKIVVQGEPGDEFFIILEGSAAVLQRRSENEEFVEVGRLGPSDYFGMYEFPHNKYMVSLSHLSVRYCSLP

SEQ ID NO: 21336 - protein, 114 aa, Homo sapiens
  MOD_RES (11)..(11): Selenocysteine
  MOD_RES (18)..(18): Selenocysteine
  MOD_RES (38)..(38): Selenocysteine
  MOD_RES (54)..(54): Selenocysteine
  MOD_RES (92)..(92): Selenocysteine
  MOD_RES (102)..(102): Selenocysteine
  MOD_RES (111)..(111): Selenocysteine
MSHIQIPPGLXELLQGYXVEVLRQQPPDLVEFAVEYFXRLREARAPASVLPAAXPRQSLGHPPPEPGPDRVADAKGDSESEEDEDLEVCAEXYNPDEEEEDXDPRVIHPKXDEQ

SEQ ID NO: 21337 - protein, 382 aa, Homo sapiens
  MOD_RES (11)..(11): Selenocysteine
  MOD_RES (18)..(18): Selenocysteine
  MOD_RES (38)..(38): Selenocysteine
  MOD_RES (54)..(54): Selenocysteine
  MOD_RES (104)..(104): Selenocysteine
  MOD_RES (114)..(114): Selenocysteine
  MOD_RES (123)..(123): Selenocysteine
  MOD_RES (183)..(183): Selenocysteine
  MOD_RES (189)..(189): Selenocysteine
  MOD_RES (194)..(194): Selenocysteine
  MOD_RES (215)..(215): Selenocysteine
  MOD_RES (220)..(220): Selenocysteine
  MOD_RES (224)..(224): Selenocysteine
  MOD_RES (236)..(236): Selenocysteine
  MOD_RES (290)..(290): Selenocysteine
  MOD_RES (292)..(292): Selenocysteine
  MOD_RES (321)..(321): Selenocysteine
MSHIQIPPGLXELLQGYXVEVLRQQPPDLVEFAVEYFXRLREARAPASVLPAAXPRQSLGHPPPEPGPDRVADAKGDSESEEDEDLEVPVPSRFNRRVSVCAEXYNPDEEEEDXDPRVIHPKXDEQRCRLQEACKDILLFKNLDQEQLSQVLDAMFERIVKADEHVIDQGDDGDNFYVIERGXYDILVXKDNQXRSVGQYDNRGSFGELALMYNXPRAAXIVAXSEGSLWGLDRVXFRRIIVKNNAKKRKMFESFIESVPLLKSLEVSERMKIVDVIGEKIYKDGERIIXQXKSNKDGGNQEVEIARCHKGQYFGELALVXNKPRAASAYAVGDVKCLVMDVQAFERLLGPCMDIMKRNISHYEEQLVKMFGSSVDLGNLGQ

SEQ ID NO: 21338 - protein, 404 aa, Homo sapiens
  MOD_RES (11)..(11): Selenocysteine
  MOD_RES (18)..(18): Selenocysteine
  MOD_RES (38)..(38): Selenocysteine
  MOD_RES (54)..(54): Selenocysteine
  MOD_RES (104)..(104): Selenocysteine
  MOD_RES (114)..(114): Selenocysteine
  MOD_RES (123)..(123): Selenocysteine
  MOD_RES (183)..(183): Selenocysteine
  MOD_RES (189)..(189): Selenocysteine
  MOD_RES (194)..(194): Selenocysteine
  MOD_RES (215)..(215): Selenocysteine
  MOD_RES (220)..(220): Selenocysteine
  MOD_RES (224)..(224): Selenocysteine
  MOD_RES (236)..(236): Selenocysteine
  MOD_RES (290)..(290): Selenocysteine
  MOD_RES (314)..(314): Selenocysteine
  MOD_RES (343)..(343): Selenocysteine
MSHIQIPPGLXELLQGYXVEVLRQQPPDLVEFAVEYFXRLREARAPASVLPAAXPRQSLGHPPPEPGPDRVADAKGDSESEEDEDLEVPVPSRFNRRVSVCAEXYNPDEEEEDXDPRVIHPKXDEQRCRLQEACKDILLFKNLDQEQLSQVLDAMFERIVKADEHVIDQGDDGDNFYVIERGXYDILVXKDNQXRSVGQYDNRGSFGELALMYNXPRAAXIVAXSEGSLWGLDRVXFRRIIVKNNAKKRKMFESFIESVPLLKSLEVSERMKIVDVIGEKIYKDGERIIXQGEKADSFYIIESGEVSILIRSRXKSNKDGGNQEVEIARCHKGQYFGELALVXNKPRAASAYAVGDVKCLVMDVQAFERLLGPCMDIMKRNISHYEEQLVKMFGSSVDLGNLGQ

SEQ ID NO: 21339 - protein, 99 aa, Homo sapiens
  MOD_RES (1)..(1): Any amino acid
  MOD_RES (5)..(5): Selenocysteine
  MOD_RES (59)..(59): Selenocysteine
  MOD_RES (98)..(98): Selenocysteine
XDRVXFRRIIVKNNAKKRKMFESFIESVPLLKSLEVSERMKIVDVIGEKIYKDGERIIXQGEKADSFYIIESGEVSILIRSRLWMYKHSRGFWGPAWXS

SEQ ID NO: 21340 - protein, 200 aa, Homo sapiens
  MOD_RES (1)..(1): Any amino acid
  MOD_RES (3)..(3): Selenocysteine
  MOD_RES (12)..(12): Selenocysteine
  MOD_RES (72)..(72): Selenocysteine
  MOD_RES (78)..(78): Selenocysteine
  MOD_RES (83)..(83): Selenocysteine
  MOD_RES (104)..(104): Selenocysteine
  MOD_RES (109)..(109): Selenocysteine
  MOD_RES (113)..(113): Selenocysteine
  MOD_RES (125)..(125): Selenocysteine
  MOD_RES (180)..(180): Selenocysteine
  MOD_RES (182)..(182): Selenocysteine
  MOD_RES (191)..(191): Selenocysteine
XDXDPRVIHPKXDEQRCRLQEACKDILLFKNLDQEQLSQVLDAMFERIVKADEHVIDQGDDGDNFYVIERGXYDILVXKDNQXRSVGQYDNRGSFGELALMYNXPRAAXIVAXSEGSLWGLDRVXFRRIIVKNNAKKRKMFESFIESVPLLKSLEDGQRFNPHLHFASEGPFIRPLVKIXPXQFLYLWFKXACLSNNLSA

SEQ ID NO: 21341 - protein, 92 aa, Homo sapiens
  MOD_RES (1)..(1): Any amino acid
  MOD_RES (2)..(2): Selenocysteine
  MOD_RES (31)..(31): Selenocysteine
XXKSNKDGGNQEVEIARCHKGQYFGELALVXNKPRAASAYAVGDVKCLVMDVQAFERLLGPCMDIMKRNISHYEEQLVKMFGSSVDLGNLGQ

SEQ ID NO: 21342 - protein, 418 aa, Homo sapiens
  MOD_RES (10)..(10): Selenocysteine
  MOD_RES (17)..(17): Selenocysteine
  MOD_RES (37)..(37): Selenocysteine
  MOD_RES (48)..(48): Selenocysteine
  MOD_RES (57)..(57): Selenocysteine
  MOD_RES (69)..(69): Selenocysteine
  MOD_RES (110)..(110): Selenocysteine
  MOD_RES (138)..(138): Selenocysteine
  MOD_RES (198)..(198): Selenocysteine
  MOD_RES (230)..(230): Selenocysteine
  MOD_RES (235)..(235): Selenocysteine
  MOD_RES (237)..(237): Selenocysteine
  MOD_RES (239)..(239): Selenocysteine
  MOD_RES (251)..(251): Selenocysteine
  MOD_RES (294)..(294): Selenocysteine
  MOD_RES (324)..(324): Selenocysteine
  MOD_RES (357)..(357): Selenocysteine
  MOD_RES (370)..(370): Selenocysteine
  MOD_RES (398)..(398): Selenocysteine
  MOD_RES (409)..(409): Selenocysteine
  MOD_RES (417)..(417): Selenocysteine
MSIEIPAGLXELLQGFXVEVLRHQPADLLEFALQHFXRLQQENERKGXARFGHEGRXWGDLGAAAGGGXPSKGVNFAEEPMQSDSEDGEEEEAAPADAGAFNAPVINRFXRRASVCAEAYNPDEEEDDAESRIIHPKXDDQRNRLQEACKDILLFKNLDPEQMSQVLDAMFEKLVKDGEHVIDQGDDGDNFYVIDRGXFDIYVKCDGVGRCVGNYDNRGSFGELALMYNXPRAAXIXAXSPGALWGLDRVXFRRIIVKNNAKKRKMYESFIESLPFLKSLEFSERLKVVDVIGXKVYNDGEQIIAQGDSADSFFIVESGEVKIXMKRKGKSEVEENGAVEIARCSRGQYFGELALVXNKPRAASAHAIGXVKCLAMDVQAFERLLGPCMEIMKRNIAXYEEQLVALFGXNMDIVEPXA

SEQ ID NO: 21343 - protein, 308 aa, Homo sapiens
  MOD_RES (11)..(11): Selenocysteine
  MOD_RES (48)..(48): Selenocysteine
  MOD_RES (54)..(54): Selenocysteine
  MOD_RES (83)..(83): Selenocysteine
  MOD_RES (95)..(95): Selenocysteine
  MOD_RES (108)..(108): Selenocysteine
  MOD_RES (113)..(113): Selenocysteine
  MOD_RES (134)..(134): Selenocysteine
  MOD_RES (156)..(156): Selenocysteine
  MOD_RES (176)..(176): Selenocysteine
  MOD_RES (212)..(212): Selenocysteine
  MOD_RES (214)..(214): Selenocysteine
  MOD_RES (218)..(218): Selenocysteine
  MOD_RES (228)..(228): Selenocysteine
  MOD_RES (250)..(251): Selenocysteine
MADVFPGNDSXASQDVANRFARKGALRQKNVHEVKDHKFIARFFKQPXFCSHCXDFIWGFGKQGFQCQVCCFVVHKRCHEFVXFSCPGADKGPDXDDPRSKHKFKIHXYGSPXFCDHCGSLLYGLIHQGMKCDXCDMNVHKQCVINVPSLCGMDHXEKRGRIYLKAEVADEKLHVXVRDAKNLIPMDPNGLSDPYVKLKLIPDPKNESKQKXKXIRSXLNPQWNESFXFKLKPSDKDRRLSVEIWDWDRXXRNDFMGSLSFGVSELMKMPASGWYKLLNQEEGEYYNVPIPEGDEEGNMELRQKFEWR

SEQ ID NO: 21344 - protein, 672 aa, Homo sapiens
  MOD_RES (11)..(11): Selenocysteine
  MOD_RES (48)..(48): Selenocysteine
  MOD_RES (54)..(54): Selenocysteine
  MOD_RES (83)..(83): Selenocysteine
  MOD_RES (95)..(95): Selenocysteine
  MOD_RES (108)..(108): Selenocysteine
  MOD_RES (113)..(113): Selenocysteine
  MOD_RES (134)..(134): Selenocysteine
  MOD_RES (156)..(156): Selenocysteine
  MOD_RES (176)..(176): Selenocysteine
  MOD_RES (212)..(212): Selenocysteine
  MOD_RES (214)..(214): Selenocysteine
  MOD_RES (218)..(218): Selenocysteine
  MOD_RES (228)..(228): Selenocysteine
  MOD_RES (250)..(251): Selenocysteine
  MOD_RES (337)..(337): Selenocysteine
  MOD_RES (361)..(361): Selenocysteine
  MOD_RES (384)..(384): Selenocysteine
  MOD_RES (401)..(401): Selenocysteine
  MOD_RES (409)..(409): Selenocysteine
  MOD_RES (494)..(495): Selenocysteine
  MOD_RES (497)..(497): Selenocysteine
  MOD_RES (501)..(501): Selenocysteine
  MOD_RES (574)..(574): Selenocysteine
  MOD_RES (631)..(631): Selenocysteine
  MOD_RES (638)..(638): Selenocysteine
MADVFPGNDSXASQDVANRFARKGALRQKNVHEVKDHKFIARFFKQPXFCSHCXDFIWGFGKQGFQCQVCCFVVHKRCHEFVXFSCPGADKGPDXDDPRSKHKFKIHXYGSPXFCDHCGSLLYGLIHQGMKCDXCDMNVHKQCVINVPSLCGMDHXEKRGRIYLKAEVADEKLHVXVRDAKNLIPMDPNGLSDPYVKLKLIPDPKNESKQKXKXIRSXLNPQWNESFXFKLKPSDKDRRLSVEIWDWDRXXRNDFMGSLSFGVSELMKMPASGWYKLLNQEEGEYYNVPIPEGDEEGNMELRQKFEKAKLGPAGNKVISPSEDRKQPSNNLDRVKLXDFNFLMVLGKGSFGKVMLADRKGXEELYAIKILKKDVVIQDDDVECXMVEKRVLALLDKPPFLXQLHSCFQXVDRLYFVMEYVNGGDLMYHIQQVGKFKEPQAVFYAAEISIGLFFLHKRGIIYRDLKLDNVMLDSEGHIKIADFGMCKEHMMDGVXXRXFCGXPDYIAPEIIAYQPYGKSVDWWAYGVLLYEMLAGQPPFDGEDEDELFQSIMEHNVSYPKSLSKEAVSVCKGLMXKHPAKRLGCGPEGERDVREHAFFRRIDWEKLENREIQPPFKPKVCGKGAENFDKFFXRGQPVLXPPDQLVIANIDQSDFEGFSYVNPQFVHPILQSAV

SEQ ID NO: 21345 - protein, 150 aa, Homo sapiens
  MOD_RES (1)..(1): Any amino acid
  MOD_RES (9)..(9): Selenocysteine
  MOD_RES (46)..(46): Selenocysteine
  MOD_RES (52)..(52): Selenocysteine
  MOD_RES (81)..(81): Selenocysteine
  MOD_RES (93)..(93): Selenocysteine
  MOD_RES (139)..(139): Selenocysteine
  MOD_RES (143)..(143): Selenocysteine
XVFPGNDSXASQDVANRFARKGALRQKNVHEVKDHKFIARFFKQPXFCSHCXDFIWGFGKQGFQCQVCCFVVHKRCHEFVXFSCPGADKGPDXDLFSPVLLVCLYLLRSYSLSEGPQEQAQVQNPHLRKPHLLRSLWVXALWXYPSRDEM

SEQ ID NO: 21346 - protein, 57 aa, Homo sapiens
  MOD_RES (17)..(17): Selenocysteine
  MOD_RES (40)..(40): Selenocysteine
  MOD_RES (48)..(48): Selenocysteine
  MOD_RES (54)..(54): Selenocysteine
MADPAAGPPPSEGEESXVRFARKGALRQKNVHEVKNHKFXARFFKQPXFCSHCXDFI

SEQ ID NO: 21347 - protein, 671 aa, Homo sapiens
  MOD_RES (17)..(17): Selenocysteine
  MOD_RES (40)..(40): Selenocysteine
  MOD_RES (48)..(48): Selenocysteine
  MOD_RES (54)..(54): Selenocysteine
  MOD_RES (83)..(83): Selenocysteine
  MOD_RES (108)..(108): Selenocysteine
  MOD_RES (113)..(113): Selenocysteine
  MOD_RES (134)..(134): Selenocysteine
  MOD_RES (153)..(153): Selenocysteine
  MOD_RES (156)..(156): Selenocysteine
  MOD_RES (212)..(212): Selenocysteine
  MOD_RES (214)..(214): Selenocysteine
  MOD_RES (226)..(226): Selenocysteine
  MOD_RES (250)..(250): Selenocysteine
  MOD_RES (314)..(314): Selenocysteine
  MOD_RES (321)..(322): Selenocysteine
  MOD_RES (324)..(324): Selenocysteine
  MOD_RES (340)..(340): Selenocysteine
  MOD_RES (364)..(364): Selenocysteine
  MOD_RES (387)..(387): Selenocysteine
  MOD_RES (404)..(404): Selenocysteine
  MOD_RES (412)..(412): Selenocysteine
  MOD_RES (497)..(498): Selenocysteine
  MOD_RES (500)..(500): Selenocysteine
  MOD_RES (504)..(504): Selenocysteine
  MOD_RES (577)..(577): Selenocysteine
  MOD_RES (627)..(627): Selenocysteine
  MOD_RES (635)..(635): Selenocysteine
  MOD_RES (642)..(642): Selenocysteine
  MOD_RES (644)..(644): Selenocysteine
  MOD_RES (663)..(663): Selenocysteine
MADPAAGPPPSEGEESXVRFARKGALRQKNVHEVKNHKFXARFFKQPXFCSHCXDFIWGFGKQGFQCQVCCFVVHKRCHEFVXFSCPGADKGPASDDPRSKHKFKIHXYSSPXFCDHCGSLLYGLIHQGMKCDXCMMNVHKRCVMNVPSLCGXDHXERRGRIYIQAHIDRDVLIVLVRDAKNLVPMDPNGLSDPYVKLKLIPDPKSESKQKXKXIKCSLNPEWNEXFRFQLKESDKDRRLSVEIWDWDLXSRNDFMGSLSFGISELQKASVDGWFKLLSQEEGEYFNVPVPPEGSEANEELRQKFERAKISQGXKVPEEKXXNXVSKFDNNGNRDRMKLXDFNFLMVLGKGSFGKVMLSERKGXDELYAVKILKKDVVIQDDDVECXMVEKRVLALPGKPPFLXQLHSCFQXMDRLYFVMEYVNGGDLMYHIQQVGRFKEPHAVFYAAEIAIGLFFLQSKGIIYRDLKLDNVMLDSEGHIKIADFGMCKENIWDGVXXKXFCGXPDYIAPEIIAYQPYGKSVDWWAFGVLLYEMLAGQAPFEGEDEDELFQSIMEHNVAYPKSMSKEAVAICKGLMXKHPGKRLGCGPEGERDIKEHAFFRYIDWEKLERKEIQPPYKPKARDKRDXSNFDKEFXRQPVELXPXDKLFIMNLDQNEFAGFSYXNPEFVINV

SEQ ID NO: 21348 - protein, 673 aa, Homo sapiens
  MOD_RES (17)..(17): Selenocysteine
  MOD_RES (40)..(40): Selenocysteine
  MOD_RES (48)..(48): Selenocysteine
  MOD_RES (54)..(54): Selenocysteine
  MOD_RES (83)..(83): Selenocysteine
  MOD_RES (108)..(108): Selenocysteine
  MOD_RES (113)..(113): Selenocysteine
  MOD_RES (134)..(134): Selenocysteine
  MOD_RES (153)..(153): Selenocysteine
  MOD_RES (156)..(156): Selenocysteine
  MOD_RES (212)..(212): Selenocysteine
  MOD_RES (214)..(214): Selenocysteine
  MOD_RES (226)..(226): Selenocysteine
  MOD_RES (250)..(250): Selenocysteine
  MOD_RES (314)..(314): Selenocysteine
  MOD_RES (321)..(322): Selenocysteine
  MOD_RES (324)..(324): Selenocysteine
  MOD_RES (340)..(340): Selenocysteine
  MOD_RES (364)..(364): Selenocysteine
  MOD_RES (387)..(387): Selenocysteine
  MOD_RES (404)..(404): Selenocysteine
  MOD_RES (412)..(412): Selenocysteine
  MOD_RES (497)..(498): Selenocysteine
  MOD_RES (500)..(500): Selenocysteine
  MOD_RES (504)..(504): Selenocysteine
  MOD_RES (577)..(577): Selenocysteine
  MOD_RES (634)..(634): Selenocysteine
  MOD_RES (641)..(641): Selenocysteine
MADPAAGPPPSEGEESXVRFARKGALRQKNVHEVKNHKFXARFFKQPXFCSHCXDFIWGFGKQGFQCQVCCFVVHKRCHEFVXFSCPGADKGPASDDPRSKHKFKIHXYSSPXFCDHCGSLLYGLIHQGMKCDXCMMNVHKRCVMNVPSLCGXDHXERRGRIYIQAHIDRDVLIVLVRDAKNLVPMDPNGLSDPYVKLKLIPDPKSESKQKXKXIKCSLNPEWNEXFRFQLKESDKDRRLSVEIWDWDLXSRNDFMGSLSFGISELQKASVDGWFKLLSQEEGEYFNVPVPPEGSEANEELRQKFERAKISQGXKVPEEKXXNXVSKFDNNGNRDRMKLXDFNFLMVLGKGSFGKVMLSERKGXDELYAVKILKKDVVIQDDDVECXMVEKRVLALPGKPPFLXQLHSCFQXMDRLYFVMEYVNGGDLMYHIQQVGRFKEPHAVFYAAEIAIGLFFLQSKGIIYRDLKLDNVMLDSEGHIKIADFGMCKENIWDGVXXKXFCGXPDYIAPEIIAYQPYGKSVDWWAFGVLLYEMLAGQAPFEGEDEDELFQSIMEHNVAYPKSMSKEAVAICKGLMXKHPGKRLGCGPEGERDIKEHAFFRYIDWEKLERKEIQPPYKPKACGRNAENFDRFFXRHPPVLXPPDQEVIRNIDQSEFEGFSFVNSEFLKPEVKS

SEQ ID NO: 21349 - protein, 119 aa, Homo sapiens
  MOD_RES (27)..(27): Selenocysteine
  MOD_RES (29)..(29): Selenocysteine
  MOD_RES (41)..(41): Selenocysteine
  MOD_RES (65)..(65): Selenocysteine
MDPNGLSDPYVKLKLIPDPKSESKQKXKXIKCSLNPEWNEXFRFQLKESDKDRRLSVEIWDWDLXSRNDFMGSLSFGISELQKASVDGWFKLLSQEEGEYFNVPVPPEGSEANEELRQK

SEQ ID NO: 21350 - protein, 130 aa, Homo sapiens
  MOD_RES (11)..(11): Selenocysteine
  MOD_RES (34)..(34): Selenocysteine
  MOD_RES (51)..(51): Selenocysteine
  MOD_RES (59)..(59): Selenocysteine
MGVMLSERKGXDELYAVKILKKDVVIQDDDVECXMVEKRVLALPGKPPFLXQLHSCFQXMDRLYFVMEYVNGGDLMYHIQQVGRFKEPHAVFYAAEIAIGLFFLQSKGIIYRDLKLDNVMLDSEGHIKIA

SEQ ID NO: 21351 - protein, 122 aa, Homo sapiens
  MOD_RES (1)..(1): Any amino acid
  MOD_RES (16)..(16): Selenocysteine
  MOD_RES (68)..(68): Selenocysteine
  MOD_RES (74)..(74): Selenocysteine
  MOD_RES (105)..(105): Selenocysteine
  MOD_RES (116)..(116): Selenocysteine
XSMSKEAVAICKGLMXKHPGKRLGCGPEGERDIKEHAFFRYIDWEKLERKEIQPPYKPKAVSSPFSLXAGYSHXRYSCLCLMFSKCSLRGRRQCVYWNMGVCIHXYAQNHWLLRWXFSIGPA

SEQ ID NO: 21352 - protein, 77 aa, Homo sapiens
  MOD_RES (38)..(38): Selenocysteine
  MOD_RES (43)..(43): Selenocysteine
  MOD_RES (50)..(50): Selenocysteine
  MOD_RES (58)..(58): Selenocysteine
MAPFLRIAFNSYELGSLQAEDEANQPFCAVKMKEALSXERGKXLVQKKPXMYPEWKSXFDAHIYEGRVIQIVLMRAA

SEQ ID NO: 21353 - protein, 125 aa, Homo sapiens
  MOD_RES (38)..(38): Selenocysteine
  MOD_RES (43)..(43): Selenocysteine
  MOD_RES (50)..(50): Selenocysteine
  MOD_RES (58)..(58): Selenocysteine
  MOD_RES (85)..(85): Selenocysteine
MAPFLRIAFNSYELGSLQAEDEANQPFCAVKMKEALSXERGKXLVQKKPXMYPEWKSXFDAHIYEGRVIQIVLMRAAEEPVSEVXVGVSVLAERCKKNNGKAEFWLDLQPQAKVLMSVQYFLEDV

SEQ ID NO: 21354 - protein, 223 aa, Homo sapiens
  MOD_RES (38)..(38): Selenocysteine
  MOD_RES (43)..(43): Selenocysteine
  MOD_RES (50)..(50): Selenocysteine
  MOD_RES (58)..(58): Selenocysteine
  MOD_RES (85)..(85): Selenocysteine
  MOD_RES (141)..(141): Selenocysteine
  MOD_RES (164)..(164): Selenocysteine
  MOD_RES (170)..(170): Selenocysteine
  MOD_RES (223)..(223): Selenocysteine
MAPFLRIAFNSYELGSLQAEDEANQPFCAVKMKEALSXERGKXLVQKKPXMYPEWKSXFDAHIYEGRVIQIVLMRAAEEPVSEVXVGVSVLAERCKKNNGKAEFWLDLQPQAKVLMSVQYFLEDVDCKQSMRSEDEAKFPXMNRRGAIKQAKIHYIKNHEFIAXFFGQPXFCSVCKDFVWGLNKQGYKCRHCGMNVHHKCREKVANLCGINQKLLAEALNQVX

SEQ ID NO: 21355 - protein, 676 aa, Homo sapiens
  MOD_RES (38)..(38): Selenocysteine
  MOD_RES (43)..(43): Selenocysteine
  MOD_RES (50)..(50): Selenocysteine
  MOD_RES (58)..(58): Selenocysteine
  MOD_RES (85)..(85): Selenocysteine
  MOD_RES (141)..(141): Selenocysteine
  MOD_RES (164)..(164): Selenocysteine
  MOD_RES (170)..(170): Selenocysteine
  MOD_RES (209)..(209): Selenocysteine
  MOD_RES (211)..(211): Selenocysteine
  MOD_RES (218)..(218): Selenocysteine
  MOD_RES (242)..(242): Selenocysteine
  MOD_RES (295)..(295): Selenocysteine
  MOD_RES (320)..(320): Selenocysteine
  MOD_RES (333)..(333): Selenocysteine
  MOD_RES (394)..(394): Selenocysteine
  MOD_RES (402)..(402): Selenocysteine
  MOD_RES (411)..(411): Selenocysteine
  MOD_RES (416)..(416): Selenocysteine
  MOD_RES (419)..(419): Selenocysteine
  MOD_RES (451)..(451): Selenocysteine
  MOD_RES (507)..(507): Selenocysteine
  MOD_RES (511)..(511): Selenocysteine
  MOD_RES (526)..(526): Selenocysteine
  MOD_RES (564)..(564): Selenocysteine
  MOD_RES (572)..(572): Selenocysteine
  MOD_RES (588)..(588): Selenocysteine
  MOD_RES (594)..(594): Selenocysteine
  MOD_RES (605)..(605): Selenocysteine
  MOD_RES (609)..(609): Selenocysteine
MAPFLRIAFNSYELGSLQAEDEANQPFCAVKMKEALSXERGKXLVQKKPXMYPEWKSXFDAHIYEGRVIQIVLMRAAEEPVSEVXVGVSVLAERCKKNNGKAEFWLDLQPQAKVLMSVQYFLEDVDCKQSMRSEDEAKFPXMNRRGAIKQAKIHYIKNHEFIAXFFGQPXFCSVCKDFVWGLNKQGYKCRQCNAAIHKKCIDKIIGRCXGXAANSRDXIFQKERFNIDMPHRFKVHNYMSPXFCDHCGSLLWGLVKQGLKCEDCGMNVHHKCREKVANLCGINQKLLAEALNQVXQRASRRSDSASSEPVGIYQGFEKKXGVAGEDMQDNSGXYGKIWEGSSKCNINNFIFHKVLGKGSFGKVLLGELKGRGEYFAIKALKKDVVLIDDDVECXMVEKRVLXLAAENPFLXHLICXFQXKDHLFFVMEFLNGGDLMYHIQDKGRFELYRAXFYAAEIMCGLQFLHSKGIIYRDLKLDNVLLDRDGHIKIADFGMCKENIFGESRASXFCGXPDYIAPEILQGLKYXFSVDWWSFGVLLYEMLIGQSPFHGDDEDELFESIRVDXPHYPRWIXKESKDILEKLFEREPXKRLGVXGNIKIHPFFKXINWXLLEKRRLEPPFRPKVKSPRDYSNFDQEFLNEKARLSYSDKNLIDSMDQSAFAGFSFVNPKFEHLLED

SEQ ID NO: 21356 - protein, 293 aa, Homo sapiens
  MOD_RES (24)..(24): Selenocysteine
  MOD_RES (27)..(27): Selenocysteine
  MOD_RES (38)..(38): Selenocysteine
  MOD_RES (73)..(74): Selenocysteine
  MOD_RES (77)..(77): Selenocysteine
  MOD_RES (132)..(132): Selenocysteine
  MOD_RES (140)..(140): Selenocysteine
  MOD_RES (156)..(156): Selenocysteine
  MOD_RES (213)..(213): Selenocysteine
  MOD_RES (237)..(237): Selenocysteine
  MOD_RES (263)..(263): Selenocysteine
  MOD_RES (272)..(272): Selenocysteine
MRESALERGPVPEAPAGGPVHAVXVVXLLEKLASMLEXLRERQGGLARRQGGLAGSVRRIQSGLGALSRSHDXXSNXLAQLLAKAERVSSHANAAQERAVRRAAQVQRLEANHGLLVARGKLHVLLFKASPXLQRFAVRXQLSLPLPSHACLSPQXLAAEEEGEVPASAFQKAPEPLGPADQSELGPEQLEAEVGESSDEEPVESRAQRLRRXGLQKVQSLRRALSGRKGPAAPPPXPVKPPRLGPGRSAEAQPEAQPALEPXLEPEPPQDXEEDPGRPGAAEEALLQMESVA

SEQ ID NO: 21357 - protein, 261 aa, Homo sapiens
  MOD_RES (24)..(24): Selenocysteine
  MOD_RES (27)..(27): Selenocysteine
  MOD_RES (38)..(38): Selenocysteine
  MOD_RES (73)..(74): Selenocysteine
  MOD_RES (77)..(77): Selenocysteine
  MOD_RES (181)..(181): Selenocysteine
  MOD_RES (205)..(205): Selenocysteine
  MOD_RES (231)..(231): Selenocysteine
  MOD_RES (240)..(240): Selenocysteine
MRESALERGPVPEAPAGGPVHAVXVVXLLEKLASMLEXLRERQGGLARRQGGLAGSVRRIQSGLGALSRSHDXXSNXLAQLLAKAERVSSHANAAQERAVRRAAQVQRLEANHGLLVARGKLHVLLFKEEGEVPASAFQKAPEPLGPADQSELGPEQLEAEVGESSDEEPVESRAQRLRRXGLQKVQSLRRALSGRKGPAAPPPXPVKPPRLGPGRSAEAQPEAQPALEPXLEPEPPQDXEEDPGRPGAAEEALLQMESVA

SEQ ID NO: 21358 - protein, 219 aa, Homo sapiens
  MOD_RES (9)..(9): Selenocysteine
  MOD_RES (32)..(32): Selenocysteine
  MOD_RES (37)..(37): Selenocysteine
  MOD_RES (72)..(72): Selenocysteine
  MOD_RES (176)..(176): Selenocysteine
  MOD_RES (178)..(178): Selenocysteine
  MOD_RES (193)..(193): Selenocysteine
  MOD_RES (201)..(201): Selenocysteine
  MOD_RES (204)..(204): Selenocysteine
MNVHRRCEXNVAPNCGVDARGIAKVLADLGVXPDKIXNSGQRRKKLIAGAESPQPASGSSPSEEDRSKSAPXSPCDQEIKELENNIRKALSFDNRGEEHRAASSPDGQLMSPGENGEVRQGQAKRLGLDEFNFIKVLGKGSFGKVMLAELKGKDEVYAVKVLKKDVILQDDDVDCXMXEKRILALARKHPYLXQLYCCFQXKGXGFSIQGCACEGMREL

SEQ ID NO: 21359 - protein, 127 aa, Homo sapiens
  MOD_RES (21)..(21): Selenocysteine
  MOD_RES (35)..(35): Selenocysteine
  MOD_RES (54)..(54): Selenocysteine
  MOD_RES (56)..(56): Selenocysteine
  MOD_RES (60)..(60): Selenocysteine
  MOD_RES (71)..(71): Selenocysteine
  MOD_RES (99)..(99): Selenocysteine
MVVFNGLLKIKICEAVSLKPXAWSLRHAVGPRPQXFLLDPYIALNVDDSRIGQXAXKQKXNSPAWHDEFVXDVCNGRKIELAVFHDAPIGYDDFVANCXIQFEELLQNGSRHFEDWIDLEPEGRVYV

SEQ ID NO: 21360 - protein, 737 aa, Homo sapiens
  MOD_RES (21)..(21): Selenocysteine
  MOD_RES (35)..(35): Selenocysteine
  MOD_RES (54)..(54): Selenocysteine
  MOD_RES (56)..(56): Selenocysteine
  MOD_RES (60)..(60): Selenocysteine
  MOD_RES (71)..(71): Selenocysteine
  MOD_RES (99)..(99): Selenocysteine
  MOD_RES (175)..(175): Selenocysteine
  MOD_RES (181)..(181): Selenocysteine
  MOD_RES (205)..(205): Selenocysteine
  MOD_RES (218)..(218): Selenocysteine
  MOD_RES (228)..(228): Selenocysteine
  MOD_RES (254)..(254): Selenocysteine
  MOD_RES (286)..(286): Selenocysteine
  MOD_RES (309)..(309): Selenocysteine
  MOD_RES (314)..(314): Selenocysteine
  MOD_RES (349)..(349): Selenocysteine
  MOD_RES (453)..(453): Selenocysteine
  MOD_RES (455)..(455): Selenocysteine
  MOD_RES (470)..(470): Selenocysteine
  MOD_RES (478)..(478): Selenocysteine
  MOD_RES (517)..(517): Selenocysteine
  MOD_RES (563)..(566): Selenocysteine
  MOD_RES (570)..(570): Selenocysteine
  MOD_RES (643)..(643): Selenocysteine
  MOD_RES (691)..(691): Selenocysteine
  MOD_RES (703)..(703): Selenocysteine
  MOD_RES (710)..(710): Selenocysteine
MVVFNGLLKIKICEAVSLKPXAWSLRHAVGPRPQXFLLDPYIALNVDDSRIGQXAXKQKXNSPAWHDEFVXDVCNGRKIELAVFHDAPIGYDDFVANCXIQFEELLQNGSRHFEDWIDLEPEGRVYVIIDLSGSSGEAPKDNEERVFRERMRPRKRQGAVRRRVHQVNGHKFMAXYLRQPXYCSHCRDFIWGVIGKQGYQCQVCXCVVHKRCHELIIXKCAGLKKQEXPDQVGSQRFSVNMPHKFGIHNYKVPXFCDHCGSLLWGLLRQGLQCKVCKMNVHRRCEXNVAPNCGVDARGIAKVLADLGVXPDKIXNSGQRRKKLIAGAESPQPASGSSPSEEDRSKSAPXSPCDQEIKELENNIRKALSFDNRGEEHRAASSPDGQLMSPGENGEVRQGQAKRLGLDEFNFIKVLGKGSFGKVMLAELKGKDEVYAVKVLKKDVILQDDDVDCXMXEKRILALARKHPYLXQLYCCFQXKDRLFFVMEYVNGGDLMFQIQRSRKFDEPRSRFYAAEVXSALMFLHQHGVIYRDLKLDNILLDAEGHCKLADFGMCKEGILNGVXXXXFCGXPDYIAPEILQELEYGPSVDWWALGVLMYEMMAGQPPFEADNEDDLFESILHDDVLYPVWLSKEAVSILKAFMXKNPHKRLGCVASQNGEDAIKQHPFFKEIDWVLLEQKKIKPPFKPRIKXKRDVNNFDQDFXREEPVLXLVDEAIVKQINQEEFKGFSYFGEDLMP

SEQ ID NO: 21361 - protein, 697 aa, Homo sapiens
  MOD_RES (39)..(39): Selenocysteine
  MOD_RES (47)..(47): Selenocysteine
  MOD_RES (53)..(53): Selenocysteine
  MOD_RES (82)..(82): Selenocysteine
  MOD_RES (94)..(94): Selenocysteine
  MOD_RES (112)..(112): Selenocysteine
  MOD_RES (155)..(155): Selenocysteine
  MOD_RES (169)..(169): Selenocysteine
  MOD_RES (176)..(176): Selenocysteine
  MOD_RES (208)..(208): Selenocysteine
  MOD_RES (212)..(212): Selenocysteine
  MOD_RES (214)..(214): Selenocysteine
  MOD_RES (218)..(218): Selenocysteine
  MOD_RES (226)..(226): Selenocysteine
  MOD_RES (250)..(250): Selenocysteine
  MOD_RES (332)..(332): Selenocysteine
  MOD_RES (396)..(396): Selenocysteine
  MOD_RES (418)..(418): Selenocysteine
  MOD_RES (423)..(423): Selenocysteine
  MOD_RES (426)..(426): Selenocysteine
  MOD_RES (438)..(438): Selenocysteine
  MOD_RES (497)..(497): Selenocysteine
  MOD_RES (510)..(512): Selenocysteine
  MOD_RES (514)..(514): Selenocysteine
  MOD_RES (518)..(518): Selenocysteine
  MOD_RES (571)..(571): Selenocysteine
  MOD_RES (573)..(573): Selenocysteine
  MOD_RES (591)..(591): Selenocysteine
  MOD_RES (607)..(607): Selenocysteine
  MOD_RES (648)..(648): Selenocysteine
  MOD_RES (655)..(655): Selenocysteine
  MOD_RES (674)..(674): Selenocysteine
  MOD_RES (689)..(689): Selenocysteine
MAGLGPGVGDSEGGPRPLFCRKGALRQKVVHEVKSHKFXARFFKQPXFCSHCXDFIWGIGKQGLQCQVCSFVVHRRCHEFVXFECPGAGKGPQXDDPRNKHKFRLHSYSSPXFCDHCGSLLYGLVHQGMKCSCCEMNVHRRCVRSVPSLCGVDHXERRGRLQLEIRAPXADEIHVXVGEARNLIPMDPNGLSDPYVKLKLIPDPRNLXKQKXRXVKAXLNPVWNEXFVFNLKPGDVERRLSVEVWDWDRXSRNDFMGAMSFGVSELLKAPVDGWYKLLNQEEGEYYNVPVADADNCSLLQKFEACNYPLELYERVRMGPSSSPIPSPSPSPXDPKRCFFGASPGRLHISDFSFLMVLGKGSFGKVMLAERRGSDELYAIKILKKDVIVQDDDVDCXLVEKRVLALGGRGPGGRPHFLXQLHSXFQXPDRLYFVMEYVXGGDLMYHIQQLGKFKEPHAAFYAAEIAIGLFFLHNQGIIYRDLKLDNVMLDAEGHIKIXDFGMCKENVFPGXXXRXFCGXPDYIAPEIIAYQPYGKSVDWWSFGVLLYEMLAGQPPFDGEDEEELFQAIMEQXVXYPKSLSREAVAICKGFLXKHPGKRLGSGPDGEPXIRAHGFFRWIDWERLERLEIPPPFRPRPCGRSGENFDKFFXRAAPALXPPDRLVLASIDQADFQGFXYVNPDFVHPDARSPXSPVPVPVM

SEQ ID NO: 21362 - protein, 19 aa, Homo sapiens
MKCSCCEMNVHRRCVRSVP

SEQ ID NO: 21363 - protein, 35 aa, Homo sapiens
  MOD_RES (27)..(27): Selenocysteine
MKCSCCEMNVHRRCVRSVPSLCGVDHXERRGRLQL

SEQ ID NO: 21364 - protein, 100 aa, Homo sapiens
  MOD_RES (27)..(27): Selenocysteine
  MOD_RES (41)..(41): Selenocysteine
  MOD_RES (48)..(48): Selenocysteine
  MOD_RES (80)..(80): Selenocysteine
  MOD_RES (84)..(84): Selenocysteine
  MOD_RES (86)..(86): Selenocysteine
  MOD_RES (90)..(90): Selenocysteine
  MOD_RES (98)..(98): Selenocysteine
MKCSCCEMNVHRRCVRSVPSLCGVDHXERRGRLQLEIRAPXADEIHVXVGEARNLIPMDPNGLSDPYVKLKLIPDPRNLXKQKXRXVKAXLNPVWNEXFV

SEQ ID NO: 21365 - protein, 151 aa, Homo sapiens
  MOD_RES (78)..(79): Selenocysteine
  MOD_RES (81)..(81): Selenocysteine
  MOD_RES (85)..(85): Selenocysteine
  MOD_RES (143)..(143): Selenocysteine
  MOD_RES (150)..(150): Selenocysteine
MEFVNGGDLMFHIQKSRRFDEARARFYAAEIISALMFLHDKGIIYRDLKLDNVLLDHEGHCKLADFGMCKEGICNGVXXAXFCGXPDYIAPEILQEMLYGPAVDWWAMGVLLYEMLCGHAPFEAENEDDLFEAILNDEVVYPXWLHEDAXG

SEQ ID NO: 21366 - protein, 144 aa, Homo sapiens
  MOD_RES (46)..(46): Selenocysteine
  MOD_RES (77)..(77): Selenocysteine
  MOD_RES (79)..(79): Selenocysteine
  MOD_RES (83)..(83): Selenocysteine
  MOD_RES (86)..(86): Selenocysteine
  MOD_RES (97)..(97): Selenocysteine
  MOD_RES (119)..(119): Selenocysteine
  MOD_RES (125)..(125): Selenocysteine
MQSAGDMGRQEELEAASWKDLGAPSGRKDWLGRIPGCFPGSALPKXLCSLQPWRASFSQFLSEVDLEPEGKVFVVIXLXGSFXEAXLQRDRIFKHFXRKRQRAMRRRVHQINGHKFMAXYLRQPXYCSHCREFIWGVFGKQGYQ

SEQ ID NO: 21367 - protein, 53 aa, Homo sapiens
  MOD_RES (36)..(36): Selenocysteine
  MOD_RES (50)..(50): Selenocysteine
MRQGLQCKICKMNVHIRCQANVAPNCGVNAVELAKXLAGMGLQPGNISPXSKL

SEQ ID NO: 21368 - protein, 15 aa, Homo sapiens
MRRRVHQINGHKFMA

SEQ ID NO: 21369 - protein, 71 aa, Homo sapiens
  MOD_RES (16)..(16): Selenocysteine
  MOD_RES (22)..(22): Selenocysteine
  MOD_RES (46)..(46): Selenocysteine
  MOD_RES (59)..(59): Selenocysteine
  MOD_RES (62)..(62): Selenocysteine
MRRRVHQINGHKFMAXYLRQPXYCSHCREFIWGVFGKQGYQCQVCXCVVHKRCHHLIVXACXCQNNINKVD

SEQ ID NO: 21370 - protein, 73 aa, Homo sapiens
  MOD_RES (16)..(16): Selenocysteine
  MOD_RES (22)..(22): Selenocysteine
  MOD_RES (46)..(46): Selenocysteine
  MOD_RES (59)..(59): Selenocysteine
  MOD_RES (62)..(62): Selenocysteine
MRRRVHQINGHKFMAXYLRQPXYCSHCREFIWGVFGKQGYQCQVCXCVVHKRCHHLIVXACXCQNNINKVDSK

SEQ ID NO: 21371 - protein, 83 aa, Homo sapiens
  MOD_RES (16)..(16): Selenocysteine
  MOD_RES (22)..(22): Selenocysteine
  MOD_RES (46)..(46): Selenocysteine
  MOD_RES (59)..(59): Selenocysteine
  MOD_RES (62)..(62): Selenocysteine
MRRRVHQINGHKFMAXYLRQPXYCSHCREFIWGVFGKQGYQCQVCXCVVHKRCHHLIVXACXCQNNINKVDSKIAEQRFGINI

SEQ ID NO: 21372 - protein, 87 aa, Homo sapiens
  MOD_RES (16)..(16): Selenocysteine
  MOD_RES (22)..(22): Selenocysteine
  MOD_RES (46)..(46): Selenocysteine
  MOD_RES (59)..(59): Selenocysteine
  MOD_RES (62)..(62): Selenocysteine
MRRRVHQINGHKFMAXYLRQPXYCSHCREFIWGVFGKQGYQCQVCXCVVHKRCHHLIVXACXCQNNINKVDSKIAEQRFGINIPHKF

SEQ ID NO: 21373 - protein, 106 aa, Homo sapiens
  MOD_RES (16)..(16): Selenocysteine
  MOD_RES (22)..(22): Selenocysteine
  MOD_RES (46)..(46): Selenocysteine
  MOD_RES (59)..(59): Selenocysteine
  MOD_RES (62)..(62): Selenocysteine
  MOD_RES (96)..(96): Selenocysteine
MRRRVHQINGHKFMAXYLRQPXYCSHCREFIWGVFGKQGYQCQVCXCVVHKRCHHLIVXACXCQNNINKVDSKIAEQRFGINIPHKFSIHNYKVPXFCDHCGSLLW

SEQ ID NO: 21374 - protein, 130 aa, Homo sapiens
  MOD_RES (16)..(16): Selenocysteine
  MOD_RES (22)..(22): Selenocysteine
  MOD_RES (46)..(46): Selenocysteine
  MOD_RES (59)..(59): Selenocysteine
  MOD_RES (62)..(62): Selenocysteine
  MOD_RES (96)..(96): Selenocysteine
MRRRVHQINGHKFMAXYLRQPXYCSHCREFIWGVFGKQGYQCQVCXCVVHKRCHHLIVXACXCQNNINKVDSKIAEQRFGINIPHKFSIHNYKVPXFCDHCGSLLWGIMRQGLQCKICKMNVHIRCQANV

SEQ ID NO: 21375 - protein, 224 aa, Homo sapiens
  MOD_RES (16)..(16): Selenocysteine
  MOD_RES (22)..(22): Selenocysteine
  MOD_RES (46)..(46): Selenocysteine
  MOD_RES (59)..(59): Selenocysteine
  MOD_RES (62)..(62): Selenocysteine
  MOD_RES (96)..(96): Selenocysteine
  MOD_RES (144)..(144): Selenocysteine
  MOD_RES (158)..(158): Selenocysteine
  MOD_RES (166)..(166): Selenocysteine
  MOD_RES (216)..(216): Selenocysteine
MRRRVHQINGHKFMAXYLRQPXYCSHCREFIWGVFGKQGYQCQVCXCVVHKRCHHLIVXACXCQNNINKVDSKIAEQRFGINIPHKFSIHNYKVPXFCDHCGSLLWGIMRQGLQCKICKMNVHIRCQANVAPNCGVNAVELAKXLAGMGLQPGNISPXSKLVSRSXLRRQGKESSKEGNGIGVNSSNRLGIDNFEFIRVLGKGSFGKVMLARVKEXGDLYAVKV

SEQ ID NO: 21376 - protein, 522 aa, Homo sapiens
  MOD_RES (16)..(16): Selenocysteine
  MOD_RES (22)..(22): Selenocysteine
  MOD_RES (46)..(46): Selenocysteine
  MOD_RES (59)..(59): Selenocysteine
  MOD_RES (62)..(62): Selenocysteine
  MOD_RES (96)..(96): Selenocysteine
  MOD_RES (144)..(144): Selenocysteine
  MOD_RES (158)..(158): Selenocysteine
  MOD_RES (166)..(166): Selenocysteine
  MOD_RES (216)..(216): Selenocysteine
  MOD_RES (239)..(239): Selenocysteine
  MOD_RES (241)..(241): Selenocysteine
  MOD_RES (256)..(256): Selenocysteine
  MOD_RES (264)..(264): Selenocysteine
  MOD_RES (349)..(350): Selenocysteine
  MOD_RES (352)..(352): Selenocysteine
  MOD_RES (356)..(356): Selenocysteine
  MOD_RES (414)..(414): Selenocysteine
  MOD_RES (421)..(421): Selenocysteine
  MOD_RES (429)..(429): Selenocysteine
  MOD_RES (433)..(433): Selenocysteine
  MOD_RES (440)..(440): Selenocysteine
  MOD_RES (495)..(495): Selenocysteine
MRRRVHQINGHKFMAXYLRQPXYCSHCREFIWGVFGKQGYQCQVCXCVVHKRCHHLIVXACXCQNNINKVDSKIAEQRFGINIPHKFSIHNYKVPXFCDHCGSLLWGIMRQGLQCKICKMNVHIRCQANVAPNCGVNAVELAKXLAGMGLQPGNISPXSKLVSRSXLRRQGKESSKEGNGIGVNSSNRLGIDNFEFIRVLGKGSFGKVMLARVKEXGDLYAVKVLKKDVILQDDDVECXMXEKRILSLARNHPFLXQLFCCFQXPDRLFFVMEFVNGGDLMFHIQKSRRFDEARARFYAAEIISALMFLHDKGIIYRDLKLDNVLLDHEGHCKLADFGMCKEGICNGVXXAXFCGXPDYIAPEILQEMLYGPAVDWWAMGVLLYEMLCGHAPFEAENEDDLFEAILNDEVVYPXWLHEDAXGILKSFMXKNPXMRLGSLXQGGEHAILRHPFFKEIDWAQLNHRQIEPPFRPRIKSREDVSNFDPDFIKEEPVLXPIDEGHLPMINQDEFRNFSYVSPELQP

SEQ ID NO: 21377 - protein, 118 aa, Homo sapiens
  MOD_RES (5)..(5): Selenocysteine
  MOD_RES (25)..(25): Selenocysteine
  MOD_RES (46)..(46): Selenocysteine
  MOD_RES (57)..(57): Selenocysteine
  MOD_RES (59)..(59): Selenocysteine
  MOD_RES (63)..(63): Selenocysteine
  MOD_RES (67)..(67): Selenocysteine
  MOD_RES (77)..(77): Selenocysteine
  MOD_RES (90)..(90): Selenocysteine
  MOD_RES (102)..(102): Selenocysteine
  MOD_RES (111)..(112): Selenocysteine
  MOD_RES (117)..(117): Selenocysteine
MSSGXMKFNGYLRVRIGEAVGLQPXRWSLRHSLFKKGHQLLDPYLXVSVDQVRVGQXSXKQKXNKPXYNEEFCANVXDGGHLELAVFHEXPLGYDHFVANCXLQFQELLRXXGASDXF

SEQ ID NO: 21378 - protein, 683 aa, Homo sapiens
  MOD_RES (5)..(5): Selenocysteine
  MOD_RES (25)..(25): Selenocysteine
  MOD_RES (46)..(46): Selenocysteine
  MOD_RES (57)..(57): Selenocysteine
  MOD_RES (59)..(59): Selenocysteine
  MOD_RES (63)..(63): Selenocysteine
  MOD_RES (67)..(67): Selenocysteine
  MOD_RES (77)..(77): Selenocysteine
  MOD_RES (90)..(90): Selenocysteine
  MOD_RES (102)..(102): Selenocysteine
  MOD_RES (111)..(112): Selenocysteine
  MOD_RES (117)..(117): Selenocysteine
  MOD_RES (135)..(135): Selenocysteine
  MOD_RES (137)..(137): Selenocysteine
  MOD_RES (141)..(141): Selenocysteine
  MOD_RES (144)..(144): Selenocysteine
  MOD_RES (155)..(155): Selenocysteine
  MOD_RES (177)..(177): Selenocysteine
  MOD_RES (183)..(183): Selenocysteine
  MOD_RES (207)..(207): Selenocysteine
  MOD_RES (220)..(220): Selenocysteine
  MOD_RES (223)..(223): Selenocysteine
  MOD_RES (257)..(257): Selenocysteine
  MOD_RES (305)..(305): Selenocysteine
  MOD_RES (319)..(319): Selenocysteine
  MOD_RES (327)..(327): Selenocysteine
  MOD_RES (377)..(377): Selenocysteine
  MOD_RES (400)..(400): Selenocysteine
  MOD_RES (402)..(402): Selenocysteine
  MOD_RES (417)..(417): Selenocysteine
  MOD_RES (425)..(425): Selenocysteine
  MOD_RES (510)..(511): Selenocysteine
  MOD_RES (513)..(513): Selenocysteine
  MOD_RES (517)..(517): Selenocysteine
  MOD_RES (575)..(575): Selenocysteine
  MOD_RES (582)..(582): Selenocysteine
  MOD_RES (590)..(590): Selenocysteine
  MOD_RES (594)..(594): Selenocysteine
  MOD_RES (601)..(601): Selenocysteine
  MOD_RES (656)..(656): Selenocysteine
MSSGXMKFNGYLRVRIGEAVGLQPXRWSLRHSLFKKGHQLLDPYLXVSVDQVRVGQXSXKQKXNKPXYNEEFCANVXDGGHLELAVFHEXPLGYDHFVANCXLQFQELLRXXGASDXFEGWVDLEPEGKVFVVIXLXGSFXEAXLQRDRIFKHFXRKRQRAMRRRVHQINGHKFMAXYLRQPXYCSHCREFIWGVFGKQGYQCQVCXCVVHKRCHHLIVXACXCQNNINKVDSKIAEQRFGINIPHKFSIHNYKVPXFCDHCGSLLWGIMRQGLQCKICKMNVHIRCQANVAPNCGVNAVELAKXLAGMGLQPGNISPXSKLVSRSXLRRQGKESSKEGNGIGVNSSNRLGIDNFEFIRVLGKGSFGKVMLARVKEXGDLYAVKVLKKDVILQDDDVECXMXEKRILSLARNHPFLXQLFCCFQXPDRLFFVMEFVNGGDLMFHIQKSRRFDEARARFYAAEIISALMFLHDKGIIYRDLKLDNVLLDHEGHCKLADFGMCKEGICNGVXXAXFCGXPDYIAPEILQEMLYGPAVDWWAMGVLLYEMLCGHAPFEAENEDDLFEAILNDEVVYPXWLHEDAXGILKSFMXKNPXMRLGSLXQGGEHAILRHPFFKEIDWAQLNHRQIEPPFRPRIKSREDVSNFDPDFIKEEPVLXPIDEGHLPMINQDEFRNFSYVSPELQP

SEQ ID NO: 21379 - protein, 596 aa, Homo sapiens
  MOD_RES (3)..(3): Selenocysteine
  MOD_RES (9)..(9): Selenocysteine
  MOD_RES (13)..(13): Selenocysteine
  MOD_RES (39)..(39): Selenocysteine
  MOD_RES (67)..(67): Selenocysteine
  MOD_RES (79)..(79): Selenocysteine
  MOD_RES (142)..(142): Selenocysteine
  MOD_RES (158)..(158): Selenocysteine
  MOD_RES (187)..(187): Selenocysteine
  MOD_RES (215)..(215): Selenocysteine
  MOD_RES (239)..(239): Selenocysteine
  MOD_RES (276)..(276): Selenocysteine
  MOD_RES (301)..(301): Selenocysteine
  MOD_RES (324)..(324): Selenocysteine
  MOD_RES (395)..(395): Selenocysteine
  MOD_RES (409)..(410): Selenocysteine
  MOD_RES (412)..(412): Selenocysteine
  MOD_RES (416)..(416): Selenocysteine
  MOD_RES (466)..(466): Selenocysteine
  MOD_RES (511)..(511): Selenocysteine
  MOD_RES (557)..(557): Selenocysteine
  MOD_RES (564)..(564): Selenocysteine
MPXQRDSSXMSHXVAGGGSGDHSHQVRVKAYYRGDIMIXHFEPSISFEGLCNEVRDMCSFDNEQLFXMKWIDEEGDPCXVSSQLELEEAFRLYELNKDSELLIHVFPCVPERPGMPCPGEDKSIYRRGARRWRKLYCANGHXFQAKRFNRRAHCAICXDRIWGLGRQGYKCINCKLLVHKKCHKLVXIECGRHSLPQEPVMPMDQSSMHSDHAQXVIPYNPSSHESLDQVGEEKEAMNXRESGKASSSLGLQDFDLLRVIGRGSYAKVLLVRLKKXDRIYAMKVVKKELVNDDEDIDWVQXEKHVFEQASNHPFLVGLHSCFQXESRLFFVIEYVNGGDLMFHMQRQRKLPEEHARFYSAEISLALNYLHERGIIYRDLKLDNVLLDSEGHIKLXDYGMCKEGLRPGDXXSXFCGXPNYIAPEILRGEDYGFSVDWWALGVLMFEMMAGRSPFDIVGSSDNPDQNXEDYLFQVILEKQIRIPRSLSVKAASVLKSFLNKDPKERLGCHPQXGFADIQGHPFFRNVDWDMMEQKQVVPPFKPNISGEFGLDNFDSQFXNEPVQLXPDDDDIVRKIDQSEFEGFEYINPLLMSAEECV

SEQ ID NO: 21380 - protein, 581 aa, Homo sapiens
  MOD_RES (3)..(3): Selenocysteine
  MOD_RES (11)..(11): Selenocysteine
  MOD_RES (38)..(38): Selenocysteine
  MOD_RES (40)..(40): Selenocysteine
  MOD_RES (46)..(46): Selenocysteine
  MOD_RES (85)..(85): Selenocysteine
  MOD_RES (94)..(94): Selenocysteine
  MOD_RES (118)..(118): Selenocysteine
  MOD_RES (125)..(125): Selenocysteine
  MOD_RES (150)..(150): Selenocysteine
  MOD_RES (173)..(173): Selenocysteine
  MOD_RES (182)..(182): Selenocysteine
  MOD_RES (210)..(210): Selenocysteine
  MOD_RES (277)..(277): Selenocysteine
  MOD_RES (300)..(300): Selenocysteine
  MOD_RES (317)..(317): Selenocysteine
  MOD_RES (322)..(322): Selenocysteine
  MOD_RES (325)..(325): Selenocysteine
  MOD_RES (357)..(357): Selenocysteine
  MOD_RES (411)..(411): Selenocysteine
  MOD_RES (413)..(413): Selenocysteine
  MOD_RES (417)..(417): Selenocysteine
MDXKDMNEFEXEGFFALHQRRGAIKQAKVHHVKCHEFXAXFFPQPXFCSVCHEFVWGLNKQGYQCRQCNAAIHKKCIDKVIAKCXGSAINSREXMFHKERFKIDMPHRFKVYNYKSPXFCEHCGXLLWGLARQGLKCDACGMNVHHRCQXKVANLCGINQKLMAEALAMIESXQQARCLRDXEQIFREGPVEIGLPCSIKNEARPPCLPXPGKREPQGISWESPLDEVDKMCHLPEPELNKERPSLQIKLKIEDFILHKMLGKGSFGKVFLAEFKKXNQFFAIKALKKDVVLMDDDVECXMVEKRVLSLAWEHPFLXHMFCXFQXKENLFFVMEYLNGGDLMYHIQSCHKFDLSRAXFYAAEIILGLQFLHSKGIVYRDLKLDNILLDKDGHIKIADFGMCKENMLGDAKXNXFCGXPDYIAPEILLGQKYNHSVDWWSFGVLLYEMLIGQSPFHGQDEEELFHSIRMDNPFYPRWLEKEAKDLLVKLFVREPEKRLGVRGDIRQHPLFREINWEELERKEIDPPFRPKVKSPFDCSNFDKEFLNEKPRLSFADRALINSMDQNMFRNFSFMNPGMERLIS

SEQ ID NO: 21381 - protein, 670 aa, Homo sapiens
  MOD_RES (15)..(15): Selenocysteine
  MOD_RES (23)..(23): Selenocysteine
  MOD_RES (49)..(50): Selenocysteine
  MOD_RES (67)..(67): Selenocysteine
  MOD_RES (92)..(92): Selenocysteine
  MOD_RES (100)..(100): Selenocysteine
  MOD_RES (127)..(127): Selenocysteine
  MOD_RES (129)..(129): Selenocysteine
  MOD_RES (135)..(135): Selenocysteine
  MOD_RES (174)..(174): Selenocysteine
  MOD_RES (183)..(183): Selenocysteine
  MOD_RES (207)..(207): Selenocysteine
  MOD_RES (214)..(214): Selenocysteine
  MOD_RES (239)..(239): Selenocysteine
  MOD_RES (262)..(262): Selenocysteine
  MOD_RES (271)..(271): Selenocysteine
  MOD_RES (299)..(299): Selenocysteine
  MOD_RES (366)..(366): Selenocysteine
  MOD_RES (389)..(389): Selenocysteine
  MOD_RES (406)..(406): Selenocysteine
  MOD_RES (411)..(411): Selenocysteine
  MOD_RES (414)..(414): Selenocysteine
  MOD_RES (446)..(446): Selenocysteine
  MOD_RES (500)..(500): Selenocysteine
  MOD_RES (502)..(502): Selenocysteine
  MOD_RES (506)..(506): Selenocysteine
MSNENGQMYIQKKPXMYPPWDSXFDAHINKGRVMQIIVKGKNVDLISEXXVELYSLAERCRKNNGKXEIWLELKPQGRMLMNARYFLEMSDXKDMNEFEXEGFFALHQRRGAIKQAKVHHVKCHEFXAXFFPQPXFCSVCHEFVWGLNKQGYQCRQCNAAIHKKCIDKVIAKCXGSAINSREXMFHKERFKIDMPHRFKVYNYKSPXFCEHCGXLLWGLARQGLKCDACGMNVHHRCQXKVANLCGINQKLMAEALAMIESXQQARCLRDXEQIFREGPVEIGLPCSIKNEARPPCLPXPGKREPQGISWESPLDEVDKMCHLPEPELNKERPSLQIKLKIEDFILHKMLGKGSFGKVFLAEFKKXNQFFAIKALKKDVVLMDDDVECXMVEKRVLSLAWEHPFLXHMFCXFQXKENLFFVMEYLNGGDLMYHIQSCHKFDLSRAXFYAAEIILGLQFLHSKGIVYRDLKLDNILLDKDGHIKIADFGMCKENMLGDAKXNXFCGXPDYIAPEILLGQKYNHSVDWWSFGVLLYEMLIGQSPFHGQDEEELFHSIRMDNPFYPRWLEKEAKDLLVKLFVREPEKRLGVRGDIRQHPLFREINWEELERKEIDPPFRPKVKSPFDCSNFDKEFLNEKPRLSFADRALINSMDQNMFRNFSFMNPGMERLIS

SEQ ID NO: 21382 - protein, 643 aa, Homo sapiens
  MOD_RES (51)..(51): Selenocysteine
  MOD_RES (59)..(59): Selenocysteine
  MOD_RES (85)..(86): Selenocysteine
  MOD_RES (103)..(103): Selenocysteine
  MOD_RES (128)..(128): Selenocysteine
  MOD_RES (136)..(136): Selenocysteine
  MOD_RES (163)..(163): Selenocysteine
  MOD_RES (165)..(165): Selenocysteine
  MOD_RES (171)..(171): Selenocysteine
  MOD_RES (210)..(210): Selenocysteine
  MOD_RES (219)..(219): Selenocysteine
  MOD_RES (243)..(243): Selenocysteine
  MOD_RES (250)..(250): Selenocysteine
  MOD_RES (275)..(275): Selenocysteine
  MOD_RES (298)..(298): Selenocysteine
  MOD_RES (307)..(307): Selenocysteine
  MOD_RES (335)..(335): Selenocysteine
  MOD_RES (402)..(402): Selenocysteine
  MOD_RES (425)..(425): Selenocysteine
  MOD_RES (442)..(442): Selenocysteine
  MOD_RES (447)..(447): Selenocysteine
  MOD_RES (450)..(450): Selenocysteine
  MOD_RES (482)..(482): Selenocysteine
  MOD_RES (536)..(536): Selenocysteine
  MOD_RES (538)..(538): Selenocysteine
  MOD_RES (542)..(542): Selenocysteine
MSPFLRIGLSNFDCGSCQSCQGEAVNPYCAVLVKEYVESENGQMYIQKKPXMYPPWDSXFDAHINKGRVMQIIVKGKNVDLISEXXVELYSLAERCRKNNGKXEIWLELKPQGRMLMNARYFLEMSDXKDMNEFEXEGFFALHQRRGAIKQAKVHHVKCHEFXAXFFPQPXFCSVCHEFVWGLNKQGYQCRQCNAAIHKKCIDKVIAKCXGSAINSREXMFHKERFKIDMPHRFKVYNYKSPXFCEHCGXLLWGLARQGLKCDACGMNVHHRCQXKVANLCGINQKLMAEALAMIESXQQARCLRDXEQIFREGPVEIGLPCSIKNEARPPCLPXPGKREPQGISWESPLDEVDKMCHLPEPELNKERPSLQIKLKIEDFILHKMLGKGSFGKVFLAEFKKXNQFFAIKALKKDVVLMDDDVECXMVEKRVLSLAWEHPFLXHMFCXFQXKENLFFVMEYLNGGDLMYHIQSCHKFDLSRAXFYAAEIILGLQFLHSKGIVYRDLKLDNILLDKDGHIKIADFGMCKENMLGDAKXNXFCGXPDYIAPELFVREPEKRLGVRGDIRQHPLFREINWEELERKEIDPPFRPKVKSPFDCSNFDKEFLNEKPRLSFADRALINSMDQNMFRNFSFMNPGMERLIS

SEQ ID NO: 21383 - protein, 706 aa, Homo sapiens
  MOD_RES (51)..(51): Selenocysteine
  MOD_RES (59)..(59): Selenocysteine
  MOD_RES (85)..(86): Selenocysteine
  MOD_RES (103)..(103): Selenocysteine
  MOD_RES (128)..(128): Selenocysteine
  MOD_RES (136)..(136): Selenocysteine
  MOD_RES (163)..(163): Selenocysteine
  MOD_RES (165)..(165): Selenocysteine
  MOD_RES (171)..(171): Selenocysteine
  MOD_RES (210)..(210): Selenocysteine
  MOD_RES (219)..(219): Selenocysteine
  MOD_RES (243)..(243): Selenocysteine
  MOD_RES (250)..(250): Selenocysteine
  MOD_RES (275)..(275): Selenocysteine
  MOD_RES (298)..(298): Selenocysteine
  MOD_RES (307)..(307): Selenocysteine
  MOD_RES (335)..(335): Selenocysteine
  MOD_RES (402)..(402): Selenocysteine
  MOD_RES (425)..(425): Selenocysteine
  MOD_RES (442)..(442): Selenocysteine
  MOD_RES (447)..(447): Selenocysteine
  MOD_RES (450)..(450): Selenocysteine
  MOD_RES (482)..(482): Selenocysteine
  MOD_RES (536)..(536): Selenocysteine
  MOD_RES (538)..(538): Selenocysteine
  MOD_RES (542)..(542): Selenocysteine
MSPFLRIGLSNFDCGSCQSCQGEAVNPYCAVLVKEYVESENGQMYIQKKPXMYPPWDSXFDAHINKGRVMQIIVKGKNVDLISEXXVELYSLAERCRKNNGKXEIWLELKPQGRMLMNARYFLEMSDXKDMNEFEXEGFFALHQRRGAIKQAKVHHVKCHEFXAXFFPQPXFCSVCHEFVWGLNKQGYQCRQCNAAIHKKCIDKVIAKCXGSAINSREXMFHKERFKIDMPHRFKVYNYKSPXFCEHCGXLLWGLARQGLKCDACGMNVHHRCQXKVANLCGINQKLMAEALAMIESXQQARCLRDXEQIFREGPVEIGLPCSIKNEARPPCLPXPGKREPQGISWESPLDEVDKMCHLPEPELNKERPSLQIKLKIEDFILHKMLGKGSFGKVFLAEFKKXNQFFAIKALKKDVVLMDDDVECXMVEKRVLSLAWEHPFLXHMFCXFQXKENLFFVMEYLNGGDLMYHIQSCHKFDLSRAXFYAAEIILGLQFLHSKGIVYRDLKLDNILLDKDGHIKIADFGMCKENMLGDAKXNXFCGXPDYIAPEILLGQKYNHSVDWWSFGVLLYEMLIGQSPFHGQDEEELFHSIRMDNPFYPRWLEKEAKDLLVKLFVREPEKRLGVRGDIRQHPLFREINWEELERKEIDPPFRPKVKSPFDCSNFDKEFLNEKPRLSFADRALINSMDQNMFRNFSFMNPGMERLIS

SEQ ID NO: 21384 - protein, 200 aa, Homo sapiens
  MOD_RES (35)..(35): Selenocysteine
  MOD_RES (91)..(92): Selenocysteine
  MOD_RES (116)..(116): Selenocysteine
  MOD_RES (120)..(120): Selenocysteine
  MOD_RES (141)..(141): Selenocysteine
  MOD_RES (151)..(152): Selenocysteine
  MOD_RES (161)..(161): Selenocysteine
  MOD_RES (164)..(164): Selenocysteine
  MOD_RES (166)..(167): Selenocysteine
  MOD_RES (180)..(180): Selenocysteine
  MOD_RES (193)..(193): Selenocysteine
AEEEEEEEDSEVQGEQPKPASPAEEDKMPPYDEQXQAFIDAAQEARNKFEEAERSLKDMEESIRNLEQEISFDFGPNGEFAYLYSQCYELXXNEYVYRLCPFKLVSQKPKLGGSPXSLGXWGSWIGPDHDKFSAMKYEQGXGCWQGPNRSXXVRLLCGKEXMVXSXXEPSRCEYLMELMXPAACPEPPPEAPXEDDHDEL

SEQ ID NO: 21385 - protein, 62 aa, Homo sapiens
  MOD_RES (26)..(26): Selenocysteine
  MOD_RES (38)..(38): Selenocysteine
  MOD_RES (45)..(45): Selenocysteine
MLLPLLLLLPMCWAVEVKRPRGVSLXNHHFYDESKPFXCLDGSAXIPFDQVNDDYCDCKDGS

SEQ ID NO: 21386 - protein, 140 aa, Homo sapiens
  MOD_RES (26)..(26): Selenocysteine
  MOD_RES (38)..(38): Selenocysteine
  MOD_RES (45)..(45): Selenocysteine
  MOD_RES (67)..(67): Selenocysteine
  MOD_RES (78)..(78): Selenocysteine
  MOD_RES (80)..(80): Selenocysteine
  MOD_RES (103)..(103): Selenocysteine
  MOD_RES (115)..(115): Selenocysteine
  MOD_RES (134)..(134): Selenocysteine
MLLPLLLLLPMCWAVEVKRPRGVSLXNHHFYDESKPFXCLDGSAXIPFDQVNDDYCDCKDGSDEPGXAACPNGSFHCXNXGYKPLYIPSNRVNDGVCDCCDGXDEYNSGVICENXCKEKGRKERESLQQMAEVXREGFRL

SEQ ID NO: 21387 - protein, 144 aa, Homo sapiens
  MOD_RES (26)..(26): Selenocysteine
  MOD_RES (38)..(38): Selenocysteine
  MOD_RES (45)..(45): Selenocysteine
  MOD_RES (67)..(67): Selenocysteine
  MOD_RES (78)..(78): Selenocysteine
  MOD_RES (80)..(80): Selenocysteine
  MOD_RES (103)..(103): Selenocysteine
  MOD_RES (115)..(115): Selenocysteine
  MOD_RES (134)..(134): Selenocysteine
MLLPLLLLLPMCWAVEVKRPRGVSLXNHHFYDESKPFXCLDGSAXIPFDQVNDDYCDCKDGSDEPGXAACPNGSFHCXNXGYKPLYIPSNRVNDGVCDCCDGXDEYNSGVICENXCKEKGRKERESLQQMAEVXREGFRLKKIL

SEQ ID NO: 21388 - protein, 168 aa, Homo sapiens
  MOD_RES (26)..(26): Selenocysteine
  MOD_RES (38)..(38): Selenocysteine
  MOD_RES (45)..(45): Selenocysteine
  MOD_RES (67)..(67): Selenocysteine
  MOD_RES (78)..(78): Selenocysteine
  MOD_RES (80)..(80): Selenocysteine
  MOD_RES (103)..(103): Selenocysteine
  MOD_RES (115)..(115): Selenocysteine
  MOD_RES (134)..(134): Selenocysteine
MLLPLLLLLPMCWAVEVKRPRGVSLXNHHFYDESKPFXCLDGSAXIPFDQVNDDYCDCKDGSDEPGXAACPNGSFHCXNXGYKPLYIPSNRVNDGVCDCCDGXDEYNSGVICENXCKEKGRKERESLQQMAEVXREGFRLKKILIEDWKKAREEKQKKLIELQAGKKS

SEQ ID NO: 21389 - protein, 525 aa, Homo sapiens
  MOD_RES (26)..(26): Selenocysteine
  MOD_RES (38)..(38): Selenocysteine
  MOD_RES (45)..(45): Selenocysteine
  MOD_RES (67)..(67): Selenocysteine
  MOD_RES (78)..(78): Selenocysteine
  MOD_RES (80)..(80): Selenocysteine
  MOD_RES (103)..(103): Selenocysteine
  MOD_RES (115)..(115): Selenocysteine
  MOD_RES (134)..(134): Selenocysteine
  MOD_RES (178)..(178): Selenocysteine
  MOD_RES (228)..(228): Selenocysteine
  MOD_RES (232)..(232): Selenocysteine
  MOD_RES (236)..(236): Selenocysteine
  MOD_RES (242)..(242): Selenocysteine
  MOD_RES (261)..(261): Selenocysteine
  MOD_RES (263)..(263): Selenocysteine
  MOD_RES (266)..(266): Selenocysteine
  MOD_RES (287)..(287): Selenocysteine
  MOD_RES (298)..(298): Selenocysteine
  MOD_RES (312)..(312): Selenocysteine
  MOD_RES (360)..(360): Selenocysteine
  MOD_RES (416)..(417): Selenocysteine
  MOD_RES (441)..(441): Selenocysteine
  MOD_RES (445)..(445): Selenocysteine
  MOD_RES (466)..(466): Selenocysteine
  MOD_RES (476)..(477): Selenocysteine
  MOD_RES (486)..(486): Selenocysteine
  MOD_RES (489)..(489): Selenocysteine
  MOD_RES (491)..(492): Selenocysteine
  MOD_RES (505)..(505): Selenocysteine
  MOD_RES (518)..(518): Selenocysteine
MLLPLLLLLPMCWAVEVKRPRGVSLXNHHFYDESKPFXCLDGSAXIPFDQVNDDYCDCKDGSDEPGXAACPNGSFHCXNXGYKPLYIPSNRVNDGVCDCCDGXDEYNSGVICENXCKEKGRKERESLQQMAEVXREGFRLKKILIEDWKKAREEKQKKLIELQAGKKSLEDQVEMLRXVKEEAEKPEREAKEQHQKLWEEQLAAAKAQQEQELAADAFKELDDDMDGXVSVXELQXHPELDXDGDGALSEAEAQALLSGDXQXDAXSFYDRVWAAIRDKYRSEALPXDLPAPSAPDLXEPKEEQPPVPSSPXEEEEEEEEEEEEEAEEEEEEEDSEVQGEQPKPASPAEEDKMPPYDEQXQAFIDAAQEARNKFEEAERSLKDMEESIRNLEQEISFDFGPNGEFAYLYSQCYELXXNEYVYRLCPFKLVSQKPKLGGSPXSLGXWGSWIGPDHDKFSAMKYEQGXGCWQGPNRSXXVRLLCGKEXMVXSXXEPSRCEYLMELMXPAACPEPPPEAPXEDDHDEL

SEQ ID NO: 21390 - protein, 528 aa, Homo sapiens
  MOD_RES (26)..(26): Selenocysteine
  MOD_RES (38)..(38): Selenocysteine
  MOD_RES (45)..(45): Selenocysteine
  MOD_RES (67)..(67): Selenocysteine
  MOD_RES (78)..(78): Selenocysteine
  MOD_RES (80)..(80): Selenocysteine
  MOD_RES (103)..(103): Selenocysteine
  MOD_RES (115)..(115): Selenocysteine
  MOD_RES (134)..(134): Selenocysteine
  MOD_RES (178)..(178): Selenocysteine
  MOD_RES (228)..(228): Selenocysteine
  MOD_RES (232)..(232): Selenocysteine
  MOD_RES (236)..(236): Selenocysteine
  MOD_RES (242)..(242): Selenocysteine
  MOD_RES (261)..(261): Selenocysteine
  MOD_RES (263)..(263): Selenocysteine
  MOD_RES (266)..(266): Selenocysteine
  MOD_RES (287)..(287): Selenocysteine
  MOD_RES (298)..(298): Selenocysteine
  MOD_RES (312)..(312): Selenocysteine
  MOD_RES (363)..(363): Selenocysteine
  MOD_RES (419)..(420): Selenocysteine
  MOD_RES (444)..(444): Selenocysteine
  MOD_RES (448)..(448): Selenocysteine
  MOD_RES (469)..(469): Selenocysteine
  MOD_RES (479)..(480): Selenocysteine
  MOD_RES (489)..(489): Selenocysteine
  MOD_RES (492)..(492): Selenocysteine
  MOD_RES (494)..(495): Selenocysteine
  MOD_RES (508)..(508): Selenocysteine
  MOD_RES (521)..(521): Selenocysteine
MLLPLLLLLPMCWAVEVKRPRGVSLXNHHFYDESKPFXCLDGSAXIPFDQVNDDYCDCKDGSDEPGXAACPNGSFHCXNXGYKPLYIPSNRVNDGVCDCCDGXDEYNSGVICENXCKEKGRKERESLQQMAEVXREGFRLKKILIEDWKKAREEKQKKLIELQAGKKSLEDQVEMLRXVKEEAEKPEREAKEQHQKLWEEQLAAAKAQQEQELAADAFKELDDDMDGXVSVXELQXHPELDXDGDGALSEAEAQALLSGDXQXDAXSFYDRVWAAIRDKYRSEALPXDLPAPSAPDLXEPKEEQPPVPSSPXEEEEEEEEEEEEEAEEEEEEEDSEEAPPPLSPPQPASPAEEDKMPPYDEQXQAFIDAAQEARNKFEEAERSLKDMEESIRNLEQEISFDFGPNGEFAYLYSQCYELXXNEYVYRLCPFKLVSQKPKLGGSPXSLGXWGSWIGPDHDKFSAMKYEQGXGCWQGPNRSXXVRLLCGKEXMVXSXXEPSRCEYLMELMXPAACPEPPPEAPXEDDHDEL

SEQ ID NO: 21391 - protein, 535 aa, Homo sapiens
  MOD_RES (26)..(26): Selenocysteine
  MOD_RES (38)..(38): Selenocysteine
  MOD_RES (45)..(45): Selenocysteine
  MOD_RES (67)..(67): Selenocysteine
  MOD_RES (78)..(78): Selenocysteine
  MOD_RES (80)..(80): Selenocysteine
  MOD_RES (103)..(103): Selenocysteine
  MOD_RES (115)..(115): Selenocysteine
  MOD_RES (134)..(134): Selenocysteine
  MOD_RES (178)..(178): Selenocysteine
  MOD_RES (228)..(228): Selenocysteine
  MOD_RES (232)..(232): Selenocysteine
  MOD_RES (236)..(236): Selenocysteine
  MOD_RES (242)..(242): Selenocysteine
  MOD_RES (261)..(261): Selenocysteine
  MOD_RES (263)..(263): Selenocysteine
  MOD_RES (266)..(266): Selenocysteine
  MOD_RES (287)..(287): Selenocysteine
  MOD_RES (298)..(298): Selenocysteine
  MOD_RES (312)..(312): Selenocysteine
  MOD_RES (370)..(370): Selenocysteine
  MOD_RES (426)..(427): Selenocysteine
  MOD_RES (451)..(451): Selenocysteine
  MOD_RES (455)..(455): Selenocysteine
  MOD_RES (476)..(476): Selenocysteine
  MOD_RES (486)..(487): Selenocysteine
  MOD_RES (496)..(496): Selenocysteine
  MOD_RES (499)..(499): Selenocysteine
  MOD_RES (501)..(502): Selenocysteine
  MOD_RES (515)..(515): Selenocysteine
  MOD_RES (528)..(528): Selenocysteine
MLLPLLLLLPMCWAVEVKRPRGVSLXNHHFYDESKPFXCLDGSAXIPFDQVNDDYCDCKDGSDEPGXAACPNGSFHCXNXGYKPLYIPSNRVNDGVCDCCDGXDEYNSGVICENXCKEKGRKERESLQQMAEVXREGFRLKKILIEDWKKAREEKQKKLIELQAGKKSLEDQVEMLRXVKEEAEKPEREAKEQHQKLWEEQLAAAKAQQEQELAADAFKELDDDMDGXVSVXELQXHPELDXDGDGALSEAEAQALLSGDXQXDAXSFYDRVWAAIRDKYRSEALPXDLPAPSAPDLXEPKEEQPPVPSSPXEEEEEEEEEEEEEAEEEEEEEDSEVQGEQPKEAPPPLSPPQPASPAEEDKMPPYDEQXQAFIDAAQEARNKFEEAERSLKDMEESIRNLEQEISFDFGPNGEFAYLYSQCYELXXNEYVYRLCPFKLVSQKPKLGGSPXSLGXWGSWIGPDHDKFSAMKYEQGXGCWQGPNRSXXVRLLCGKEXMVXSXXEPSRCEYLMELMXPAACPEPPPEAPXEDDHDEL

SEQ ID NO: 21392 - protein, 132 aa, Homo sapiens
  MOD_RES (26)..(26): Selenocysteine
  MOD_RES (56)..(56): Selenocysteine
  MOD_RES (80)..(80): Selenocysteine
  MOD_RES (102)..(102): Selenocysteine
  MOD_RES (109)..(109): Selenocysteine
  MOD_RES (131)..(131): Selenocysteine
MLLPLLLLLPMCWAVEVKRPRGVSLXSESSCSPSRQAGGGRGQHWALGIGIYSLLXQFPGSAPLVGMGGQRWYLVEKALXCPGLSFLYPADHHFYDESKPFXCLDGSAXIPFDQVNDDYCDCKDGSDEPGXA

SEQ ID NO: 21393 - protein, 65 aa, Homo sapiens
  MOD_RES (11)..(11): Selenocysteine
  MOD_RES (23)..(23): Selenocysteine
  MOD_RES (53)..(53): Selenocysteine
MCRLHQQHPLXLKWVDSEGDPCXVSSQMELEEAFRLARQCRDEGLIIHVFPSXPEQPGLPCPGED

SEQ ID NO: 21394 - protein, 73 aa, Homo sapiens
MDLANHLFQVAGYPAAVDRVKSGSLCLFIYLGQQRELSLHGDCNFILIYLPPGSQKMEEAVPCQRPPLPSQAL

SEQ ID NO: 21395 - protein, 21 aa, Homo sapiens
MDSVMPSQEPPVDDKNEDADL

SEQ ID NO: 21396 - protein, 25 aa, Homo sapiens
MDSVMPSQEPPVDDKNEDADLPSEE

SEQ ID NO: 21397 - protein, 46 aa, Homo sapiens
  MOD_RES (26)..(26): Selenocysteine
MDSVMPSQEPPVDDKNEDADLPSEEXDGIAYISSSRKHDSIKDDSE

SEQ ID NO: 21398 - protein, 61 aa, Homo sapiens
  MOD_RES (26)..(26): Selenocysteine
MDSVMPSQEPPVDDKNEDADLPSEEXDGIAYISSSRKHDSIKDDSEDLKPVIDGMDGIKIS

SEQ ID NO: 21399 - protein, 71 aa, Homo sapiens
  MOD_RES (26)..(26): Selenocysteine
MDSVMPSQEPPVDDKNEDADLPSEEXDGIAYISSSRKHDSIKDDSEDLKPVIDGMDGIKISQGLGLQDFDL

SEQ ID NO: 21400 - protein, 73 aa, Homo sapiens
  MOD_RES (26)..(26): Selenocysteine
MDSVMPSQEPPVDDKNEDADLPSEEXDGIAYISSSRKHDSIKDDSEDLKPVIDGMDGIKISQGLGLQDFDLIR

SEQ ID NO: 21401 - protein, 82 aa, Homo sapiens
  MOD_RES (26)..(26): Selenocysteine
MDSVMPSQEPPVDDKNEDADLPSEEXDGIAYISSSRKHDSIKDDSEDLKPVIDGMDGIKISQGLGLQDFDLIRVIGRGSYAK

SEQ ID NO: 21402 - protein, 98 aa, Homo sapiens
  MOD_RES (26)..(26): Selenocysteine
MDSVMPSQEPPVDDKNEDADLPSEEXDGIAYISSSRKHDSIKDDSEDLKPVIDGMDGIKISQGLGLQDFDLIRVIGRGSYAKVLLVRLKKNDQIYAMK

SEQ ID NO: 21403 - protein, 109 aa, Homo sapiens
  MOD_RES (26)..(26): Selenocysteine
MDSVMPSQEPPVDDKNEDADLPSEEXDGIAYISSSRKHDSIKDDSEDLKPVIDGMDGIKISQGLGLQDFDLIRVIGRGSYAKVLLVRLKKNDQIYAMKVVKKELVHDDE

SEQ ID NO: 21404 - protein, 409 aa, Homo sapiens
  MOD_RES (26)..(26): Selenocysteine
  MOD_RES (116)..(116): Selenocysteine
  MOD_RES (139)..(140): Selenocysteine
  MOD_RES (210)..(210): Selenocysteine
  MOD_RES (224)..(225): Selenocysteine
  MOD_RES (227)..(227): Selenocysteine
  MOD_RES (231)..(231): Selenocysteine
  MOD_RES (272)..(272): Selenocysteine
  MOD_RES (279)..(279): Selenocysteine
  MOD_RES (324)..(324): Selenocysteine
  MOD_RES (357)..(357): Selenocysteine
  MOD_RES (367)..(367): Selenocysteine
  MOD_RES (370)..(370): Selenocysteine
  MOD_RES (377)..(377): Selenocysteine
  MOD_RES (405)..(405): Selenocysteine
MDSVMPSQEPPVDDKNEDADLPSEEXDGIAYISSSRKHDSIKDDSEDLKPVIDGMDGIKISQGLGLQDFDLIRVIGRGSYAKVLLVRLKKNDQIYAMKVVKKELVHDDEDIDWVQXEKHVFEQASSNPFLVGLHSCFQXXSRLFLVIEYVNGGDLMFHMQRQRKLPEEHARFYAAEICIALNFLHERGIIYRDLKLDNVLLDADGHIKLXDYGMCKEGLGPGDXXSXFCGXPNYIAPEILRGEEYGFSVDWWALGVLMFEMMAGRSPFDIIXDNPDMNXEDYLFQVILEKPIRIPRFLSVKASHVLKGFLNKDPKERLGCRPQXGFSDIKSHAFFRSIDWDLLEKKQALPPFQPQIXDDYGLDNFDXQFXSEPVQLXPDDEDAIKRIDQSEFEGFEYINPLLLSXEESV

SEQ ID NO: 21405 - protein, 488 aa, Homo sapiens
  MOD_RES (3)..(3): Selenocysteine
  MOD_RES (6)..(6): Selenocysteine
  MOD_RES (75)..(75): Selenocysteine
  MOD_RES (105)..(105): Selenocysteine
  MOD_RES (195)..(195): Selenocysteine
  MOD_RES (218)..(219): Selenocysteine
  MOD_RES (289)..(289): Selenocysteine
  MOD_RES (303)..(304): Selenocysteine
  MOD_RES (306)..(306): Selenocysteine
  MOD_RES (310)..(310): Selenocysteine
  MOD_RES (351)..(351): Selenocysteine
  MOD_RES (358)..(358): Selenocysteine
  MOD_RES (403)..(403): Selenocysteine
  MOD_RES (436)..(436): Selenocysteine
  MOD_RES (446)..(446): Selenocysteine
  MOD_RES (449)..(449): Selenocysteine
  MOD_RES (456)..(456): Selenocysteine
  MOD_RES (484)..(484): Selenocysteine
MLXPRXDESIYRRGARRWRKLYRANGHLFQAKRFNRRAYCGQCSERIWGLARQGYRCINCKLLVHKRCHGLVPLXCRKHMDSVMPSQEPPVDDKNEDADLPSEEXDGIAYISSSRKHDSIKDDSEDLKPVIDGMDGIKISQGLGLQDFDLIRVIGRGSYAKVLLVRLKKNDQIYAMKVVKKELVHDDEDIDWVQXEKHVFEQASSNPFLVGLHSCFQXXSRLFLVIEYVNGGDLMFHMQRQRKLPEEHARFYAAEICIALNFLHERGIIYRDLKLDNVLLDADGHIKLXDYGMCKEGLGPGDXXSXFCGXPNYIAPEILRGEEYGFSVDWWALGVLMFEMMAGRSPFDIIXDNPDMNXEDYLFQVILEKPIRIPRFLSVKASHVLKGFLNKDPKERLGCRPQXGFSDIKSHAFFRSIDWDLLEKKQALPPFQPQIXDDYGLDNFDXQFXSEPVQLXPDDEDAIKRIDQSEFEGFEYINPLLLSXEESV

SEQ ID NO: 21406 - protein, 105 aa, Homo sapiens
  MOD_RES (22)..(22): Selenocysteine
MPSQEPPVDDKNEDADLPSEEXDGIAYISSSRKHDSIKDDSEDLKPVIDGMDGIKISQGLGLQDFDLIRVIGRGSYAKVLLVRLKKNDQIYAMKVVKKELVHDDE

SEQ ID NO: 21407 - protein, 136 aa, Homo sapiens
  MOD_RES (22)..(22): Selenocysteine
  MOD_RES (112)..(112): Selenocysteine
  MOD_RES (135)..(136): Selenocysteine
MPSQEPPVDDKNEDADLPSEEXDGIAYISSSRKHDSIKDDSEDLKPVIDGMDGIKISQGLGLQDFDLIRVIGRGSYAKVLLVRLKKNDQIYAMKVVKKELVHDDEDIDWVQXEKHVFEQASSNPFLVGLHSCFQXX

SEQ ID NO: 21408 - protein, 347 aa, Homo sapiens
  MOD_RES (22)..(22): Selenocysteine
  MOD_RES (112)..(112): Selenocysteine
  MOD_RES (135)..(136): Selenocysteine
  MOD_RES (206)..(206): Selenocysteine
  MOD_RES (220)..(221): Selenocysteine
  MOD_RES (223)..(223): Selenocysteine
  MOD_RES (227)..(227): Selenocysteine
  MOD_RES (268)..(268): Selenocysteine
  MOD_RES (275)..(275): Selenocysteine
  MOD_RES (320)..(320): Selenocysteine
  MOD_RES (342)..(342): Selenocysteine
  MOD_RES (345)..(345): Selenocysteine
MPSQEPPVDDKNEDADLPSEEXDGIAYISSSRKHDSIKDDSEDLKPVIDGMDGIKISQGLGLQDFDLIRVIGRGSYAKVLLVRLKKNDQIYAMKVVKKELVHDDEDIDWVQXEKHVFEQASSNPFLVGLHSCFQXXSRLFLVIEYVNGGDLMFHMQRQRKLPEEHARFYAAEICIALNFLHERGIIYRDLKLDNVLLDADGHIKLXDYGMCKEGLGPGDXXSXFCGXPNYIAPEILRGEEYGFSVDWWALGVLMFEMMAGRSPFDIIXDNPDMNXEDYLFQVILEKPIRIPRFLSVKASHVLKGFLNKDPKERLGCRPQXGFSDIKSHAFFRSIDWDLVFHXKNXSN

SEQ ID NO: 21409 - protein, 592 aa, Homo sapiens
  MOD_RES (5)..(5): Selenocysteine
  MOD_RES (29)..(29): Selenocysteine
  MOD_RES (35)..(36): Selenocysteine
  MOD_RES (57)..(57): Selenocysteine
  MOD_RES (69)..(69): Selenocysteine
  MOD_RES (99)..(99): Selenocysteine
  MOD_RES (179)..(179): Selenocysteine
  MOD_RES (209)..(209): Selenocysteine
  MOD_RES (299)..(299): Selenocysteine
  MOD_RES (322)..(323): Selenocysteine
  MOD_RES (393)..(393): Selenocysteine
  MOD_RES (407)..(408): Selenocysteine
  MOD_RES (410)..(410): Selenocysteine
  MOD_RES (414)..(414): Selenocysteine
  MOD_RES (455)..(455): Selenocysteine
  MOD_RES (462)..(462): Selenocysteine
  MOD_RES (507)..(507): Selenocysteine
  MOD_RES (540)..(540): Selenocysteine
  MOD_RES (550)..(550): Selenocysteine
  MOD_RES (553)..(553): Selenocysteine
  MOD_RES (560)..(560): Selenocysteine
  MOD_RES (588)..(588): Selenocysteine
MPSRXGPKMEGSGGRVRLKAHYGGDIFIXSVDAAXXFEELCEEVRDMCRLHQQHPLXLKWVDSEGDPCXVSSQMELEEAFRLARQCRDEGLIIHVFPSXPEQPGLPCPGEDKSIYRRGARRWRKLYRANGHLFQAKRFNRRAYCGQCSERIWGLARQGYRCINCKLLVHKRCHGLVPLXCRKHMDSVMPSQEPPVDDKNEDADLPSEEXDGIAYISSSRKHDSIKDDSEDLKPVIDGMDGIKISQGLGLQDFDLIRVIGRGSYAKVLLVRLKKNDQIYAMKVVKKELVHDDEDIDWVQXEKHVFEQASSNPFLVGLHSCFQXXSRLFLVIEYVNGGDLMFHMQRQRKLPEEHARFYAAEICIALNFLHERGIIYRDLKLDNVLLDADGHIKLXDYGMCKEGLGPGDXXSXFCGXPNYIAPEILRGEEYGFSVDWWALGVLMFEMMAGRSPFDIIXDNPDMNXEDYLFQVILEKPIRIPRFLSVKASHVLKGFLNKDPKERLGCRPQXGFSDIKSHAFFRSIDWDLLEKKQALPPFQPQIXDDYGLDNFDXQFXSEPVQLXPDDEDAIKRIDQSEFEGFEYINPLLLSXEESV

SEQ ID NO: 21410 - protein, 181 aa, Homo sapiens
  MOD_RES (5)..(5): Selenocysteine
  MOD_RES (29)..(29): Selenocysteine
  MOD_RES (35)..(36): Selenocysteine
  MOD_RES (57)..(57): Selenocysteine
  MOD_RES (69)..(69): Selenocysteine
  MOD_RES (149)..(149): Selenocysteine
  MOD_RES (179)..(179): Selenocysteine
MPSRXGPKMEGSGGRVRLKAHYGGDIFIXSVDAAXXFEELCEEVRDMCRLHQQHPLXLKWVDSEVFPSXPEQPGLPCPGEDKSIYRRGARRWRKLYRANGHLFQAKRFNRRAYCGQCSERIWGLARQGYRCINCKLLVHKRCHGLVPLXCRKHMDSVMPSQEPPVDDKNEDADLPSEEXDG

SEQ ID NO: 21411 - protein, 80 aa, Homo sapiens
  MOD_RES (28)..(28): Selenocysteine
  MOD_RES (68)..(68): Selenocysteine
  MOD_RES (79)..(79): Selenocysteine
EVLRNKGYNRSLDMWSVGVIIYVSLSGXFPFNEDEDIHDQIQNAAFMYPPNPWKEISHEDVDLIQYNXYILGCLSSHCXA

SEQ ID NO: 21412 - protein, 117 aa, Homo sapiens
  MOD_RES (11)..(11): Selenocysteine
  MOD_RES (32)..(32): Selenocysteine
  MOD_RES (61)..(61): Selenocysteine
MILSPPQPCGXFPECGFYGMYDKILLFRHDPXSENILQLVKAASDIQEGDLIEVVLSASAXFEDFQIRPHALFVHSYRAPAFCDHCGEMLWGLVRQGLKCEGCGLNYHKRCAFKIPN

SEQ ID NO: 21413 - protein, 912 aa, Homo sapiens
  MOD_RES (109)..(109): Selenocysteine
  MOD_RES (138)..(138): Selenocysteine
  MOD_RES (210)..(210): Selenocysteine
  MOD_RES (214)..(214): Selenocysteine
  MOD_RES (217)..(217): Selenocysteine
  MOD_RES (224)..(224): Selenocysteine
  MOD_RES (272)..(272): Selenocysteine
  MOD_RES (279)..(279): Selenocysteine
  MOD_RES (282)..(282): Selenocysteine
  MOD_RES (325)..(325): Selenocysteine
  MOD_RES (395)..(395): Selenocysteine
  MOD_RES (400)..(400): Selenocysteine
  MOD_RES (416)..(416): Selenocysteine
  MOD_RES (422)..(422): Selenocysteine
  MOD_RES (433)..(433): Selenocysteine
  MOD_RES (437)..(437): Selenocysteine
  MOD_RES (452)..(452): Selenocysteine
  MOD_RES (458)..(458): Selenocysteine
  MOD_RES (479)..(479): Selenocysteine
  MOD_RES (495)..(496): Selenocysteine
  MOD_RES (521)..(521): Selenocysteine
  MOD_RES (552)..(552): Selenocysteine
  MOD_RES (554)..(554): Selenocysteine
  MOD_RES (579)..(579): Selenocysteine
  MOD_RES (605)..(605): Selenocysteine
  MOD_RES (621)..(621): Selenocysteine
  MOD_RES (651)..(651): Selenocysteine
  MOD_RES (683)..(683): Selenocysteine
  MOD_RES (688)..(688): Selenocysteine
  MOD_RES (746)..(746): Selenocysteine
  MOD_RES (780)..(780): Selenocysteine
  MOD_RES (833)..(833): Selenocysteine
  MOD_RES (844)..(844): Selenocysteine
  MOD_RES (861)..(861): Selenocysteine
  MOD_RES (882)..(882): Selenocysteine
  MOD_RES (894)..(894): Selenocysteine
  MOD_RES (897)..(897): Selenocysteine
  MOD_RES (900)..(900): Selenocysteine
MSAPPVLRPPSPLLPVAAAAAAAAAALVPGSGPGPAPFLAPVAAPVGGISFHLQIGLSREPVLLLQDSSGDYSLAHVREMACSIVDQKFPECGFYGMYDKILLFRHDPXSENILQLVKAASDIQEGDLIEVVLSASAXFEDFQIRPHALFVHSYRAPAFCDHCGEMLWGLVRQGLKCEGCGLNYHKRCAFKIPNNCSGVRRRRLSNVSLXGVSXIRXSSAELSXSAPDEPLLQKSPSESFIGREKRSNSQSYIGRPIHLDKILMSKVKVPHXFVIHSYXRPXVCQYCKKLLKGLFRQGLQCKDCRFNCHKRCAPKVPNNCLGEVXINGDLLSPGAESDVVMEEGSDDNDSERNSGLMDDMEEAMVQDAEMAMAECQNDSGEMQDPDPDHEDANRXISPSXSNNIPLMRVVQSVKHXKRKSSXVMKEGWMVHYXSKDXLRKRHYWRLDSKCIXLFQNDXGSRYYKEIPLSEILSLEPVKXSALIPNGANPHCFEIXXANVVYYVGENVVNPSSPSPNNSVLXSGVGADVARMWEIAIQHALMPVIPKGSSVGXGXNLHRDISVSISVSNCQIQENVDISXVYQIFPDEVLGSGQFGIVYGGKHRKXGRDVAIKIIDKLRFPXKQESQLRNEVAILQNLHHPGVVNLECMFEXPERVFVVMEKLHGDMLEMILSSEKGRLPEHIXKFLIXQILVALRHLHFKNIVHCDLKPENVLLASADPFPQVKLCDFGFARIIGEKSFRRSVVGXPAYLAPEVLRNKGYNRSLDMWSVGVIIYVSLSGXFPFNEDEDIHDQIQNAAFMYPPNPWKEISHEAIDLINNLLQVKMRKRYSVDKXLSHPWLQDYQXWLDLRELECKIGERYIXHESDDLRWEKYAGEQGLQYPXHLINPSASHSDXPEXEEXEMKALGERVSIL

SEQ ID NO: 21414 - protein, 920 aa, Homo sapiens
  MOD_RES (109)..(109): Selenocysteine
  MOD_RES (138)..(138): Selenocysteine
  MOD_RES (210)..(210): Selenocysteine
  MOD_RES (214)..(214): Selenocysteine
  MOD_RES (217)..(217): Selenocysteine
  MOD_RES (224)..(224): Selenocysteine
  MOD_RES (280)..(280): Selenocysteine
  MOD_RES (287)..(287): Selenocysteine
  MOD_RES (290)..(290): Selenocysteine
  MOD_RES (333)..(333): Selenocysteine
  MOD_RES (403)..(403): Selenocysteine
  MOD_RES (408)..(408): Selenocysteine
  MOD_RES (424)..(424): Selenocysteine
  MOD_RES (430)..(430): Selenocysteine
  MOD_RES (441)..(441): Selenocysteine
  MOD_RES (445)..(445): Selenocysteine
  MOD_RES (460)..(460): Selenocysteine
  MOD_RES (466)..(466): Selenocysteine
  MOD_RES (487)..(487): Selenocysteine
  MOD_RES (503)..(504): Selenocysteine
  MOD_RES (529)..(529): Selenocysteine
  MOD_RES (560)..(560): Selenocysteine
  MOD_RES (562)..(562): Selenocysteine
  MOD_RES (587)..(587): Selenocysteine
  MOD_RES (613)..(613): Selenocysteine
  MOD_RES (629)..(629): Selenocysteine
  MOD_RES (659)..(659): Selenocysteine
  MOD_RES (691)..(691): Selenocysteine
  MOD_RES (696)..(696): Selenocysteine
  MOD_RES (754)..(754): Selenocysteine
  MOD_RES (788)..(788): Selenocysteine
  MOD_RES (841)..(841): Selenocysteine
  MOD_RES (852)..(852): Selenocysteine
  MOD_RES (869)..(869): Selenocysteine
  MOD_RES (890)..(890): Selenocysteine
  MOD_RES (902)..(902): Selenocysteine
  MOD_RES (905)..(905): Selenocysteine
  MOD_RES (908)..(908): Selenocysteine
MSAPPVLRPPSPLLPVAAAAAAAAAALVPGSGPGPAPFLAPVAAPVGGISFHLQIGLSREPVLLLQDSSGDYSLAHVREMACSIVDQKFPECGFYGMYDKILLFRHDPXSENILQLVKAASDIQEGDLIEVVLSASAXFEDFQIRPHALFVHSYRAPAFCDHCGEMLWGLVRQGLKCEGCGLNYHKRCAFKIPNNCSGVRRRRLSNVSLXGVSXIRXSSAELSXSAPDEPLLSPVSPGFEQKSPSESFIGREKRSNSQSYIGRPIHLDKILMSKVKVPHXFVIHSYXRPXVCQYCKKLLKGLFRQGLQCKDCRFNCHKRCAPKVPNNCLGEVXINGDLLSPGAESDVVMEEGSDDNDSERNSGLMDDMEEAMVQDAEMAMAECQNDSGEMQDPDPDHEDANRXISPSXSNNIPLMRVVQSVKHXKRKSSXVMKEGWMVHYXSKDXLRKRHYWRLDSKCIXLFQNDXGSRYYKEIPLSEILSLEPVKXSALIPNGANPHCFEIXXANVVYYVGENVVNPSSPSPNNSVLXSGVGADVARMWEIAIQHALMPVIPKGSSVGXGXNLHRDISVSISVSNCQIQENVDISXVYQIFPDEVLGSGQFGIVYGGKHRKXGRDVAIKIIDKLRFPXKQESQLRNEVAILQNLHHPGVVNLECMFEXPERVFVVMEKLHGDMLEMILSSEKGRLPEHIXKFLIXQILVALRHLHFKNIVHCDLKPENVLLASADPFPQVKLCDFGFARIIGEKSFRRSVVGXPAYLAPEVLRNKGYNRSLDMWSVGVIIYVSLSGXFPFNEDEDIHDQIQNAAFMYPPNPWKEISHEAIDLINNLLQVKMRKRYSVDKXLSHPWLQDYQXWLDLRELECKIGERYIXHESDDLRWEKYAGEQGLQYPXHLINPSASHSDXPEXEEXEMKALGERVSIL

SEQ ID NO: 21415 - protein, 157 aa, Homo sapiens
  MOD_RES (3)..(3): Selenocysteine
  MOD_RES (14)..(14): Selenocysteine
  MOD_RES (18)..(18): Selenocysteine
  MOD_RES (33)..(33): Selenocysteine
  MOD_RES (39)..(39): Selenocysteine
  MOD_RES (60)..(60): Selenocysteine
  MOD_RES (76)..(77): Selenocysteine
  MOD_RES (102)..(102): Selenocysteine
  MOD_RES (133)..(133): Selenocysteine
  MOD_RES (135)..(135): Selenocysteine
  MOD_RES (146)..(146): Selenocysteine
SSXVMKEGWMVHYXSKDXLRKRHYWRLDSKCIXLFQNDXGSRYYKEIPLSEILSLEPVKXSALIPNGANPHCFEIXXANVVYYVGENVVNPSSPSPNNSVLXSGVGADVARMWEIAIQHALMPVIPKGSSVGXGXNLHSESASFLXSPKLIMCLPLA

SEQ ID NO: 21416 - protein, 69 aa, Homo sapiens
  MOD_RES (3)..(3): Selenocysteine
  MOD_RES (54)..(54): Selenocysteine
MAXAPSYPAGLPGSPGPGSPPPPGGLELQSPPPLLPQIPAPGSGVSFHIQIGLXREFVLLPAASELAHV

SEQ ID NO: 21417 - protein, 878 aa, Homo sapiens
  MOD_RES (3)..(3): Selenocysteine
  MOD_RES (54)..(54): Selenocysteine
  MOD_RES (101)..(101): Selenocysteine
  MOD_RES (130)..(130): Selenocysteine
  MOD_RES (142)..(142): Selenocysteine
  MOD_RES (199)..(199): Selenocysteine
  MOD_RES (211)..(211): Selenocysteine
  MOD_RES (218)..(218): Selenocysteine
  MOD_RES (226)..(227): Selenocysteine
  MOD_RES (247)..(247): Selenocysteine
  MOD_RES (266)..(266): Selenocysteine
  MOD_RES (273)..(273): Selenocysteine
  MOD_RES (276)..(276): Selenocysteine
  MOD_RES (308)..(308): Selenocysteine
  MOD_RES (330)..(330): Selenocysteine
  MOD_RES (391)..(392): Selenocysteine
  MOD_RES (397)..(398): Selenocysteine
  MOD_RES (412)..(412): Selenocysteine
  MOD_RES (427)..(427): Selenocysteine
  MOD_RES (433)..(434): Selenocysteine
  MOD_RES (448)..(448): Selenocysteine
  MOD_RES (462)..(462): Selenocysteine
  MOD_RES (471)..(471): Selenocysteine
  MOD_RES (475)..(475): Selenocysteine
  MOD_RES (485)..(485): Selenocysteine
  MOD_RES (502)..(502): Selenocysteine
  MOD_RES (547)..(547): Selenocysteine
  MOD_RES (573)..(573): Selenocysteine
  MOD_RES (589)..(589): Selenocysteine
  MOD_RES (619)..(619): Selenocysteine
  MOD_RES (651)..(651): Selenocysteine
  MOD_RES (656)..(656): Selenocysteine
  MOD_RES (714)..(714): Selenocysteine
  MOD_RES (748)..(748): Selenocysteine
  MOD_RES (812)..(812): Selenocysteine
  MOD_RES (829)..(829): Selenocysteine
  MOD_RES (853)..(853): Selenocysteine
MAXAPSYPAGLPGSPGPGSPPPPGGLELQSPPPLLPQIPAPGSGVSFHIQIGLXREFVLLPAASELAHVKQLACSIVDQKFPECGFYGLYDKILLFKHDPXSANLLQLVRSSGDIQEGDLVEVVLSASAXFEDFQIRPHALXVHSYRAPAFCDHCGEMLFGLVRQGLKCDGCGLNYHKRCAFSIPNNCSGARKRRLSSXSLASGHSVRLGXSESLPCXAEELSRSXXELLPRRPPSSSSSSSASSYXGRPIELDKMLLSKVKVPHXFLIHSYXRPXVCQACKKLLKGLFRQGLQCKDCKFNCHKRCAXRVPNDCLGEALINGDVPMEEAXDFSEADKSALMDESEDSGVIPGSHSENALHASEEEEGEGGKAQSSLGYIPLMRVVQSVRHXXRKSSXXLREGWVVHYSNKDXLRKRHYWRLDCKCIXLFQNNXXNRYYKEIPLSEILXVESAQNFSLVPPGXNPHCFEIVXANAXYFVGEMPGGXPGGPSGQGAEAARGWEXAIRQALMPVILQDAPSAPGHAPHRQASLSISVSNSQIQENVDIAXVYQIFPDEVLGSGQFGVVYGGKHRKXGRDVAVKVIDKLRFPXKQESQLRNEVAILQSLRHPGIVNLECMFEXPEKVFVVMEKLHGDMLEMILSSEKGRLPERLXKFLIXQILVALRHLHFKNIVHCDLKPENVLLASADPFPQVKLCDFGFARIIGEKSFRRSVVGXPAYLAPEVLLNQGYNRSLDMWSVGVIMYVSLSGXFPFNEDEDINDQIQNAAFMYPASPWSHISAGAIDLINNLLQVKMRKRYSVDKSLSHPWLQEYQXWLDLRELEGKMGERYIXHESDDARWEQFAAEHPLPGSGLPXDRDLGGACPPQDHDMQGLAERISVL

SEQ ID NO: 21418 - protein, 888 aa, Homo sapiens
  MOD_RES (3)..(3): Selenocysteine
  MOD_RES (54)..(54): Selenocysteine
  MOD_RES (101)..(101): Selenocysteine
  MOD_RES (130)..(130): Selenocysteine
  MOD_RES (142)..(142): Selenocysteine
  MOD_RES (199)..(199): Selenocysteine
  MOD_RES (211)..(211): Selenocysteine
  MOD_RES (218)..(218): Selenocysteine
  MOD_RES (226)..(227): Selenocysteine
  MOD_RES (247)..(247): Selenocysteine
  MOD_RES (266)..(266): Selenocysteine
  MOD_RES (273)..(273): Selenocysteine
  MOD_RES (276)..(276): Selenocysteine
  MOD_RES (308)..(308): Selenocysteine
  MOD_RES (330)..(330): Selenocysteine
  MOD_RES (391)..(392): Selenocysteine
  MOD_RES (397)..(398): Selenocysteine
  MOD_RES (412)..(412): Selenocysteine
  MOD_RES (427)..(427): Selenocysteine
  MOD_RES (433)..(434): Selenocysteine
  MOD_RES (448)..(448): Selenocysteine
  MOD_RES (462)..(462): Selenocysteine
  MOD_RES (471)..(471): Selenocysteine
  MOD_RES (475)..(475): Selenocysteine
  MOD_RES (485)..(485): Selenocysteine
  MOD_RES (502)..(502): Selenocysteine
  MOD_RES (547)..(547): Selenocysteine
  MOD_RES (573)..(573): Selenocysteine
  MOD_RES (589)..(589): Selenocysteine
  MOD_RES (619)..(619): Selenocysteine
  MOD_RES (651)..(651): Selenocysteine
  MOD_RES (656)..(656): Selenocysteine
  MOD_RES (714)..(714): Selenocysteine
  MOD_RES (748)..(748): Selenocysteine
  MOD_RES (786)..(786): Selenocysteine
  MOD_RES (822)..(822): Selenocysteine
  MOD_RES (839)..(839): Selenocysteine
  MOD_RES (863)..(863): Selenocysteine
MAXAPSYPAGLPGSPGPGSPPPPGGLELQSPPPLLPQIPAPGSGVSFHIQIGLXREFVLLPAASELAHVKQLACSIVDQKFPECGFYGLYDKILLFKHDPXSANLLQLVRSSGDIQEGDLVEVVLSASAXFEDFQIRPHALXVHSYRAPAFCDHCGEMLFGLVRQGLKCDGCGLNYHKRCAFSIPNNCSGARKRRLSSXSLASGHSVRLGXSESLPCXAEELSRSXXELLPRRPPSSSSSSSASSYXGRPIELDKMLLSKVKVPHXFLIHSYXRPXVCQACKKLLKGLFRQGLQCKDCKFNCHKRCAXRVPNDCLGEALINGDVPMEEAXDFSEADKSALMDESEDSGVIPGSHSENALHASEEEEGEGGKAQSSLGYIPLMRVVQSVRHXXRKSSXXLREGWVVHYSNKDXLRKRHYWRLDCKCIXLFQNNXXNRYYKEIPLSEILXVESAQNFSLVPPGXNPHCFEIVXANAXYFVGEMPGGXPGGPSGQGAEAARGWEXAIRQALMPVILQDAPSAPGHAPHRQASLSISVSNSQIQENVDIAXVYQIFPDEVLGSGQFGVVYGGKHRKXGRDVAVKVIDKLRFPXKQESQLRNEVAILQSLRHPGIVNLECMFEXPEKVFVVMEKLHGDMLEMILSSEKGRLPERLXKFLIXQILVALRHLHFKNIVHCDLKPENVLLASADPFPQVKLCDFGFARIIGEKSFRRSVVGXPAYLAPEVLLNQGYNRSLDMWSVGVIMYVSLSGXFPFNEDEDINDQIQNAAFMYPASPWSHISAGGAWGPPXPWAAIDLINNLLQVKMRKRYSVDKSLSHPWLQEYQXWLDLRELEGKMGERYIXHESDDARWEQFAAEHPLPGSGLPXDRDLGGACPPQDHDMQGLAERISVL

SEQ ID NO: 21419 - protein, 94 aa, Homo sapiens
  MOD_RES (25)..(25): Selenocysteine
  MOD_RES (47)..(47): Selenocysteine
MLFGLVRQGLKCDDCKFNCHKRCAXRVPNDCLGEALINGDVPMEEAXDFSEADKSALMDESEDSGVIPGSHSENALHASEEEEGEGGKAQSSLG

SEQ ID NO: 21420 - protein, 18 aa, Homo sapiens
MLFGLVRQGLKCDGCGLN

SEQ ID NO: 21421 - protein, 721 aa, Homo sapiens
  MOD_RES (42)..(42): Selenocysteine
  MOD_RES (54)..(54): Selenocysteine
  MOD_RES (61)..(61): Selenocysteine
  MOD_RES (69)..(70): Selenocysteine
  MOD_RES (90)..(90): Selenocysteine
  MOD_RES (109)..(109): Selenocysteine
  MOD_RES (116)..(116): Selenocysteine
  MOD_RES (119)..(119): Selenocysteine
  MOD_RES (151)..(151): Selenocysteine
  MOD_RES (173)..(173): Selenocysteine
  MOD_RES (234)..(235): Selenocysteine
  MOD_RES (240)..(241): Selenocysteine
  MOD_RES (255)..(255): Selenocysteine
  MOD_RES (270)..(270): Selenocysteine
  MOD_RES (276)..(277): Selenocysteine
  MOD_RES (291)..(291): Selenocysteine
  MOD_RES (305)..(305): Selenocysteine
  MOD_RES (314)..(314): Selenocysteine
  MOD_RES (318)..(318): Selenocysteine
  MOD_RES (328)..(328): Selenocysteine
  MOD_RES (345)..(345): Selenocysteine
  MOD_RES (390)..(390): Selenocysteine
  MOD_RES (416)..(416): Selenocysteine
  MOD_RES (432)..(432): Selenocysteine
  MOD_RES (462)..(462): Selenocysteine
  MOD_RES (494)..(494): Selenocysteine
  MOD_RES (499)..(499): Selenocysteine
  MOD_RES (557)..(557): Selenocysteine
  MOD_RES (591)..(591): Selenocysteine
  MOD_RES (655)..(655): Selenocysteine
  MOD_RES (672)..(672): Selenocysteine
  MOD_RES (696)..(696): Selenocysteine
MLFGLVRQGLKCDGCGLNYHKRCAFSIPNNCSGARKRRLSSXSLASGHSVRLGXSESLPCXAEELSRSXXELLPRRPPSSSSSSSASSYXGRPIELDKMLLSKVKVPHXFLIHSYXRPXVCQACKKLLKGLFRQGLQCKDCKFNCHKRCAXRVPNDCLGEALINGDVPMEEAXDFSEADKSALMDESEDSGVIPGSHSENALHASEEEEGEGGKAQSSLGYIPLMRVVQSVRHXXRKSSXXLREGWVVHYSNKDXLRKRHYWRLDCKCIXLFQNNXXNRYYKEIPLSEILXVESAQNFSLVPPGXNPHCFEIVXANAXYFVGEMPGGXPGGPSGQGAEAARGWEXAIRQALMPVILQDAPSAPGHAPHRQASLSISVSNSQIQENVDIAXVYQIFPDEVLGSGQFGVVYGGKHRKXGRDVAVKVIDKLRFPXKQESQLRNEVAILQSLRHPGIVNLECMFEXPEKVFVVMEKLHGDMLEMILSSEKGRLPERLXKFLIXQILVALRHLHFKNIVHCDLKPENVLLASADPFPQVKLCDFGFARIIGEKSFRRSVVGXPAYLAPEVLLNQGYNRSLDMWSVGVIMYVSLSGXFPFNEDEDINDQIQNAAFMYPASPWSHISAGAIDLINNLLQVKMRKRYSVDKSLSHPWLQEYQXWLDLRELEGKMGERYIXHESDDARWEQFAAEHPLPGSGLPXDRDLGGACPPQDHDMQGLAERISVL

SEQ ID NO: 21422 - protein, 67 aa, Homo sapiens
  MOD_RES (42)..(42): Selenocysteine
  MOD_RES (54)..(54): Selenocysteine
  MOD_RES (61)..(61): Selenocysteine
MLFGLVRQGLKCDGCGLNYHKRCAFSIPNNCSGARKRRLSSXSLASGHSVRLGXSESLPCXAEELVR

SEQ ID NO: 21423 - protein, 73 aa, Homo sapiens
  MOD_RES (12)..(12): Selenocysteine
  MOD_RES (45)..(45): Selenocysteine
  MOD_RES (51)..(51): Selenocysteine
  MOD_RES (56)..(56): Selenocysteine
  MOD_RES (66)..(66): Selenocysteine
SGVSFHIQIGLXREFVLLPAASELAHVKQLACSIVDQKPRPPSRXSRSARXPSRCXPIGRLPSVIXAGRCSSA

SEQ ID NO: 21424 - protein, 153 aa, Homo sapiens
  MOD_RES (1)..(1): Any amino acid
  MOD_RES (22)..(22): Selenocysteine
  MOD_RES (48)..(48): Selenocysteine
  MOD_RES (64)..(64): Selenocysteine
  MOD_RES (94)..(94): Selenocysteine
  MOD_RES (126)..(126): Selenocysteine
  MOD_RES (131)..(131): Selenocysteine
  MOD_RES (143)..(143): Selenocysteine
  MOD_RES (152)..(152): Selenocysteine
XQASLSISVSNSQIQENVDIAXVYQIFPDEVLGSGQFGVVYGGKHRKXGRDVAVKVIDKLRFPXKQESQLRNEVAILQSLRHPGIVNLECMFEXPEKVFVVMEKLHGDMLEMILSSEKGRLPERLXKFLIXQISAFWALACPXPKPCAKPFXS

SEQ ID NO: 21425 - protein, 890 aa, Homo sapiens
  MOD_RES (17)..(17): Selenocysteine
  MOD_RES (34)..(34): Selenocysteine
  MOD_RES (51)..(51): Selenocysteine
  MOD_RES (59)..(59): Selenocysteine
  MOD_RES (69)..(69): Selenocysteine
  MOD_RES (74)..(74): Selenocysteine
  MOD_RES (126)..(126): Selenocysteine
  MOD_RES (146)..(146): Selenocysteine
  MOD_RES (156)..(156): Selenocysteine
  MOD_RES (166)..(166): Selenocysteine
  MOD_RES (273)..(273): Selenocysteine
  MOD_RES (280)..(280): Selenocysteine
  MOD_RES (283)..(283): Selenocysteine
  MOD_RES (326)..(326): Selenocysteine
  MOD_RES (336)..(336): Selenocysteine
  MOD_RES (338)..(338): Selenocysteine
  MOD_RES (360)..(360): Selenocysteine
  MOD_RES (389)..(389): Selenocysteine
  MOD_RES (394)..(394): Selenocysteine
  MOD_RES (410)..(410): Selenocysteine
  MOD_RES (416)..(416): Selenocysteine
  MOD_RES (427)..(427): Selenocysteine
  MOD_RES (446)..(446): Selenocysteine
  MOD_RES (475)..(475): Selenocysteine
  MOD_RES (490)..(490): Selenocysteine
  MOD_RES (492)..(492): Selenocysteine
  MOD_RES (513)..(513): Selenocysteine
  MOD_RES (535)..(535): Selenocysteine
  MOD_RES (542)..(542): Selenocysteine
  MOD_RES (555)..(555): Selenocysteine
  MOD_RES (572)..(572): Selenocysteine
  MOD_RES (598)..(598): Selenocysteine
  MOD_RES (614)..(614): Selenocysteine
  MOD_RES (644)..(644): Selenocysteine
  MOD_RES (676)..(676): Selenocysteine
  MOD_RES (681)..(681): Selenocysteine
  MOD_RES (739)..(739): Selenocysteine
  MOD_RES (773)..(773): Selenocysteine
  MOD_RES (837)..(837): Selenocysteine
  MOD_RES (846)..(846): Selenocysteine
  MOD_RES (854)..(854): Selenocysteine
  MOD_RES (868)..(868): Selenocysteine
MSANNSPPSAQKSVLPXAIPAVLPAASPCSSPKXGLSARLSNGSFSAPSLXNSRGSVHXVSFLLQIGLXRESVXIEAQELSLSAVKDLVCSIVYQKFPECGFFGMYDKILLFRHDMNSENILQLIXSADEIHEGDLVEVVLSALAXVEDFQIRPHXLYVHSYKAPXFCDYCGEMLWGLVRQGLKCEGCGLNYHKRCAFKIPNNCSGVRKRRLSNVSLPGPGLSVPRPLQPEYVALPSEESHVHQEPSKRIPSWSGRPIWMEKMVMCRVKVPHXFAVHSYXRPXICQYCKRLLKGLFRQGMQCKDCKFNCHKRCASKVPRDCLGEVXFNGEPSSLGXDXDIPMDIDNNDINSDSSRGLDDXEEPSPPEDKMFFLDPSDLDVERDEEAVKXISPSXSNNIPLMRVVQSIKHXKRKSSXMVKEGWMVHYXSRDNLRKRHYWRLDSKCLXLFQNESGSKYYKEIPLSEILRISSPRDFXNISQGSNPHCFEIIXDXMVYFVGENNGDSSHNPVLAAXGVGLDVAQSWEKAIRQALMPVXPQASVCXSPGQGKDHKDLSXSISVSNCQIQENVDISXVYQIFADEVLGSGQFGIVYGGKHRKXGRDVAIKVIDKMRFPXKQESQLRNEVAILQNLHHPGIVNLECMFEXPERVFVVMEKLHGDMLEMILSSEKSRLPERIXKFMVXQILVALRNLHFKNIVHCDLKPENVLLASAEPFPQVKLCDFGFARIIGEKSFRRSVVGXPAYLAPEVLRSKGYNRSLDMWSVGVIIYVSLSGXFPFNEDEDINDQIQNAAFMYPPNPWREISGEAIDLINNLLQVKMRKRYSVDKSLSHPWLQDYQXWLDLREFEXRIGERYIXHESDDARWEIHAYXHNLVYPKHFIMAPNPDDMEEDP

SEQ ID NO: 21426 - protein, 181 aa, Homo sapiens
  MOD_RES (22)..(22): Selenocysteine
  MOD_RES (42)..(42): Selenocysteine
  MOD_RES (52)..(52): Selenocysteine
  MOD_RES (62)..(62): Selenocysteine
  MOD_RES (169)..(169): Selenocysteine
  MOD_RES (176)..(176): Selenocysteine
  MOD_RES (179)..(179): Selenocysteine
MYDKILLFRHDMNSENILQLIXSADEIHEGDLVEVVLSALAXVEDFQIRPHXLYVHSYKAPXFCDYCGEMLWGLVRQGLKCEGCGLNYHKRCAFKIPNNCSGVRKRRLSNVSLPGPGLSVPRPLQPEYVALPSEESHVHQEPSKRIPSWSGRPIWMEKMVMCRVKVPHXFAVHSYXRPXIC

SEQ ID NO: 21427 - protein, 173 aa, Homo sapiens
  MOD_RES (1)..(1): Selenocysteine
  MOD_RES (3)..(3): Selenocysteine
  MOD_RES (24)..(24): Selenocysteine
  MOD_RES (46)..(46): Selenocysteine
  MOD_RES (53)..(53): Selenocysteine
  MOD_RES (66)..(66): Selenocysteine
  MOD_RES (83)..(83): Selenocysteine
  MOD_RES (112)..(112): Selenocysteine
  MOD_RES (125)..(125): Selenocysteine
  MOD_RES (133)..(133): Selenocysteine
  MOD_RES (149)..(149): Selenocysteine
XDXMVYFVGENNGDSSHNPVLAAXGVGLDVAQSWEKAIRQALMPVXPQASVCXSPGQGKDHKDLSXSISVSNCQIQENVDISXVYQIFADEVLGSGQFGIVYGDLSVLRVVXSLEDFLSSEEQRXVRGKHRKXGRDVAIKVIDKMRFPXKQESQLRNEVAILQNLHHPGIVNL

SEQ ID NO: 21428 - protein, 185 aa, Homo sapiens
  MOD_RES (1)..(1): Any amino acid
  MOD_RES (2)..(2): Selenocysteine
  MOD_RES (19)..(19): Selenocysteine
  MOD_RES (45)..(45): Selenocysteine
  MOD_RES (61)..(61): Selenocysteine
  MOD_RES (132)..(132): Selenocysteine
  MOD_RES (166)..(166): Selenocysteine
XXSISVSNCQIQENVDISXVYQIFADEVLGSGQFGIVYGGKHRKXGRDVAIKVIDKMRFPXKQESQLRNEVAILQILVALRNLHFKNIVHCDLKPENVLLASAEPFPQVKLCDFGFARIIGEKSFRRSVVGXPAYLAPEVLRSKGYNRSLDMWSVGVIIYVSLSGXFPFNEDEDINDQIQNAAFM

SEQ ID NO: 21429 - protein, 4097 aa, Homo sapiens
  MOD_RES (18)..(18): Selenocysteine
  MOD_RES (55)..(55): Selenocysteine
  MOD_RES (110)..(110): Selenocysteine
  MOD_RES (112)..(112): Selenocysteine
  MOD_RES (116)..(116): Selenocysteine
  MOD_RES (137)..(137): Selenocysteine
  MOD_RES (169)..(169): Selenocysteine
  MOD_RES (206)..(206): Selenocysteine
  MOD_RES (209)..(209): Selenocysteine
  MOD_RES (235)..(235): Selenocysteine
  MOD_RES (244)..(244): Selenocysteine
  MOD_RES (284)..(284): Selenocysteine
  MOD_RES (304)..(304): Selenocysteine
  MOD_RES (398)..(398): Selenocysteine
  MOD_RES (400)..(400): Selenocysteine
  MOD_RES (402)..(402): Selenocysteine
  MOD_RES (426)..(426): Selenocysteine
  MOD_RES (432)..(432): Selenocysteine
  MOD_RES (481)..(481): Selenocysteine
  MOD_RES (516)..(516): Selenocysteine
  MOD_RES (523)..(523): Selenocysteine
  MOD_RES (582)..(582): Selenocysteine
  MOD_RES (587)..(587): Selenocysteine
  MOD_RES (605)..(605): Selenocysteine
  MOD_RES (658)..(658): Selenocysteine
  MOD_RES (673)..(673): Selenocysteine
  MOD_RES (731)..(731): Selenocysteine
  MOD_RES (763)..(763): Selenocysteine
  MOD_RES (802)..(802): Selenocysteine
  MOD_RES (809)..(809): Selenocysteine
  MOD_RES (837)..(837): Selenocysteine
  MOD_RES (872)..(872): Selenocysteine
  MOD_RES (874)..(874): Selenocysteine
  MOD_RES (915)..(915): Selenocysteine
  MOD_RES (920)..(920): Selenocysteine
  MOD_RES (926)..(926): Selenocysteine
  MOD_RES (946)..(946): Selenocysteine
  MOD_RES (965)..(965): Selenocysteine
  MOD_RES (980)..(980): Selenocysteine
  MOD_RES (996)..(996): Selenocysteine
  MOD_RES (1006)..(1006): Selenocysteine
  MOD_RES (1024)..(1024): Selenocysteine
  MOD_RES (1045)..(1045): Selenocysteine
  MOD_RES (1056)..(1056): Selenocysteine
  MOD_RES (1123)..(1123): Selenocysteine
  MOD_RES (1181)..(1181): Selenocysteine
  MOD_RES (1223)..(1223): Selenocysteine
  MOD_RES (1240)..(1240): Selenocysteine
  MOD_RES (1253)..(1253): Selenocysteine
  MOD_RES (1269)..(1269): Selenocysteine
  MOD_RES (1275)..(1275): Selenocysteine
  MOD_RES (1284)..(1284): Selenocysteine
  MOD_RES (1315)..(1315): Selenocysteine
  MOD_RES (1322)..(1322): Selenocysteine
  MOD_RES (1336)..(1336): Selenocysteine
  MOD_RES (1345)..(1347): Selenocysteine
  MOD_RES (1351)..(1351): Selenocysteine
  MOD_RES (1366)..(1366): Selenocysteine
  MOD_RES (1375)..(1375): Selenocysteine
  MOD_RES (1417)..(1417): Selenocysteine
  MOD_RES (1424)..(1424): Selenocysteine
  MOD_RES (1473)..(1473): Selenocysteine
  MOD_RES (1481)..(1481): Selenocysteine
  MOD_RES (1540)..(1540): Selenocysteine
  MOD_RES (1566)..(1566): Selenocysteine
  MOD_RES (1569)..(1569): Selenocysteine
  MOD_RES (1590)..(1590): Selenocysteine
  MOD_RES (1620)..(1621): Selenocysteine
  MOD_RES (1641)..(1641): Selenocysteine
  MOD_RES (1663)..(1663): Selenocysteine
  MOD_RES (1673)..(1674): Selenocysteine
  MOD_RES (1682)..(1682): Selenocysteine
  MOD_RES (1694)..(1694): Selenocysteine
  MOD_RES (1700)..(1700): Selenocysteine
  MOD_RES (1703)..(1703): Selenocysteine
  MOD_RES (1733)..(1733): Selenocysteine
  MOD_RES (1763)..(1763): Selenocysteine
  MOD_RES (1793)..(1793): Selenocysteine
  MOD_RES (1815)..(1815): Selenocysteine
  MOD_RES (1826)..(1826): Selenocysteine
  MOD_RES (1842)..(1842): Selenocysteine
  MOD_RES (1856)..(1856): Selenocysteine
  MOD_RES (1862)..(1862): Selenocysteine
  MOD_RES (1865)..(1865): Selenocysteine
  MOD_RES (1868)..(1868): Selenocysteine
  MOD_RES (1906)..(1906): Selenocysteine
  MOD_RES (1912)..(1912): Selenocysteine
  MOD_RES (1914)..(1914): Selenocysteine
  MOD_RES (1924)..(1924): Selenocysteine
  MOD_RES (2035)..(2035): Selenocysteine
  MOD_RES (2047)..(2047): Selenocysteine
  MOD_RES (2063)..(2063): Selenocysteine
  MOD_RES (2075)..(2075): Selenocysteine
  MOD_RES (2098)..(2098): Selenocysteine
  MOD_RES (2153)..(2153): Selenocysteine
  MOD_RES (2192)..(2192): Selenocysteine
  MOD_RES (2197)..(2197): Selenocysteine
  MOD_RES (2201)..(2201): Selenocysteine
  MOD_RES (2203)..(2203): Selenocysteine
  MOD_RES (2240)..(2240): Selenocysteine
  MOD_RES (2355)..(2355): Selenocysteine
  MOD_RES (2368)..(2368): Selenocysteine
  MOD_RES (2395)..(2395): Selenocysteine
  MOD_RES (2409)..(2409): Selenocysteine
  MOD_RES (2467)..(2468): Selenocysteine
  MOD_RES (2491)..(2491): Selenocysteine
  MOD_RES (2529)..(2529): Selenocysteine
  MOD_RES (2535)..(2535): Selenocysteine
  MOD_RES (2559)..(2559): Selenocysteine
  MOD_RES (2566)..(2566): Selenocysteine
  MOD_RES (2590)..(2590): Selenocysteine
  MOD_RES (2600)..(2600): Selenocysteine
  MOD_RES (2603)..(2603): Selenocysteine
  MOD_RES (2609)..(2609): Selenocysteine
  MOD_RES (2615)..(2615): Selenocysteine
  MOD_RES (2618)..(2618): Selenocysteine
  MOD_RES (2620)..(2620): Selenocysteine
  MOD_RES (2638)..(2638): Selenocysteine
  MOD_RES (2645)..(2645): Selenocysteine
  MOD_RES (2647)..(2647): Selenocysteine
  MOD_RES (2649)..(2649): Selenocysteine
  MOD_RES (2660)..(2660): Selenocysteine
  MOD_RES (2664)..(2664): Selenocysteine
  MOD_RES (2671)..(2671): Selenocysteine
  MOD_RES (2723)..(2723): Selenocysteine
  MOD_RES (2792)..(2792): Selenocysteine
  MOD_RES (2825)..(2825): Selenocysteine
  MOD_RES (2833)..(2833): Selenocysteine
  MOD_RES (2846)..(2847): Selenocysteine
  MOD_RES (2944)..(2944): Selenocysteine
  MOD_RES (2949)..(2949): Selenocysteine
  MOD_RES (2953)..(2953): Selenocysteine
  MOD_RES (2987)..(2987): Selenocysteine
  MOD_RES (3016)..(3016): Selenocysteine
  MOD_RES (3039)..(3039): Selenocysteine
  MOD_RES (3063)..(3063): Selenocysteine
  MOD_RES (3127)..(3127): Selenocysteine
  MOD_RES (3136)..(3136): Selenocysteine
  MOD_RES (3163)..(3163): Selenocysteine
  MOD_RES (3165)..(3165): Selenocysteine
  MOD_RES (3184)..(3184): Selenocysteine
  MOD_RES (3198)..(3198): Selenocysteine
  MOD_RES (3268)..(3268): Selenocysteine
  MOD_RES (3299)..(3299): Selenocysteine
  MOD_RES (3303)..(3303): Selenocysteine
  MOD_RES (3332)..(3333): Selenocysteine
  MOD_RES (3415)..(3415): Selenocysteine
  MOD_RES (3479)..(3479): Selenocysteine
  MOD_RES (3484)..(3484): Selenocysteine
  MOD_RES (3522)..(3522): Selenocysteine
  MOD_RES (3545)..(3545): Selenocysteine
  MOD_RES (3547)..(3547): Selenocysteine
  MOD_RES (3599)..(3599): Selenocysteine
  MOD_RES (3635)..(3635): Selenocysteine
  MOD_RES (3663)..(3663): Selenocysteine
  MOD_RES (3727)..(3727): Selenocysteine
  MOD_RES (3790)..(3790): Selenocysteine
  MOD_RES (3797)..(3797): Selenocysteine
  MOD_RES (3813)..(3813): Selenocysteine
  MOD_RES (3834)..(3834): Selenocysteine
  MOD_RES (3836)..(3836): Selenocysteine
  MOD_RES (3838)..(3838): Selenocysteine
  MOD_RES (3861)..(3861): Selenocysteine
  MOD_RES (3903)..(3903): Selenocysteine
  MOD_RES (3919)..(3919): Selenocysteine
  MOD_RES (3933)..(3933): Selenocysteine
  MOD_RES (3946)..(3946): Selenocysteine
  MOD_RES (3968)..(3968): Selenocysteine
  MOD_RES (3970)..(3970): Selenocysteine
  MOD_RES (4029)..(4029): Selenocysteine
  MOD_RES (4071)..(4071): Selenocysteine
  MOD_RES (4081)..(4081): Selenocysteine
  MOD_RES (4089)..(4089): Selenocysteine
MAGSGAGVRCSLLRLQEXLSAADRCGAALAGHQLIRGLGQECVLSSSPAVLALQXSLVFSRDFGLLVFVRKSLNSIEFRECREEILKFLCIFLEKMGQKIAPYSVEIKNXCXSVYXKDRAAKCKIPALDLLIKLLQXFRSSRLMDEFKIGELFSKFYGELALKKKIPDXVLEKVYELLGLLGEVHPSEMINNAENLFRAFLGELKXQMXSAVREPKLPVLAGCLKGLSSLLCNFXKSMEEDPQXSREIFNFVLKAIRPQIDLKRYAVPSAGLRLFALHASQFSXCLLDNYVSLFEVLLKWCAHXNVELKKAALSALESFLKQVSNMVAKNAEMHKNKLQYFMEQFYGIIRNVDSNNKELSIAIRGYGLFAGPCKVINAKDVDFMYVELIQRCKQMFLXQXDXGDDRVYQMPSFLQSVASVLLYLDXVPEVYXPVLEHLVVMQIDSFPQYSPKMQLVCCRAIVKVFLALAAKGPVLRNCISXVVHQGLIRICSKPVVLPKGPESESEDHRASGEVRXGKWKVPXYKDYVDLFRHLLSSDQMMDSILADEAFFSVNSSSESLNHLLYDEFVKSVLKIVEKLDLXLEIQXVGEQENGDEAPGVWMIPXSDPAANLHPAKPKDFSAFINLVEFCREILPEKQAEFFEPWVYSFSYELILQSXRLPLISGFYKLLSIXVRNAKKIKYFEGVSPKSLKHSPEDPEKYSCFALFVKFGKEVAVKMKQYKDELLASCLXFLLSLPHNIIELDVRAYVPALQMAFKLGLSYXPLAEVGLNALEEWSIYIDRHVMQPYYKDILPCLDGYLKXSALSDEXKNNWEVSALSRAAQKGFNKVVLKHLKKXKNLSSNEAISLEEIRIRVVQMLGSLGGQINKNLLXVXSSDEMMKSYVAWDREKRLSFAVPFREMKPVIFLDVFLPRVXELALXASDRQXKVAACELLHSMVMFMLGKAXQMPEGGQGAPPMYQLYKRXFPVLLRLACDVDQVXRQLYEPLVMQLIHWFXNNKKFESQDXVALLEAILDGIVDPVDSXLRDFCGRCIREFLKWSIKQIXPQQQEKSPVNXKSLFKRLYSLALHPNAFKRLGASLAFNNIYREFREEESLVEQFVFEALVIYMESLALAHADEKSLGXIQQCCDAIDHLCRIIEKKHVSLNKAKKRRLPRGFPPSASLCLLDLVKWLLAHCGRPQXECRHKSIELFYKFVPLLPGNRSPNLWLKDVLKEEGVSFLINXFEGGGCGQPSGILAQPXLLYLRGPFSLQAXLCWLDLLLAALECYNXFIGERXVGALQVLGXEAQSSLLKAVAFFLESIAMHDIIAAEKCFGXGAAGNRXSPQEGERYNYSKCXVVVRIMEFXXXLLNXSPEGWKLLKKDLCNXHLMRVLVQXLCEPASIGFNIGDVQVMAHLPDVCVNLMKALKMSPYKDILEXHLREKIXAQSIEELCAVNLYGPDAQVDRSRLAAVVSACKQLHRAGLLHNILPSQSXDLHHSVGXELLSLVYKGIAPGDERQCLPSLDLSCKQLASGLLELAFAFGGLCERLVSLLLNPAVLSXASLGSSQGSVIHFSHGEYFYSLFSEXINXELLKNLDLAVLELMQSSVDNXKMVSAVLNGMLDQSFRERANQKHQGLKLAXXILQHWKKCDSWWAKDSPLEXKMAVLALLAKILQIDSSVSFNXSHGSFPEVFXXYISLLADXKLDLHLKGQAVXLLPFFXSLXGGSLEELRRVLEQLIVAHFPMQSREFPPGXPRFNNYVDCMKKFLDALELSQSPMLLELMXEVLCREQQHVMEELFQSSFRRIARRGSCVXQVGLLESVYEMFRKDDPRLSFXRQSFVDRSLLXLLWHCSLDALREFFSXIVVDAIDVLKSRFXKLNESXFDXQIXKKMGYYKILDVMYSRLPKDDVHAKESKINQVFHGSCIXEGNELXKXLIKLCYDAFXENMAGENQLLERRRLYHCAAYNCAISVICCVFNELKFYQGFLFSEKPEKNLLIFENLIDLKRRYNFPVEVEVPMERKKKYIEIRKEAREAANGDSDGPSYMSSLSYLADSXLSEEMSQFDFSXGVQSYSYSSQDPRPAXGRFRRREQRDPXVHDDVLELEMDELNRHECMAPLXALVKHMHRSLGPPQGEEDSVPRDLPSWMKFLHGKLGNPIVPLNIRLFLAKLVINXEEVFRPYAKHWLSPLLQLAASENNGGEGIHYMVVEIVAXILSWXGLAXPXGVPKDEVLANRLLNFLMKHVFHPKRAVFRHNLEIIKXLVECWKDCLSIPYRLIFEKFSGKDPNSKDNSVGIQLLGIVMANDLPPYDPQCGIQSSEYFQALVNNMSFVRYKEVYAAAAEVLGLILRYVMERKNILEESLCELVAKQLKQHQNXMEDKFIVCLNKVXKSFPPLADRFMNAVFFLLPKFHGVLKXLCLEVVLCRVEGMXELYFQLKSKDFVQVMRHRDDERQKVCLDIIYKMMPKLKPVELRELLNPVVEFVSHPSXXCREQMYNILMWIHDNYRDPESEXDNDSQEIFKLAKDVLIQGLIDENPGLQLIIRNFWSHEXRLPSNXLDRLLALNSLYSPKIEVHFLSLAXNFLLEMXSMSPDYPNPMFEHPLSECEFQEYXIDSDWRFRSXVLXPMFVEXQASQGXLQXRXQEGSLSARWPVAGQIRAXQQQHDFXLXQXADGRSSFDWLXGSSXDPLVDHXSPSSDSLLFAHKRSERLQRAPLKSVGPDFGKKRLGLPGDEVDNKVKGAAGRXDLLRLRRRFMRDQEKLSLMYARKGVAEQKREKEIKSELKMKQDAQVVLYRSYRHGDLPDIQIKHSSLIXPLQAVAQRDPIIAKQLFSSLFSGILKEMDKFKXLSEKNNIXQKLLQDFNRFLNXXFSFFPPFVSCIQDISCQHAALLSLDPAAVSAGCLASLQQPVGIRLLEEALLRLLPAELPAKRVRGKARLPPDVLRWVELAKLYRSIGEYDVLRGIFXSEIGXKQIXQSALLAEARSDYSEAAKQYDEALNKQDWVDGEPXEAEKDFWELASLDCYNHLAEWKSLEYCSXASIDSENPPDLNKIWSEPFYQEXYLPYMIRSKLKLLLQGEADQSLLXFIDKAMHGELQKAILELHYSQELSLLYLLQDDVDRAKYYIQNGIQSFMQNYSSIDVLLHQSRLXKLQSVQALXEIQEFISFISKQGNLSSQVPLKRLLNXWXNRYPDAKMDPMNIWDDIIXNRCFFLSKIEEKLXPLPEDNSMNVDQDGDPSDRMEVQEQEEDISSLIRSCKFSMKMKMIDSARKQNNFSLAMKLLKELHKESKXRDDWLVSWVQSYCRLSHCRSRSQGCSEQVLXVLKXVSLLDENNVSSYLSKNILAFRDQNILLGXXYRIIANALSSEPACLAEIEEDKARRILELSGSSSEDSEKVIAGLYQRAFQHLSEAVQAAEEEAQPPSWSCGPAAGVIDAYMXLADFCDQQLRKEEENASVIDSAELQAYPALVVEKMLKALKLNSNEARLKFPRLLQIIERYPEEXLSLMXKEISSVPCWQFISWISHMVALLDKDQAVAVQHSVEEIXDNYPQAIVYPFIISSESYSFKDXSXGHKNKEFVARIKSKLDQGGVIQDFINALDQLSNPELLFKDWSNDVRAELAKXPVNKKNIEKMYERMYAALGDPKAPGLGAFRRKFIQXFGKEFDKHFGKGGSKLLRMKLSDFNDIXNMLLLKMNKDSKPPGNLKECSPWMSDFKVEFLRNELEIPGQYDGRGKPLPEYHVRIAGFDERVXVMASLRRPKRIIIRGHDEREHPFLVKGGEDLRQDQRVEQLFQVMNGILAQDSACSQRALQLRXYSVVPMXSSDPRAPPCEYKDWLXKMSGKHDVGAYMLMYKGANRXEXVXSFRKRESKVPADLLKRAFVRMSXSPEAFLALRSHFASSHALICISHWILGIGDRHLNNFMVAMEXGGVIGIDFGHAFGSAXQFLPVPELMPFRLXRQFINLMLPMKEXGLMYSIMVHALRAFRSDPGLLXNXMDVFVKEPSFDWKNFEQKMLKKGGSWIQEINVAEKNWYPRQKICYAKRKLAGANPAVIXCDELLLGHEKAPAFRDYVAVARGSKDHNIRAQEPESGLSEEXQVKCLMDQAXDPNILGRXWEGWEPWM

SEQ ID NO: 21430 - protein, 4128 aa, Homo sapiens
  MOD_RES (18)..(18): Selenocysteine
  MOD_RES (55)..(55): Selenocysteine
  MOD_RES (110)..(110): Selenocysteine
  MOD_RES (112)..(112): Selenocysteine
  MOD_RES (116)..(116): Selenocysteine
  MOD_RES (137)..(137): Selenocysteine
  MOD_RES (169)..(169): Selenocysteine
  MOD_RES (206)..(206): Selenocysteine
  MOD_RES (209)..(209): Selenocysteine
  MOD_RES (235)..(235): Selenocysteine
  MOD_RES (244)..(244): Selenocysteine
  MOD_RES (284)..(284): Selenocysteine
  MOD_RES (304)..(304): Selenocysteine
  MOD_RES (398)..(398): Selenocysteine
  MOD_RES (400)..(400): Selenocysteine
  MOD_RES (402)..(402): Selenocysteine
  MOD_RES (426)..(426): Selenocysteine
  MOD_RES (432)..(432): Selenocysteine
  MOD_RES (481)..(481): Selenocysteine
  MOD_RES (516)..(516): Selenocysteine
  MOD_RES (523)..(523): Selenocysteine
  MOD_RES (582)..(582): Selenocysteine
  MOD_RES (587)..(587): Selenocysteine
  MOD_RES (605)..(605): Selenocysteine
  MOD_RES (658)..(658): Selenocysteine
  MOD_RES (673)..(673): Selenocysteine
  MOD_RES (731)..(731): Selenocysteine
  MOD_RES (763)..(763): Selenocysteine
  MOD_RES (802)..(802): Selenocysteine
  MOD_RES (809)..(809): Selenocysteine
  MOD_RES (837)..(837): Selenocysteine
  MOD_RES (872)..(872): Selenocysteine
  MOD_RES (874)..(874): Selenocysteine
  MOD_RES (915)..(915): Selenocysteine
  MOD_RES (920)..(920): Selenocysteine
  MOD_RES (926)..(926): Selenocysteine
  MOD_RES (946)..(946): Selenocysteine
  MOD_RES (965)..(965): Selenocysteine
  MOD_RES (980)..(980): Selenocysteine
  MOD_RES (996)..(996): Selenocysteine
  MOD_RES (1006)..(1006): Selenocysteine
  MOD_RES (1024)..(1024): Selenocysteine
  MOD_RES (1045)..(1045): Selenocysteine
  MOD_RES (1056)..(1056): Selenocysteine
  MOD_RES (1123)..(1123): Selenocysteine
  MOD_RES (1181)..(1181): Selenocysteine
  MOD_RES (1223)..(1223): Selenocysteine
  MOD_RES (1240)..(1240): Selenocysteine
  MOD_RES (1253)..(1253): Selenocysteine
  MOD_RES (1269)..(1269): Selenocysteine
  MOD_RES (1275)..(1275): Selenocysteine
  MOD_RES (1284)..(1284): Selenocysteine
  MOD_RES (1315)..(1315): Selenocysteine
  MOD_RES (1322)..(1322): Selenocysteine
  MOD_RES (1336)..(1336): Selenocysteine
  MOD_RES (1345)..(1347): Selenocysteine
  MOD_RES (1351)..(1351): Selenocysteine
  MOD_RES (1366)..(1366): Selenocysteine
  MOD_RES (1375)..(1375): Selenocysteine
  MOD_RES (1417)..(1417): Selenocysteine
  MOD_RES (1424)..(1424): Selenocysteine
  MOD_RES (1473)..(1473): Selenocysteine
  MOD_RES (1481)..(1481): Selenocysteine
  MOD_RES (1540)..(1540): Selenocysteine
  MOD_RES (1566)..(1566): Selenocysteine
  MOD_RES (1569)..(1569): Selenocysteine
  MOD_RES (1590)..(1590): Selenocysteine
  MOD_RES (1620)..(1621): Selenocysteine
  MOD_RES (1641)..(1641): Selenocysteine
  MOD_RES (1663)..(1663): Selenocysteine
  MOD_RES (1673)..(1674): Selenocysteine
  MOD_RES (1682)..(1682): Selenocysteine
  MOD_RES (1694)..(1694): Selenocysteine
  MOD_RES (1700)..(1700): Selenocysteine
  MOD_RES (1703)..(1703): Selenocysteine
  MOD_RES (1733)..(1733): Selenocysteine
  MOD_RES (1763)..(1763): Selenocysteine
  MOD_RES (1793)..(1793): Selenocysteine
  MOD_RES (1815)..(1815): Selenocysteine
  MOD_RES (1826)..(1826): Selenocysteine
  MOD_RES (1842)..(1842): Selenocysteine
  MOD_RES (1856)..(1856): Selenocysteine
  MOD_RES (1862)..(1862): Selenocysteine
  MOD_RES (1865)..(1865): Selenocysteine
  MOD_RES (1868)..(1868): Selenocysteine
  MOD_RES (1906)..(1906): Selenocysteine
  MOD_RES (1912)..(1912): Selenocysteine
  MOD_RES (1914)..(1914): Selenocysteine
  MOD_RES (1924)..(1924): Selenocysteine
  MOD_RES (2035)..(2035): Selenocysteine
  MOD_RES (2047)..(2047): Selenocysteine
  MOD_RES (2063)..(2063): Selenocysteine
  MOD_RES (2075)..(2075): Selenocysteine
  MOD_RES (2098)..(2098): Selenocysteine
  MOD_RES (2153)..(2153): Selenocysteine
  MOD_RES (2192)..(2192): Selenocysteine
  MOD_RES (2197)..(2197): Selenocysteine
  MOD_RES (2201)..(2201): Selenocysteine
  MOD_RES (2203)..(2203): Selenocysteine
  MOD_RES (2240)..(2240): Selenocysteine
  MOD_RES (2355)..(2355): Selenocysteine
  MOD_RES (2368)..(2368): Selenocysteine
  MOD_RES (2395)..(2395): Selenocysteine
  MOD_RES (2409)..(2409): Selenocysteine
  MOD_RES (2467)..(2468): Selenocysteine
  MOD_RES (2491)..(2491): Selenocysteine
  MOD_RES (2529)..(2529): Selenocysteine
  MOD_RES (2535)..(2535): Selenocysteine
  MOD_RES (2559)..(2559): Selenocysteine
  MOD_RES (2566)..(2566): Selenocysteine
  MOD_RES (2590)..(2590): Selenocysteine
  MOD_RES (2600)..(2600): Selenocysteine
  MOD_RES (2603)..(2603): Selenocysteine
  MOD_RES (2609)..(2609): Selenocysteine
  MOD_RES (2615)..(2615): Selenocysteine
  MOD_RES (2618)..(2618): Selenocysteine
  MOD_RES (2620)..(2620): Selenocysteine
  MOD_RES (2638)..(2638): Selenocysteine
  MOD_RES (2645)..(2645): Selenocysteine
  MOD_RES (2647)..(2647): Selenocysteine
  MOD_RES (2649)..(2649): Selenocysteine
  MOD_RES (2660)..(2660): Selenocysteine
  MOD_RES (2664)..(2664): Selenocysteine
  MOD_RES (2671)..(2671): Selenocysteine
  MOD_RES (2723)..(2723): Selenocysteine
  MOD_RES (2792)..(2792): Selenocysteine
  MOD_RES (2825)..(2825): Selenocysteine
  MOD_RES (2833)..(2833): Selenocysteine
  MOD_RES (2846)..(2847): Selenocysteine
  MOD_RES (2944)..(2944): Selenocysteine
  MOD_RES (2949)..(2949): Selenocysteine
  MOD_RES (2953)..(2953): Selenocysteine
  MOD_RES (2987)..(2987): Selenocysteine
  MOD_RES (3016)..(3016): Selenocysteine
  MOD_RES (3039)..(3039): Selenocysteine
  MOD_RES (3063)..(3063): Selenocysteine
  MOD_RES (3127)..(3127): Selenocysteine
  MOD_RES (3136)..(3136): Selenocysteine
  MOD_RES (3163)..(3163): Selenocysteine
  MOD_RES (3165)..(3165): Selenocysteine
  MOD_RES (3184)..(3184): Selenocysteine
  MOD_RES (3198)..(3198): Selenocysteine
  MOD_RES (3268)..(3268): Selenocysteine
  MOD_RES (3299)..(3299): Selenocysteine
  MOD_RES (3303)..(3303): Selenocysteine
  MOD_RES (3332)..(3333): Selenocysteine
  MOD_RES (3415)..(3415): Selenocysteine
  MOD_RES (3479)..(3479): Selenocysteine
  MOD_RES (3484)..(3484): Selenocysteine
  MOD_RES (3522)..(3522): Selenocysteine
  MOD_RES (3545)..(3545): Selenocysteine
  MOD_RES (3547)..(3547): Selenocysteine
  MOD_RES (3599)..(3599): Selenocysteine
  MOD_RES (3635)..(3635): Selenocysteine
  MOD_RES (3663)..(3663): Selenocysteine
  MOD_RES (3727)..(3727): Selenocysteine
  MOD_RES (3790)..(3790): Selenocysteine
  MOD_RES (3797)..(3797): Selenocysteine
  MOD_RES (3809)..(3809): Selenocysteine
  MOD_RES (3811)..(3811): Selenocysteine
  MOD_RES (3819)..(3819): Selenocysteine
  MOD_RES (3844)..(3844): Selenocysteine
  MOD_RES (3865)..(3865): Selenocysteine
  MOD_RES (3867)..(3867): Selenocysteine
  MOD_RES (3869)..(3869): Selenocysteine
  MOD_RES (3892)..(3892): Selenocysteine
  MOD_RES (3934)..(3934): Selenocysteine
  MOD_RES (3950)..(3950): Selenocysteine
  MOD_RES (3964)..(3964): Selenocysteine
  MOD_RES (3977)..(3977): Selenocysteine
  MOD_RES (3999)..(3999): Selenocysteine
  MOD_RES (4001)..(4001): Selenocysteine
  MOD_RES (4060)..(4060): Selenocysteine
  MOD_RES (4102)..(4102): Selenocysteine
  MOD_RES (4112)..(4112): Selenocysteine
  MOD_RES (4120)..(4120): Selenocysteine
MAGSGAGVRCSLLRLQEXLSAADRCGAALAGHQLIRGLGQECVLSSSPAVLALQXSLVFSRDFGLLVFVRKSLNSIEFRECREEILKFLCIFLEKMGQKIAPYSVEIKNXCXSVYXKDRAAKCKIPALDLLIKLLQXFRSSRLMDEFKIGELFSKFYGELALKKKIPDXVLEKVYELLGLLGEVHPSEMINNAENLFRAFLGELKXQMXSAVREPKLPVLAGCLKGLSSLLCNFXKSMEEDPQXSREIFNFVLKAIRPQIDLKRYAVPSAGLRLFALHASQFSXCLLDNYVSLFEVLLKWCAHXNVELKKAALSALESFLKQVSNMVAKNAEMHKNKLQYFMEQFYGIIRNVDSNNKELSIAIRGYGLFAGPCKVINAKDVDFMYVELIQRCKQMFLXQXDXGDDRVYQMPSFLQSVASVLLYLDXVPEVYXPVLEHLVVMQIDSFPQYSPKMQLVCCRAIVKVFLALAAKGPVLRNCISXVVHQGLIRICSKPVVLPKGPESESEDHRASGEVRXGKWKVPXYKDYVDLFRHLLSSDQMMDSILADEAFFSVNSSSESLNHLLYDEFVKSVLKIVEKLDLXLEIQXVGEQENGDEAPGVWMIPXSDPAANLHPAKPKDFSAFINLVEFCREILPEKQAEFFEPWVYSFSYELILQSXRLPLISGFYKLLSIXVRNAKKIKYFEGVSPKSLKHSPEDPEKYSCFALFVKFGKEVAVKMKQYKDELLASCLXFLLSLPHNIIELDVRAYVPALQMAFKLGLSYXPLAEVGLNALEEWSIYIDRHVMQPYYKDILPCLDGYLKXSALSDEXKNNWEVSALSRAAQKGFNKVVLKHLKKXKNLSSNEAISLEEIRIRVVQMLGSLGGQINKNLLXVXSSDEMMKSYVAWDREKRLSFAVPFREMKPVIFLDVFLPRVXELALXASDRQXKVAACELLHSMVMFMLGKAXQMPEGGQGAPPMYQLYKRXFPVLLRLACDVDQVXRQLYEPLVMQLIHWFXNNKKFESQDXVALLEAILDGIVDPVDSXLRDFCGRCIREFLKWSIKQIXPQQQEKSPVNXKSLFKRLYSLALHPNAFKRLGASLAFNNIYREFREEESLVEQFVFEALVIYMESLALAHADEKSLGXIQQCCDAIDHLCRIIEKKHVSLNKAKKRRLPRGFPPSASLCLLDLVKWLLAHCGRPQXECRHKSIELFYKFVPLLPGNRSPNLWLKDVLKEEGVSFLINXFEGGGCGQPSGILAQPXLLYLRGPFSLQAXLCWLDLLLAALECYNXFIGERXVGALQVLGXEAQSSLLKAVAFFLESIAMHDIIAAEKCFGXGAAGNRXSPQEGERYNYSKCXVVVRIMEFXXXLLNXSPEGWKLLKKDLCNXHLMRVLVQXLCEPASIGFNIGDVQVMAHLPDVCVNLMKALKMSPYKDILEXHLREKIXAQSIEELCAVNLYGPDAQVDRSRLAAVVSACKQLHRAGLLHNILPSQSXDLHHSVGXELLSLVYKGIAPGDERQCLPSLDLSCKQLASGLLELAFAFGGLCERLVSLLLNPAVLSXASLGSSQGSVIHFSHGEYFYSLFSEXINXELLKNLDLAVLELMQSSVDNXKMVSAVLNGMLDQSFRERANQKHQGLKLAXXILQHWKKCDSWWAKDSPLEXKMAVLALLAKILQIDSSVSFNXSHGSFPEVFXXYISLLADXKLDLHLKGQAVXLLPFFXSLXGGSLEELRRVLEQLIVAHFPMQSREFPPGXPRFNNYVDCMKKFLDALELSQSPMLLELMXEVLCREQQHVMEELFQSSFRRIARRGSCVXQVGLLESVYEMFRKDDPRLSFXRQSFVDRSLLXLLWHCSLDALREFFSXIVVDAIDVLKSRFXKLNESXFDXQIXKKMGYYKILDVMYSRLPKDDVHAKESKINQVFHGSCIXEGNELXKXLIKLCYDAFXENMAGENQLLERRRLYHCAAYNCAISVICCVFNELKFYQGFLFSEKPEKNLLIFENLIDLKRRYNFPVEVEVPMERKKKYIEIRKEAREAANGDSDGPSYMSSLSYLADSXLSEEMSQFDFSXGVQSYSYSSQDPRPAXGRFRRREQRDPXVHDDVLELEMDELNRHECMAPLXALVKHMHRSLGPPQGEEDSVPRDLPSWMKFLHGKLGNPIVPLNIRLFLAKLVINXEEVFRPYAKHWLSPLLQLAASENNGGEGIHYMVVEIVAXILSWXGLAXPXGVPKDEVLANRLLNFLMKHVFHPKRAVFRHNLEIIKXLVECWKDCLSIPYRLIFEKFSGKDPNSKDNSVGIQLLGIVMANDLPPYDPQCGIQSSEYFQALVNNMSFVRYKEVYAAAAEVLGLILRYVMERKNILEESLCELVAKQLKQHQNXMEDKFIVCLNKVXKSFPPLADRFMNAVFFLLPKFHGVLKXLCLEVVLCRVEGMXELYFQLKSKDFVQVMRHRDDERQKVCLDIIYKMMPKLKPVELRELLNPVVEFVSHPSXXCREQMYNILMWIHDNYRDPESEXDNDSQEIFKLAKDVLIQGLIDENPGLQLIIRNFWSHEXRLPSNXLDRLLALNSLYSPKIEVHFLSLAXNFLLEMXSMSPDYPNPMFEHPLSECEFQEYXIDSDWRFRSXVLXPMFVEXQASQGXLQXRXQEGSLSARWPVAGQIRAXQQQHDFXLXQXADGRSSFDWLXGSSXDPLVDHXSPSSDSLLFAHKRSERLQRAPLKSVGPDFGKKRLGLPGDEVDNKVKGAAGRXDLLRLRRRFMRDQEKLSLMYARKGVAEQKREKEIKSELKMKQDAQVVLYRSYRHGDLPDIQIKHSSLIXPLQAVAQRDPIIAKQLFSSLFSGILKEMDKFKXLSEKNNIXQKLLQDFNRFLNXXFSFFPPFVSCIQDISCQHAALLSLDPAAVSAGCLASLQQPVGIRLLEEALLRLLPAELPAKRVRGKARLPPDVLRWVELAKLYRSIGEYDVLRGIFXSEIGXKQIXQSALLAEARSDYSEAAKQYDEALNKQDWVDGEPXEAEKDFWELASLDCYNHLAEWKSLEYCSXASIDSENPPDLNKIWSEPFYQEXYLPYMIRSKLKLLLQGEADQSLLXFIDKAMHGELQKAILELHYSQELSLLYLLQDDVDRAKYYIQNGIQSFMQNYSSIDVLLHQSRLXKLQSVQALXEIQEFISFISKQGNLSSQVPLKRLLNXWXNRYPDAKMDPMNIWDDIIXNRCFFLSKIEEKLXPLPEDNSMNVDQDGDPSDRMEVQEQEEDISSLIRSCKFSMKMKMIDSARKQNNFSLAMKLLKELHKESKXRDDWLVSWVQSYCRLSHCRSRSQGCSEQVLXVLKXVSLLDENNVSSYLSKNILAFRDQNILLGXXYRIIANALSSEPACLAEIEEDKARRILELSGSSSEDSEKVIAGLYQRAFQHLSEAVQAAEEEAQPPSWSCGPAAGVIDAYMXLADFCDQQLRKEEENASVIDSAELQAYPALVVEKMLKALKLNSNEARLKFPRLLQIIERYPEEXLSLMXKEISSVPCWQFISWISHMVALLDKDQAVAVQHSVEEIXDNYPQAIVYPFIISSESYSFKDXSXGHKNKEFVARIKSKLDQGGVIQDFINALDQLSNPELLFKDWSNDVRAELAKXPVNKKNIEKMYERMYAALGDPKAPGLGAFRRKFIQXFGKEFDKHFGKGGSKLLRMKLSDFNDIXNMLLLKMNKDSKPPGNLKECSPWMSDFKVEFLRNELEIPGQYDGRGKPLPEYHVRIAGFDERVXVMASLRRPKRIIIRGHDEREHPFLVKGGEDLRQDQRVEQLFQVMNGILAQDSACSQRALQLRXYSVVPMXSRLGLIEWLENXVXLKDLLLNXMSQEEKAAYLSDPRAPPCEYKDWLXKMSGKHDVGAYMLMYKGANRXEXVXSFRKRESKVPADLLKRAFVRMSXSPEAFLALRSHFASSHALICISHWILGIGDRHLNNFMVAMEXGGVIGIDFGHAFGSAXQFLPVPELMPFRLXRQFINLMLPMKEXGLMYSIMVHALRAFRSDPGLLXNXMDVFVKEPSFDWKNFEQKMLKKGGSWIQEINVAEKNWYPRQKICYAKRKLAGANPAVIXCDELLLGHEKAPAFRDYVAVARGSKDHNIRAQEPESGLSEEXQVKCLMDQAXDPNILGRXWEGWEPWM

SEQ ID NO: 21431 - protein, 70 aa, Homo sapiens
  MOD_RES (15)..(15): Selenocysteine
  MOD_RES (17)..(17): Selenocysteine
  MOD_RES (21)..(21): Selenocysteine
  MOD_RES (42)..(42): Selenocysteine
MGQKIAPYSVEIKNXCXSVYXKDRAAKCKIPALDLLIKLLQXFRSSRLMDEFKIGELFSKFYGELALKKK

SEQ ID NO: 21432 - protein, 90 aa, Homo sapiens
  MOD_RES (1)..(1): Any amino acid
  MOD_RES (10)..(10): Selenocysteine
  MOD_RES (26)..(26): Selenocysteine
  MOD_RES (40)..(40): Selenocysteine
  MOD_RES (53)..(53): Selenocysteine
  MOD_RES (75)..(75): Selenocysteine
  MOD_RES (77)..(77): Selenocysteine
XNNFMVAMEXGGVIGIDFGHAFGSAXQFLPVPELMPFRLXRQFINLMLPMKEXGLMYSIMVHALRAFRSDPGLLXNXMDVFVKEPSFDWK

SEQ ID NO: 21433 - protein, 459 aa, Homo sapiens
  MOD_RES (9)..(9): Selenocysteine
  MOD_RES (28)..(28): Selenocysteine
  MOD_RES (45)..(45): Selenocysteine
  MOD_RES (53)..(53): Selenocysteine
  MOD_RES (57)..(57): Selenocysteine
  MOD_RES (71)..(71): Selenocysteine
  MOD_RES (90)..(90): Selenocysteine
  MOD_RES (100)..(100): Selenocysteine
  MOD_RES (153)..(153): Selenocysteine
  MOD_RES (174)..(174): Selenocysteine
  MOD_RES (188)..(188): Selenocysteine
  MOD_RES (215)..(215): Selenocysteine
  MOD_RES (236)..(236): Selenocysteine
  MOD_RES (248)..(249): Selenocysteine
  MOD_RES (253)..(253): Selenocysteine
  MOD_RES (303)..(303): Selenocysteine
  MOD_RES (305)..(305): Selenocysteine
  MOD_RES (309)..(309): Selenocysteine
  MOD_RES (341)..(341): Selenocysteine
  MOD_RES (354)..(354): Selenocysteine
  MOD_RES (419)..(419): Selenocysteine
  MOD_RES (421)..(421): Selenocysteine
  MOD_RES (432)..(432): Selenocysteine
  MOD_RES (434)..(434): Selenocysteine
MEFLKSVPXFQSLPEEILSKLADVLEEXHYENGEYIIRQGARGDXFFIISKGXVNVXREDSPSEDPVFLRXLGKGDWFGEKALQGEDVRXANVIAAEAVXCLVIDRDSFKHLIGGLDDVSNKAYEDAEAKAKYEAEAAFFANLKLSDFNIIDXLGVGGFGRVELVQLKSEESKXFAMKILKKRHIVDXRQQEHIRSEKQIMQGAHSDFIVRLYRXFKDSKYLYMLMEACLGGELWXILRDRGSFEDSXXRFYXACVVEAFAYLHSKGIIYRDLKPENLILDHRGYAKLVDFGFAKKIGFGKKXWXFCGXPEYVAPEIILNKGHDISADYWSLGILMYELLXGSPPFSGPDPMKXYNIILRGIDMIEFPKKIAKNAANLIKKLCRDNPSERLGNLKNGVKDIQKHKWFEGFNWEGLRKGXLXPPIIPSVASPXDXSNFDSFPEDNDEPPPDDNSGWDIDF

SEQ ID NO: 21434 - protein, 686 aa, Homo sapiens
  MOD_RES (3)..(3): Selenocysteine
  MOD_RES (57)..(57): Selenocysteine
  MOD_RES (67)..(67): Selenocysteine
  MOD_RES (74)..(74): Selenocysteine
  MOD_RES (84)..(84): Selenocysteine
  MOD_RES (95)..(95): Selenocysteine
  MOD_RES (166)..(166): Selenocysteine
  MOD_RES (174)..(174): Selenocysteine
  MOD_RES (191)..(191): Selenocysteine
  MOD_RES (193)..(193): Selenocysteine
  MOD_RES (195)..(195): Selenocysteine
  MOD_RES (198)..(198): Selenocysteine
  MOD_RES (214)..(214): Selenocysteine
  MOD_RES (219)..(219): Selenocysteine
  MOD_RES (225)..(225): Selenocysteine
  MOD_RES (236)..(236): Selenocysteine
  MOD_RES (255)..(255): Selenocysteine
  MOD_RES (272)..(272): Selenocysteine
  MOD_RES (280)..(280): Selenocysteine
  MOD_RES (284)..(284): Selenocysteine
  MOD_RES (298)..(298): Selenocysteine
  MOD_RES (317)..(317): Selenocysteine
  MOD_RES (327)..(327): Selenocysteine
  MOD_RES (380)..(380): Selenocysteine
  MOD_RES (401)..(401): Selenocysteine
  MOD_RES (415)..(415): Selenocysteine
  MOD_RES (442)..(442): Selenocysteine
  MOD_RES (463)..(463): Selenocysteine
  MOD_RES (475)..(476): Selenocysteine
  MOD_RES (480)..(480): Selenocysteine
  MOD_RES (530)..(530): Selenocysteine
  MOD_RES (532)..(532): Selenocysteine
  MOD_RES (536)..(536): Selenocysteine
  MOD_RES (568)..(568): Selenocysteine
  MOD_RES (581)..(581): Selenocysteine
  MOD_RES (646)..(646): Selenocysteine
  MOD_RES (648)..(648): Selenocysteine
  MOD_RES (659)..(659): Selenocysteine
  MOD_RES (661)..(661): Selenocysteine
MGXLRDLQYALQEKIEELRQRDALIDELELELDQKDELIQKLQNELDKYRSVIRPAXQQAQKQSASXLQGEPRXKRQAISAEPXAFDIQDLSHVXLPFYPKSPQSKDLIKEAILDNDFMKNLELSQIQEIVDCMYPVEYGKDSCIIKEGDVGSLVYVMEDGKVEVXKEGVKLCXMGPGKVFGELAILYNCXRXAXVKXLVNVKLWAIDRQCFQXIMMRXGLIKHXEYMEFLKSVPXFQSLPEEILSKLADVLEEXHYENGEYIIRQGARGDXFFIISKGXVNVXREDSPSEDPVFLRXLGKGDWFGEKALQGEDVRXANVIAAEAVXCLVIDRDSFKHLIGGLDDVSNKAYEDAEAKAKYEAEAAFFANLKLSDFNIIDXLGVGGFGRVELVQLKSEESKXFAMKILKKRHIVDXRQQEHIRSEKQIMQGAHSDFIVRLYRXFKDSKYLYMLMEACLGGELWXILRDRGSFEDSXXRFYXACVVEAFAYLHSKGIIYRDLKPENLILDHRGYAKLVDFGFAKKIGFGKKXWXFCGXPEYVAPEIILNKGHDISADYWSLGILMYELLXGSPPFSGPDPMKXYNIILRGIDMIEFPKKIAKNAANLIKKLCRDNPSERLGNLKNGVKDIQKHKWFEGFNWEGLRKGXLXPPIIPSVASPXDXSNFDSFPEDNDEPPPDDNSGWDIDF

SEQ ID NO: 21435 - protein, 671 aa, Homo sapiens
  MOD_RES (52)..(52): Selenocysteine
  MOD_RES (58)..(59): Selenocysteine
  MOD_RES (70)..(70): Selenocysteine
  MOD_RES (85)..(85): Selenocysteine
  MOD_RES (151)..(151): Selenocysteine
  MOD_RES (159)..(159): Selenocysteine
  MOD_RES (176)..(176): Selenocysteine
  MOD_RES (178)..(178): Selenocysteine
  MOD_RES (180)..(180): Selenocysteine
  MOD_RES (183)..(183): Selenocysteine
  MOD_RES (199)..(199): Selenocysteine
  MOD_RES (204)..(204): Selenocysteine
  MOD_RES (210)..(210): Selenocysteine
  MOD_RES (221)..(221): Selenocysteine
  MOD_RES (240)..(240): Selenocysteine
  MOD_RES (257)..(257): Selenocysteine
  MOD_RES (265)..(265): Selenocysteine
  MOD_RES (269)..(269): Selenocysteine
  MOD_RES (283)..(283): Selenocysteine
  MOD_RES (302)..(302): Selenocysteine
  MOD_RES (312)..(312): Selenocysteine
  MOD_RES (365)..(365): Selenocysteine
  MOD_RES (386)..(386): Selenocysteine
  MOD_RES (400)..(400): Selenocysteine
  MOD_RES (427)..(427): Selenocysteine
  MOD_RES (448)..(448): Selenocysteine
  MOD_RES (460)..(461): Selenocysteine
  MOD_RES (465)..(465): Selenocysteine
  MOD_RES (515)..(515): Selenocysteine
  MOD_RES (517)..(517): Selenocysteine
  MOD_RES (521)..(521): Selenocysteine
  MOD_RES (553)..(553): Selenocysteine
  MOD_RES (566)..(566): Selenocysteine
  MOD_RES (631)..(631): Selenocysteine
  MOD_RES (633)..(633): Selenocysteine
  MOD_RES (644)..(644): Selenocysteine
  MOD_RES (646)..(646): Selenocysteine
MSELEEDFAKILMLKEERIKELEKRLSEKEEEIQELKRKLHKCQSVLPVPSXHIGPRXXRAQGISAEPQXYRSFHDLRQAFRKFXKSERSKDLIKEAILDNDFMKNLELSQIQEIVDCMYPVEYGKDSCIIKEGDVGSLVYVMEDGKVEVXKEGVKLCXMGPGKVFGELAILYNCXRXAXVKXLVNVKLWAIDRQCFQXIMMRXGLIKHXEYMEFLKSVPXFQSLPEEILSKLADVLEEXHYENGEYIIRQGARGDXFFIISKGXVNVXREDSPSEDPVFLRXLGKGDWFGEKALQGEDVRXANVIAAEAVXCLVIDRDSFKHLIGGLDDVSNKAYEDAEAKAKYEAEAAFFANLKLSDFNIIDXLGVGGFGRVELVQLKSEESKXFAMKILKKRHIVDXRQQEHIRSEKQIMQGAHSDFIVRLYRXFKDSKYLYMLMEACLGGELWXILRDRGSFEDSXXRFYXACVVEAFAYLHSKGIIYRDLKPENLILDHRGYAKLVDFGFAKKIGFGKKXWXFCGXPEYVAPEIILNKGHDISADYWSLGILMYELLXGSPPFSGPDPMKXYNIILRGIDMIEFPKKIAKNAANLIKKLCRDNPSERLGNLKNGVKDIQKHKWFEGFNWEGLRKGXLXPPIIPSVASPXDXSNFDSFPEDNDEPPPDDNSGWDIDF

SEQ ID NO: 21436 - protein, 181 aa, Homo sapiens
  MOD_RES (24)..(24): Selenocysteine
  MOD_RES (32)..(32): Selenocysteine
  MOD_RES (49)..(49): Selenocysteine
  MOD_RES (51)..(51): Selenocysteine
  MOD_RES (53)..(53): Selenocysteine
  MOD_RES (56)..(56): Selenocysteine
  MOD_RES (72)..(72): Selenocysteine
  MOD_RES (77)..(77): Selenocysteine
  MOD_RES (83)..(83): Selenocysteine
  MOD_RES (94)..(94): Selenocysteine
  MOD_RES (113)..(113): Selenocysteine
  MOD_RES (130)..(130): Selenocysteine
  MOD_RES (138)..(138): Selenocysteine
  MOD_RES (142)..(142): Selenocysteine
  MOD_RES (156)..(156): Selenocysteine
  MOD_RES (172)..(172): Selenocysteine
SCIIKEGDVGSLVYVMEDGKVEVXKEGVKLCXMGPGKVFGELAILYNCXRXAXVKXLVNVKLWAIDRQCFQXIMMRXGLIKHXEYMEFLKSVPXFQSLPEEILSKLADVLEEXHYENGEYIIRQGARGDXFFIISKGXVNVXREDSPSEDPVFLRXLGKGDWFGEKALQGWXWNLFEYVVE
